United States Patent Application Publication US 2011/0191912 A1 - sequence listing, part 6

SEQ ID NO: 6107 - DNA, 3000 bp, Unknown
  misc_feature (1)..( 3000): cDNA_ID_2106758_gDNA_ID_1620845_Annot_ID_170192 3000 nt of promoter + ATG
aacgaccttttcgacatagcttcttgccatatctccaagaactcctccatcaatttttttgccattcccattgatgatataggaagatactccacctaaatagtacacacacataattataggtttcaaatgaaagtagtgcataatagcataatggcataagttgatagcactaaaaattcgtataatgaaaacttgttgcatggaaaaccgtagattatgcaaattttcttaattgacaaattttctgcctaatcacattagaaaccgtcattatgtgtgttaccaatcatagctaataacctttagttactgagttacattacaaactccaaattatgaattaactagagtgttagataatcattaacattgattattaatatatctcaacgtactcaaaagatataaaatttgttacctccatgactacgcctctaatggtctcagcatgagtaggaacaactttaccaactctcaaacgaaaatccccaagttgatactcaagcccttcaaagtaaaacgagagtttgcatttgtaagactgaaggctctccatgatcatttgaattgaagaatctgcttccacgacgatcctttgcgacctgatgacgaaatagtacttatctggctcctccggaagcgaaattcctacaaattcacgcgggaactcagcttgattcgcctgatcttgcaacatgggtttgtaatagttgagagtggctttccatgttccctctttgacgccattgagactctctatgctttgtgttacttcgtttaggatttggctgctaaatgttgatccctgatttggttgccaatgcaaaagcctggaaaagtattcccccaaagaaatttgaaaaaaggttaacgtattataaaagaaattacaataatggttatttagtttatgtaatcatcaaacctaccatttgacgggcatggctaatggaggtacaacaaatttcacttgacaacaaaattaaaaaaaaatgatctctattaatttacaataatacacaaacaataatatcttatataatatagttgtattcagatatataatttaccaaaaaacaaaatgataaaactttacaataaagcaaaaaattatttaatcaaaaaatactttttgatagaatttcaatcagtgttcataaggaaaatacatttaaatgctcaaatggagttcatttttttaatcatttctttcatttgaaatagaacgtggtctatatggaaaggaaaatttatttttaaaagtaatttacagaccaaaaataatacatatgcatcaactttggaatcataatacaaatttcattttttaataaataattataacatagagaataattagatattttagtgcatgtgcacaattacataagtgtactcacccttatcaagataaaagggaagaaaatataaattcttataagaaaaaaataaagtaacttttgactttaaataaaaaggaaacaaatctaagaaattaatgttataattaaattatttaccaaaattaattgaaaaataagaaacatttttttacaaaaactaaagaaattcattagatctgctatgagtatccgtttgggatcacacgttctgtgatagtagtagatcgacaacagattaactaaacgaatcaaatatgaaatatatcacttcttgaatacaatctaaatataaaattcatacatctcggataaacaactcaattctgcttctaagtatatttagtttataaaacgatgctttttatctttatcttatctaaatcattttaaaaagatgagttgaaggcatagtaaagacttttaggcttaataatcatcgagccataaaaacaaaatacaagattagattgcgagaaacacttaccgatgaaagagatttctggtgatgatcttcttgggaatacgtagtataacgaaaaattaagactcgtacactgcattatatagagaaaagcataggagtttgtttgttttactaagataaaacgacctcgtttaaactacctcatttaaaacgacttcgtgtaaaattatgtgtttcttaaaatgaccttgtttttaaaaaggttttcttaggaaatgagtggtgaaaacatgaatgaatctaaccgaacttatccaaattcgaataatactaatagtttaaaatcttataaatagaattattggaactgaaccttaaatcaaatttaaattttatgaaactgaacaaaattaactgaacgaatcaaaattcctaatgtatatatctcatctaatcatctaaataaaaataaaggtttgattcatgtttcttctcatctttcgttcattttttatgcatagtcatgaaacattaaggtttcattccacccaatgatataatttttttttatcctagtacactcaaaaaatgaaaaatttatatagaaataaattggaaattgatacaattatataattgaatgatacgcttttgcttaatactagtcaagatgaaaaaataaaaataaaccaataaaaaaaattgagctgaaaatagaggaaaaataattacttagttgataattatttgtttgatataatgacattaaattgtaattttaggtaatcactttttgttgatatttaaaatacgtttttaaacaaaaacaaaaccgaaataaaaaaccaactcgaacaaaaaccgaattgtgtcaaaccgaacagagaaaaaaaaaagttttccacaagtaaaaccgacaaaataaaccaaaccggatcccaaaaaccataaccaaaaaattgcattaggagccaaatatttccgccacttaaaacatgccacgtaggcacgaatcgatcgatgcaataacttttgtaacggctacaaacttctgatttcatttttgaaattcttctcttccgtctcttttactaattcccctttcttcttcttcctattgaaaccctaaattctcttcttgaaatccaaatcttgtttcaagagtaaacc

SEQ ID NO: 6108 - DNA, 3000 bp, Unknown
  misc_feature (1)..( 3000): cDNA_ID_2138913_gDNA_ID_1620845_Annot_ID_170186 3000 nt of promoter + ATG
aaaaagaaattcacgaaagattttataaaattcatgaaggatttaagaaattcatgaagggtttcaagaaattcagaattaaacttttttttttttgtaacccttccttaatttcatgataatttttcatgaattttgtaaaatcttttctgaattttgtggaaactttcaaggaaatttaggaagacttctacaaaactaaggaagggtttcacgaaagatttttttttgtgaaatccttcttgaattttgtaaaatctttcttgaatttcgtgaaattttttccagttttcgtagaatccttcctaaattttcttatgtggaaaaaatttgacggaatgttttgacaaaaattgtttttggcgggaaagtttttacggaattttttttggcgggaaaatttgacaaaaaaaaattcacggaaaaatttgaaagatttttttttcacggaaaactttgactgataatttttttaattaggtgctattttaggaagaaaatgttttgagtgctatttgtagatattttcaaatgaggtgctatttttggaagaaaatgttttgagtgctatttgtagatattttcaaatgaggtgctatttttggaagaaattttgtgtgctaattgtgtcaatctttttttttttgttaaccgatattaattagagctcaacaaagtcaattcacgtaaaatgttgtttacatatgtgatatattgtggttcaatataattttttttgtgcaaaattatccgtatttatatttgcactatgaaatattaaaggtaaataaaaacttatgaattcttctttattaattccttcaaatatactgagaataataattcttgtaaactagagaaattttaacattaacctatttttctattttctttgggagtttcctattaaggtaactttaagaatagaaactagttatgtatttaaaacgatacaaactaggatatctaaattgtattaaaaagattgtacattcaaaatttgtatacgagatcttcaaattttgtatataaacatcgaattatataaaatatttttaataactaaaaaaaaatatttgtatctttggcggtcaactaaacctttttttatagcatatatatatgatatataaagtttctttatgatataattatctatctaacatttaagattgtattaaagtttcgaattttatgtctacgtaattttgtttcctttcattttatacacaatgttgtattgtttgtacatgaattcttttcaaaataattttttagatatcattcatataaaatagagctaatgagataataaattaccttgaaggcttgaacattgtcgagacaaaagttgaaaacagaaggacaaaagatcactgtcaaataattattaatacatcagaaaaataattaaaaacgataatattgttttcagtattcacctacacataatatgaatatcatgtttacatatttcgaccttttttgatcggttctaataatctatatctcaaaactaaccaatctcatctagattccgtcaaattaagtttagtctataattacgaaactaaaaaatattagcaaatgggaaagtgctagagtcattgcactagtttattatgtgaaacacgaagaaacacggtggcgcgtagaaatcacctagaaactacgaagaagacgtgaaccccacgtctctctttcttcttcttctttctctatctcttcccattacaaaactcaagaagatgttaaagtacgaaacatgtcatacttcaaaagaaacgaaggaacaattgtgtttgcgtttgcgagcatcgggttcatagcgttttatatcattaattactacattcggcgatgcagaaaccgtgccgcagcagccggggacattgaggaagctcgaatgagtccgaggaggccaccgcgaggacttgacgctgaagccatcaagtcgtttccttcattcgtttacacggaagctagaggaattgagccaggaataggcgagctagaatgtgttgtgtgtttgaatgaattcaaagacgatgaaacgctgcgtttggtaccaccttgtgtacatgtgtttcatgctgactgtgtagacatctggctttctcatagctccacatgtcctatctgtcgtgctaaagtagttccttaatacgagtctcttaattagccttttactatgcattttgcgttacatagttctccctttgtaaataaattatctttatagtgttgatattttaccaaccgtaatgatgatactactccatggaaggaaataatctacaaaggaattgaggcatattgaattattcaatgtcatgatgatgatgatgaattagactagaaaatgacaaaaacatagtttatctctttggttacttgttcatgtattacacactaaacacatctatttggctttggagagggaccacctatcatgctgtgtacaacaaatatgtatatatgtaagttacaagttaatgaaacgttcggatatatagttatataccatactttgaaggctttaattagttactcatatgatgtaaacatttgttatggtgcgaataatctagcaccaaatacataaaccttattggtccgtcacattccattgagaggacgtgaacatcagagggatgtgactgaccaataaggattaggtcaaaactgttggaaaagtcttgttgcgtagatcaacaagttaatagagagggcatgagtaatgtagtacttgttctacgtctatagtgacgtaaagacttcttcaaaagtcaaaacgttagaggaagaagccaaatcaatcattccgaccaaaactaatctaactaaacatagtagtaatacaatatgtattgtcgtgacgagtacaaaccaaaatgtgtttagtattataaaaacggcttgttcgtattctcttctctcgctcaacacatgaagctcaagtgatccaccgtggttagcaaaaggacggttcacatcatg

SEQ ID NO: 6109 - DNA, 3000 bp, Unknown
  misc_feature (1)..( 3000): cDNA_ID_2138897_gDNA_ID_1620845_Annot_ID_170182 3000 nt of promoter + ATG
gtaaatgggtgtttcgtctaaaatacaaatctgacggcacacttgaacgacacaaagcacgtttggttgttcttggtaacaatcaaaccgaaggtcttgattacacagaaacttttgctccggttgcgaaaatggtcacagtccgcgcttttcttcagcaagttgtttcacttgactgggaggttcatcaaatggatgttcacaacgcgtttctccatggtgatcttgacgaagaggtatacatgcaatttcctccgagatttcgtactggtgacaagacaaaagtatgtcgtttacgcaaatctttgtatggtctcaaacaagctcctcgttgttggttcgcaaagctcacatcggcattgaagaactacggttttattcaagatatttcagattactctttgtttatctttcacaaaaacggagttcgacttcatgttttagtatacgtggacgatttgatcatcacgggtactactattgctgtgattacagagtttaaacattacttaagctcttgtttctatatgaaggatcttggaattttgcggtacttcttgggaattgaggttgctcggagtcctgaaggtatctacttatgccaacgaaagtacgcacttgacattatcacagaaacgggtctccttggtgttaaaccggcttcttttccattggaacaaaatcataagcttgcttttgccactggtgaaacaatagacgacccacttcgataccgtcgtctagttgggcgcattatttatcttgcgactacgaggcctgaattatcatatgttattcatattctctcacagttcatgcataatcctaaaccggctcattgggaagctgctcttcgcgtcgtcagatatctaaagtctagtcctggtcaaggtattctcctacgtgctaatacacctttggttctctctgcctggtgcgattcagactttggagcatgtcctcattcagatcgatctctcaccggttggtttattcagttgggtggctctcctttatcttggaagacacagaaacaaaatgttatttcccgctcttctgccaaagctgaatacagggctatggcagaaacagtgagtgaaatcatatggatccgtgaattacttcccgctctcggtattccgtgtactgctcctaccacactccattcagatagtttatcagccataagtcttgctgctaatcctgtctatcatgctcgcactaaacatgtgcgtcgagacgtccatttcattcgcgatgagctcgtcaatggcactatcgctactaagcacgtctcaaccacttctcagctagcggacattctcactaaagccttaggacgaaaagagtttgcagactttcttgccaagcttggtatctgcaatctccatataccagcttgaggaggggtgttgggctgtgtggccttagcccatttatattgtataaattaactaggtctaaacttatcgtgtatataaaggcattgcctcttgccgtaatcaataagaatcttcttttcacaacctcgattgattcttgacaatatatataactaggaggaggcgtaaaaggagaaaacaggtaattttttgctcttgtacctttgatatttttactgaaagtgaagcttatggtgattacacttgtggtctacaggagcagaacattgagagtgggtcgagtattggaaacgcttcaagatgttcttggaaccatatgggacttcttgcattgtgatgcctaataaagaaccatatgatgatgttgttcgtattgttgggtttctcttttactttctgttgtctcttttgtagaataaataatgttttgggtaatgaatgatttaacttgcttgtgaccaaaaaaataaaataaaaatgttgttttgttacgagtcatttcgattgcagatacaatgtaacagtcttcacacattgaacaaaacaaaacctaagttaaacaaataactgtttctttaagtctttaaccatgaatctggcctttattagtaaatagtaatagtggttattgtaacatgagcaacatacgtcatactagccaaccaatgtctctcttcttaaactcatcgaactaaagagaggtcaaatcctcatacttactcggcctcgatgtgaattcacgttataataagaaacaaggaaaacacaaactaatcattttcttagtcctaggtgttcggttttaaaatttagtatcattcaagtattttgaaatcttcattttggtttggatccggttcttttgtttttaaaatttagtatcaatttggttatttttccttggatattttgattatttttgattattttcggatatttttttgttatttttgagtattttactttttctatttttattttaaaatttttgattttttgatcaataaataattaatattttgggtatttttggttaccaaaaatatttcagttcggtaccaattataatttttttttgttatataataatatagtatacatccaattatttttaaatttttgattttgttcgattctttttgcttcggttccaattcagtagcttcgattcagtttaattgcctagacctacattttctattagaactgacacaaaaacaaaattggcgtcgcttataaggtctacaatatatggttggcctctggcccaatagtaagcccatatattaaccgacgtcggtttatagccccgataaacacaaacaatatagataagatagtttcttctacttcaaaaaatggatgctttcagaaatttccagaaattacgggtccaattgagaaaaacgcgtatcgtcgtcttcttcatcaaaagcgaacaatttcgaaaacaaacctaacgaacaaaaatcaaatcttctctctgttaaaatctcaccgactagagaaaagctttgttttttccaattaaagttacattttttgtttgaacaaatcactttctgtgatctacatttgtgtggtcgtgaaatcaatg

SEQ ID NO: 6110 - DNA, 3000 bp, Unknown
  misc_feature (1)..( 3000): cDNA_ID_2138881_gDNA_ID_1620845_Annot_ID_170177 3000 nt of promoter + ATG
tcaatatgtatatgaattactatcttcacaattttttacaaaaagctaccactctctctatttttctgcaatcactcgttttatttgttttattttttcttacagtttctctttccatcctcttataattttgtctaaacaatatgtgccataccttctaaacttttcatatgctccatatttcttcttcgaaaatctcttacttttcttgttagtataagcattttttaagctcgtcaagatgtactctgttttgttttctgttattctaagaaaatgttttaccttctaaactggtacttaactctatcacttttctcttttgatgcagtttagatccttttcaccttcacgctttccagactgaaagacctcaatttatatcttcgagaatttgattcaaattgatacgattaaaaacaccactatcaaaccacgtcattgttacgtttctttaagttatattaaaaaatgttggattagttgtataaaattctagaaaaattctttctaatgcccttttcattatgcccctttttaactttaccctttttttagccattttcatttttaccctctttagccattatgaccattttacccctatttgaaaattgttttaggttaacaaaataaaatattaatatttttcgcctaaaatatccaaaataaatttcccgccaaaaaaattcgaaaaaaattaccgccaaaaagttttttgtcaaaactagttttctcgcaaaaaaaatattttttggcgggaaatagatttacaagggattttaaaagggtttaaaaagatttacaagaaattttaaaagagttttaaaagatttacaagggattttaaaagggttttaaaatatttacaaggattttaaaagagttttttaaaagatttacaagggattttaaagtgctttaaaagatttacaaagcttttttaaagatttttaaagggttaaaaattgttttaaaaaggttttaaaatatttacaagggattttaaaagagttttaaaagatttacaaggtattttaaaagggttttaaaatatttacaagggattttaaagggctttaaaagatttacaaaggttttttaaagatttttaaatggtttaaaagtgttttaaaagatttacaaggtattttaaaaggatttcaaaagatttacaagagatttttaaagatgtacaagtgtttttaaaagatatttaaagaatttacaagaagaccctttaaaaactcttgtaaatattttaaaatcttttaaaatctcttataaatctcttaaaatacttttaaaatctcttgtaaattttttaaaacccttttaaaatcccttgtaaatattttaaaacccttttaaaatctcttgaaaatatattttttcccaaaacaattttacaaggatttgcataatcatttttttggcgggatttttctttttggtgggaaaaaagtttgccagaaaatttttttggcgagaaaaataaatttttggtgcaaaaatttggtgggaaaatttcagtttctaattacatgttcctattagatgaggataatttggtcattctgttcaagggaaatggtatttttaaaaaaggacaacataaaaagatattgttgcaaaagggtagtaaaaaaagagtagttttgcaaatctcccaaaattctgtaagggtttaggtttaatattatttaattataattatattgcttccttttttataagtttaaatttaatatttgttattttcgttttttattttaaattttaaaatggaaagtaattattatttttaaaaatgttaattaattagatgttaaatatgttaattattgatgtgacagcttccgattagttgttttaaaaaatgttaaataattaaatgctaaatatgttaattattgatgtggcagctttcgattggtcgttctaaatcctatgtggacggctttagaagcaaatagcctcaacttttatatagtatagattttcagtttttggtgttcaatttttcgatcaccggttttgatgagattgaaaaactctgtgggaattttttatggccgggcaacccgaacaccacacgagttgtaaaagtgctttcaaattattttatttattttataaacatttaaatcttaaaaataatatatgagaattaaaattaataaataaaattttaaccataaattaaaaacgaaagtaacaaaaaaaatttaaaaaatgaagtaatttttttttaagattgtaatattttttttaataggatggttttttattctttactttttttcaccagcgaccattttattaagttaggagaactaatccggagtcgatgtacttacatgaaaaagaaaaaaaacttcgtgttcttatattttttgttaggcaatcaacacagacattgttacaacagagaataactctaatataaaataaagacaaaaaatttcaaaagcttttttaaaatattgtaattcttcaaaagcttttaaaatgttgtaattctacaaagcagctcaactaaataaaagttgcattttgcagacatacgaagtcgctaatttttcacatatcggaattggaccgagaaggtggaaactacgcgcctccatcgagagtggtgtaaaccataatctattacataaaaaaaaagataacaaaagagacgttaaagcaatgtttctctgttacgcgctgacgcatctctaacctttttaggttctgtactatctttatcttttagtcaagtgttagaaaagtatcttaatcagacggttagggttctttattattactagccgcaatttttttattgaaacaaataaataaaaaaataacccaagaacaacaacaatctggtctgctgatgtattaattaaagaaaaaaataaaacagagcaagaaacaaaaaaaaaaatgtaaagaaagagaaaaaaagctttcgtagtgtctattgaaaccagagaaaagccaaaggggatg

SEQ ID NO: 6111 - DNA, 3000 bp, Unknown
  misc_feature (1)..( 3000): cDNA_ID_1830057_gDNA_ID_1620846_Annot_ID_50933 3000 nt of promoter + ATG
tcgaaccttgccttgtttactccttcttcacttgctagtaaagcacttgtgttcgcctttatccatctcaatggaaaactcttctgcatcatcttcatatccagtatccttcttccttgaggatcgttgatgagacatctgttgtcttcaaataagactctgtatcccttggataccatttgagaaacagtcaacagatttcttgctaaacccggcactagaaacacctctttgatgatcttctctcattggcttgtcatcacttggatatttccttttcctgccgtcattacatgttgaccattccccactttgatcggtacctttacactttgatcaagagtgatgaagtatttaacttccttggtcatatggttagtgcatccgctgtcaactagccatgtctcatcattcacgtttgatgatgtttcttcttcgactgcactgaacagcatgtgatcctcatcatcatttgtttcttctagacttagatccactcgctcggtccttctaagtctgcagttctttgctagatgtcccggtttgttacacacgaaacatcttctctcattgttccccacttgttgcgaaagaacacctttgttcttcttcatccagcaatcactctcattgtgatttttacgttcgcaaacgtcacaccatttcccagcctgcgtttgacgcttgtcttcacgtttgttttctccatagaacgctccttccgttgatcattcgtctcgcatctctacccgcttctcgtgtgctttcaatgtgcctatcaactatgttacggacaacgaagtcagatccttcgtttgcttcatcatagccactatgatgtcaaatcttttcggaagagaaattaggattttttgcactatttgatagtctgatttctcttctccatgaactctcagttgatttcccatctcaatcaacttggtcatgaaagtgttgatattgtcactttctttcatcttcaaattctcatactcccttctaagagattgaagctttatcatcctgacttgtggtgatccttgaaattccaataccaaggctttccaagtgcgcttgatgcaggggcgattctcggaaatatggaatctgagacggcagtttgaagaatttgcaaagcggttagatcctttaaggatgctgcttcacatcgtgtcttttgttgcactgcttcagggctatgatctccttctgcgggtggttttggaactccttcgtcaacaatttcccacagtttctttgtctggaaaattgttttcatcttgatgcgccaaaaaccataattctctttgttgaagattggagtcacaatgtgtgacaccatctccataactctctcgtgtttattaaactctttacttgaaatgtttggcccttgaatcagtagggctctgataccatgttggaaattgaagcctcttgttacaaagaaaaaacaagtgtttacttgttgttctgtttcttatgagatacacaaagcaaaagagaaactgacttttattgaatggagaacttgttcgtttcatcacgatacaaaaagtttaaatagaaaacaaatagacacaataagtaaagagttgtgtctctttctctctaagataaacgacacaacctaatctaaaagtcacgactctaacaaacaccttttaatacaacataattataacttatagaccaaactcaattataaactaacagatttgatgcagcttcctaatttccaacagctccatgatgtttatcagctcgttgttgtcagaatctgcatcttcataaatttataataaatataaatatataatgtataactgtatgtagaaccgtatattgtggatccgtgaattggtggaagagttgctattgcggaatcgtccaagaagctattcataaaatcaatcacgaaagaaaaagaatttgttttgctattatctctatattgtgggtagccatttttggaatctttgaaaaatcaaccaatacgcattttctctcagtttggaagttaacaaagacgcgttttttcaaggttttgtggggactggggaccaaaagttcttaatatgggttaacgtctcacaggtaataccaaacatttcatttatttgtgtttttctatcactatcttttccacattttagtattttactattacatataatttttgactaagaagttgattgtgaatgagtctgtacatcttcctagaaatgattataagtatattatttaatttgttactccctctattgtcatttatttgtagtttaagtttcaaggttttggcacaaatgaaattatttcgttttttattattatcttttaatatagttaattatctatttaaaaacaattcaacaaattgaaaaaaaagttttgtagaatttctaagagtcaaaaataataaaatttccattaaaaattgaaaacaacaaataaaatgaaactatttgtttttgcttaaacaacacttcttaaaaaacagaggaaccattgtaaaatagatttttcccaacacaaatcgaaaacgtaacttatataatctctatatttttagtaattcagcgacttatcatttcattgttaactatttttcactgacatgtttctcgttatataaaagtctctgtttatgtcaatggtcgtatgtgaatggttcatgtattatgcaaaactgtttatgataatattgccggggaaaaaaaactgccatgtttcatttttttactagttattacatttgattattatcaaccaacttaccattgaaagataacttgtgattattatttacagtaacgaagaaaattaggccatattttgttttctttttggaacctttcaaatgtcaaagctggtaggctatataaatataaacaaagctcaaaaatttattactatacttaacagtaacgaagtagactacttcaagtagtacatcaaaaaaaaaaaaaccaaagaagttgttatctttaacaaacaaaa

SEQ ID NO: 6112 - DNA, 3000 bp, Unknown
  misc_feature (1)..( 3000): cDNA_ID_1830049_gDNA_ID_1620846_Annot_ID_50935 3000 nt of promoter + ATG
aacaaagaacaatccaaaactaatttatggcataaagccttaatgcttattattatcattttgaaccaaatgatataaataacttaaaaacatcccaaacaaatatgaattatatatgtcattatattaatataaattagttgtagacgatagaaataatatattcttattagattaaaaaattctgaaatttagtttttataaatgattatgctatataagtagttttcatttattttttttctgatttctcaagtaattactcgatacaagttagtataaacgcagtcgatccagaaggaccaaagatactctaaggatttccaagactcatttttagctagcgcgaaaaggttgtttgtttggattttcagattgtaaataaaaattgcaaataatttaaagatcaacttatgaattaaagacattgtgctatagggtatttcagatatcaatgaataatgaaaacattagacaaggaattcaaccatgaagcatcgggcttgaacatgaacacaaatttagactaagtctctcttaagacattaatcattatatttaactatgcaactactaaactcttgtttttaattttctagtcaaatccgtattagaattaggttcattcggttcacaatgcattctaacataaactctcattggttagaaatacattgctcaatttacatttgttcagacagtctatcaaacatttttgatgcatagaaaaatctagaatctaaaacagagtgttcgatctttttctagcattaagaacaagtgaatcaaagaacttaaggattaaaaactcaagaaaacaatcaaaccatcaattcattgaatctcctacttagaaccctaaaacccaactaaaggactatttactcatagcaaaaggaataacacaaagagatgaagaagacataatagattactaaacaataaaagaaaagggattagaaatattttccaaagtatcaaagaggatgaatctctagaatcccaataggggaataaaaaattaggtctcaaaaaccctgctctataaaatgaaaaataaaactgcttaaggaagaccgaaactgggcatcaggtagttgcctgatgagatttgcgtgatgtcattccccaaaagatttttaggcaagaaaacgaaactgggcacaagtagttgcatgataaaatttgcatgatgtcattttccaacagagttgtcttgaatcaccaatttttcatttcttctccgaactcttggttttgatacaaaaacgcctccaactccatcattgcttcctaaaacctgtaaagactcaatcaaggactggaagactctaaaaacatactttgactctataaaataatgatttaagaaagaaaacaaagactcaaaaccgataaaaataaaacatatcattttcatcgaaattataagtagttttcatatacagggaaatctttaaaaattaatacttcaatttatagtgattattgatttaaaaaataatacttcaattaatttatagagacggaggttattttaattacttcataaattaataatcactatacaataatacttcataatttataggattttcaaaaatattattatcttatcttctcattgaattatgttaaacattgcaatcttttgctaacatttatgcatcccatgaagggtggcatacattttagcaaaagattgcaatgtgaaggtagttggcatacattttagcaagagattgtaatgtgaaggtagtttgagctcaagtatatatatgtcatgtcattcatgtcttcactagattggactttaatggactcgtttcttaacagaaaaagtagacatacgatgtgtctgcgttacaaacatgtccatgaagacagttttctgatgatgtagacccacaagagcaacattccttataagcccgtgatcgggcatgaaaactgaccccaacttcaaacctaatatctctaacaggtttgattattggttgctcaagaggctgctcatcttcaaccataaaaaggtatcaacatactcaccataaacctcttctagagtagggtaatacttcttatcattaggaagaacaatttggttctcaatctcaacataacatcattgattgtaataatccaaccatccatgtttgccatgtttattatcttcttcatcctctctctctctctctctctctctctctctctctctctctctctctctctctctctctctctctctctctctctctctctctctctctctctctctctctctctctctctctcaagtccgatatagttaccaaacaagctatagtcctctttatgtaaaccatgccgttgaatagctttatctgaaacatcactacaagaatattgggttttaatagcactataatatagcgtttatgtcagtaatgctattgttatgtaaccactttattttaaatagcgtttatgtataatgaaacgctatgatataataaactataagtcacgtgtttattaatcaggttttcaatagcagattttaataaaaacgctatgttaaagttaggcggtaacctaaaaaattagatcccgtacttagaaaaatttcattctctttggcatcgaaaaatccccaaaatttgcagacctaattttcttccctctctatcaatttctctcgatttgtttccctctctatcaattttgctcgatttctctcgatttcttccctctcagtattctcttccaaccaaatctagctcgctcagtcacattaatctcatctccggtttgatttaggaagacgagaagacaatatctagctctctcagtctcatctccggttcaatctcagtcttgttcttcacgttcttcatctccggctcgatttaggtatttcactcttatcctctgttgttatcagatctcctactctattcttgtacatgtttaactggaattctctttgataattgtatacaccgtcggagtgtttgtacc

SEQ ID NO: 6113 - DNA, 3000 bp, Unknown
  misc_feature (1)..( 3000): cDNA_ID_2997065_gDNA_ID_1620846_Annot_ID_50937 3000 nt of promoter + ATG
atcatccaaaagtcgcgtcggaaaaaagtgccgtgtctatgtttgtttttcttttgttatttgttggtttttttttggtgtggtttctatagacttttcttttaaaaaagattacagtccaataagaaattgaaatagtaattgggctaacgtgggttagccagagttacagaaagagagaattttcggtgaagctaatcggagtataaaaggaaaaactgtcaagcttttatgcaattttctttcatcgacctattgagttgccggtgattgcaataacaacgaaatttcagagttgtgcttaggactgcctagtcctgaaattttggaaaccaaagttacaaaaaacgtttttgaggttatttcctaagatttagaaaacatgggttctttatattataaaattaaataatttgggcctattttatactgtaaaattttaaaaacaaatcagaggcccaaagtcaatgtttcacgaggctctgtttaggaccggccatgtccgttttgttgatggatactaaattactaatgacctaacgggtttatttagaccgaaatagttttattagctaaaaccagttttcaaatggtttgtgaattgcagcatgcaatgtgtgagcatgatttcccaattgttctatcagtgtcaaagtgatatgggccaatccgaacgttttatccaaatggatcaaaagttttgattttataagattgatgagttaaattagaaattttgaatcataatggactaattatcaagaaaatgacactggtaatacatttcttaacacataatttttcctatttttataaacggaatctgaccataagtataaagattgatagaagttttttataaactattgtgtatatcacatttgtttaggaaatatgttagtaagaccttggtccaattggttcacctgatagtcaaaaatgtgtggtggtccttcaggaagaagtccaatctgaaacattttgggccgtttctagaagaactgattggatcagctgatagaattttattaaacaaaaaaagactatttgtatattgatttcatttttagttcccgagaagagtagaacaaatgctaaaatgtatcatgcggcccaataaccaacaaaactagttgaaagatggatcaatggtttttacatgaagaaagcccaaaccatacactaataatctaatattctattaaaaggacttgctgttattcggcccaatagccaacaaaactaattgaaagatggatcaggggctatggaatacctcagaataaaaagtgttattcattgcagaggaccccttaagcggacatggttgggtccttgttcgacaagacttagtcctccatcttggcctcaagagtgctcgacgaagtttatcaccgcttcatgcggaattttattccttgctatgggcaatagaatgcatgatctctattagcgatacttctggcgcttttgcttccgactgttcagacctgatttctatcattaacaatcaagaagattggccgacattcgcagcggaattgacatcctatcgctccttagtttatttttctccttcttttcgtattagatttcttcctcgtagttctaatactcgagcagattgtttagctaagaaaactcgggctcgtaatagccttttctcccatgtaagcacatcggttcctgaatgattctttctagcggagagtctctttccgataacttaatataaatggtgtttgatgaaaaaaacaaattatcgtaatgatcctaaaaaggagttagaaaatattaatatcttatctacatctagatgataattgtttttatgatccttattagatagtgtttaaatttaattatccactaatttaagcataaactatatattctatcaccgtttaaccaatccatataaatctcttttaaagcttctagaaatgagtctcacacatcagaaattagctattttcttattttattacaagaagagaaaaaaacaaacaaacaaacatgtgttactctcattttgccacatgcattataacgtataggtaggtgaatcacctaacttgtttcagcttatgtaattaactttaccaatatattaatttattgttgataagtatattttaaattaagatatgggaccagaaaaataacaaaagtttctattaaaaaatgcttgcatttaaaagagaagaatgtataaaatctttatcaaaaaaaagagtatatcatagattcataataataaaaaaaatttgataaatgactttttatttaaaaacttaagatattacaagctattactctctttgtttatttttaattgattttctaacaaaacacacatattaagaaaacatattaaaactgattataaatgtatcgatttttgtgatttatatttttctataattctaaatcaatgatatttaattatttgtgttgaactttaaaatttatcattaataactaataattagtgcatagaaaatctaaaaatcaatctttttgaaacaattttttttctaaaaaatcaattaaaaagaacagagagaatattgttttaataataaatgttttattggtaatccaatattaaaataattatatggattaaatttaattataaattttaaaaaatttgaacaaaaaattatttagtgaattgattccaacatgtggaaaaaaggaaacagataattaaaaaaattgattggttctgccaaaattgactaccttcaaatcagagatgattttaaaaataaattcatccaattaaacttgccacatcatcaacttggaccagaatattcgcagtcaccaaaaacaaaccaatgtgtccaggttcaatgaatctggaatcacctggttcttcgtatttttgttatataatgccacgcttctcacaaatcatcttgaattgaaaataaaaaacgaagaatcaaaacaaatcttagagaaaacaaaaatccaatttttgctgtgaag

SEQ ID NO: 6114 - DNA, 3000 bp, Unknown
  misc_feature (1)..( 3000): cDNA_ID_1381119_gDNA_ID_1620846_Annot_ID_50938 3000 nt of promoter + ATG
ttttgtttcggtttcagttcggtacattcggttcggtttatttacccagacttgtatatgacttttctatttcttttatcttattttgtgtatatatatatatatatattctcacttaactcaaaaacaacaacatcaacaacaaaactctttaaaaagcaagaaaactttcactagtagttgaagaatttctctcttcctctacttattattattatcaactggtgatttgatttctctctctctctctcacaatggattcattaggatcaagaagaaggacacataatagccgtagggttccttcaatgggaatagaaggggacgaagagtttcaagaagaagatgtgtggtcagttttacgagaaggagaaacttcaagtcctgaaatgaaaatacccaaaagtcatttctcttcctcatcatcttcttcctcttcaccatggaacattcgtagaagcaaggaggtctcaggagtgaaacaatcatcagcacctatgaatgtccctgattggtccaaggtttatggtgactcaaagagcaacagaaggagtagccatttgcattctcatgctgctgacgatgatgatgaagatgatgatggttgcatggttcctccacatgaatgggttgcaagaaagctagcaagaacacagatctcttctttctctatgtgtgaaggagttggaagaacacttaaaggaagagatctaagcaaagtgagaaatgctgtcttgtcaaaaactggtttcttggagtaagtaggataaaatatctcatcatcatcatcaccataattatcatccatgtgcatggaatatgaatcccataactcttgtttaacattatcatcatgaaaaactcaactttatggtatccacatcatcatcattatcaatgtcattgtcgtcatcatcatgtggggatcactataccaagagtctttttgttaagttttttttttctttattgttgttattatttttcaatgtgttatttagagtagataagtatcatagtgatgatgatgacttgtcagccccatgcatgggtcccgttttatgttcttctgttgtttttggtttctctttgaaggtttttttatgatcttaaattagagcctagagaggggcatctcctttagaacctttaattggagttgagttctttaccatgttttggtgaaagattttgtcgtttgctatcgacaatgttatatataaattagatatctttctttctttgttaatattagctatgtccatctttggctaattatgtatttggcaaatctgctactaaatatcattaatttagccgatttcatgcaaaaataaataagccctaaaatgctgagtttccaattctgaagacattttcaaccatatcaatcgatcaatgtcatatattcacatatcgaaggtgtacatataaaggattgaatccatgattttcctttgaactcttttatgaatagttttgaatgtttttttgtttgattatagttataagatatttaatagcggtgagtgaacgagaccaaaaaaaaggtgattaaatgtaataaactttaaaactatgggatatcgagaagaaaataatgtaacgagaaaacatcacattagacttcaataatgcttttaaatatagaaaaaggattgatagtagaagcaaagatttttatattggtatgattagtagtaaaacaacacggtaaaaaaaaaacagtaggcgaaccaaatagttagattttgattggtaatctcgtatggttgcagtattttaccgttctaaacttctaattattactagtgacgaaaacgttgaaaaacgagatttttaaaaaaaagttgtaactattttttttaacaaaaaaaagttgtaactattttggtattgtttattgttttttttatatacctaaaacctctaaccttgttttttaccagtcttacttttgacataaataaaaatagtggttagaaatagttttcagttctgctgctttcttaccctttttatgtctttatgattggtaatttggtatcaatcggaacaaactaaaattgttaattgtagtccttagtcctaatagttcggttatccattcggtttcagtttgtatctattcggtttcaactttttcggttctaaagtttagtattcatttggttattttgaaagtttgattcgtatcggttttttcagttttaaaatttaatatccattctattattttgctttgaatatttttggatatttcggttattttggatattttcgatcatttttgaatattttcggttattttttcgagtatttttactattttatatatcttttcaattatttttaattatgtagtctaaaaataaataatatttagtatccatttagttttggttctttcggttctttcatttatagaatttagtatccattcgaatattttccaatttttggtttgctttgatttaattagttttgctttgattttgattcggtatattcgagttggtttatttgtccacgcctagtagtcctgatcatgtaaatgacagaaaagcccaaacgagatccaaacctataaaggcccaataaatagttcacaaactcatgaccactacaatccaacgacgtcgtatcatctcgctgacgtaagataagcatcgtaactaattaaaatccaagtaataagtttgggtgccgtgcaggtaacaatcactaaaccctaaatccatcctctctgtttcctttatatatattctctccttttttcatttttttgatcctcttcttcttctacaatcaaaattcatttttttttcctctgatcatcatcgaaccctagtttcgtcttttgggtacgtttgatttcgcctctccactttgtcaatttcgagtttttgtggtttgggtttttttcccgatttagcctaacagataaagtttcgagttttgtttctcttaatcatcgtagatactaaccgaatcatcatg

SEQ ID NO: 6115 - DNA, 3000 bp, Unknown; identical to SEQ ID NO: 6114
  misc_feature (1)..( 3000): cDNA_ID_1381119_gDNA_ID_1620846_Annot_ID_170222 3000 nt of promoter + ATG

SEQ ID NO: 6116 - DNA, 3000 bp, Unknown; identical to SEQ ID NO: 6113
  misc_feature (1)..( 3000): cDNA_ID_2997065_gDNA_ID_1620846_Annot_ID_170220 3000 nt of promoter + ATG

SEQ ID NO: 6117 - DNA, 3000 bp, Unknown
  misc_feature (1)..( 3000): cDNA_ID_3079590_gDNA_ID_1620846_Annot_ID_170215 3000 nt of promoter + ATG
attaaaccattacattttttgaaaagctatattaaaaataaccataacaatataaaaatgttgttaatagtctaattataacaatatgattacgctattaaataatatttaaaccgacgaaatcgctattgtatattgtaatataatagcagacattataaacgctatctaaagtgtctgacctacgatgacgagcacagaaatagcgcttaacgaaacgctattaaatagttagatagcgttattcggatgctaccaaaagccaatattcttgtagtgcatgttggcccctaaagctatttgacaagtttaaagaaggagataattgtttagggtttcttatcttgtggttttactatttgtcttttatatttataaataaacttggagggcttcaaccatctaagctgctccttaactccattttgtggtcagtaaactatctattatatgtttttcttttgacgaatttctttgcaaaaccaaatcttggattaaaacatgagcaattttgagaaaatatgggcataaactttctcaaatattaaaagaggagacaatgaatcgcattggaagtaagaacttggccccttgaagaaacgacatacattaacaacacaacagccagaagatcaaaacctggaacaaaatcatgaacaaaaagtccaagatggaatttttgcgtagtaatcatcaaagtgtctaagagaacaccatgcaaagctagaatcgaccgaaaacttaagctaattttgactagatcaaaatcctaggctagaaccatccagaaaccctaggttatcatacaaagatgataatatagattggtttgttgtgtgttcaagtgtatcatacaaagatgccaaccatgagctttgtaatagtttggcttggcaatgagacaaccaccaatctttttctcctgctttcattaggagtctgagaatggtacctaacatacaaattggctatgagttcagttagatgataagtttttttttttgtgcactcagttagctaattcaaatgttatttttaaggtataattgttgtatgtgtcatctaaaataaacttcaaatgttgcacaaagtaatatgatttaaattttaaaataaccaaaatttcttataaaccaagataaagaggataagaaatcttttctgcccaatcagattcttgattttgatttaggttacttgattcctatcttactctgacataaatataaggaagttttttttcttttttgttaaaaagtgtaaagtaagaaattttctaagcattttcacattaattcccaaaaagaaatatatctgtgtaccttatatagttcttttgttgatacctaatatagttcttcctaatttgttttttatatttcttctaaatatatacctaagcaaccaaatatttttaaatttgatttcaattttggcataccaaacaaagtgtgttctactacatataaaaacctctttaggagatgtatttttcctgatctcatttatttgattcttatatatcttactctaaacagaaatataaacaagtatgttttctttttgttaaaaaaatactataaatgtataaggagattttctgagtattttcacattaattaccaaagagaaatatatcacataactaatatagttcttcctaatatatttcttcttaatatatacctaaataaccgaatattttcaaagttgacttcaattcttttcatccaaacaaagcatgttctactaaatctaaataccattttaggtgacttattttgtgcttcaaaagaagcttgttttttattgtttgttccattttgctaccagtatatacttttaatagaattgccaatacccacaaaactttacttacaccattcaaaagctatgttgtttttgagactttctattcataaaaatattgagaacttaaaaacttatttaaatggtatttatcttatggaatataaatattttataaaagtaatctttcacccatatatataatggatggaaaatcacatagtaacatcttataaacgcactaccataatatattgttaggtttttattttttattagcccatcatatatatgggataagcaatacataaaatagagagcaagctaaaaaattagaaaccaagtcctcttcgtaattgtgaccaagagtgagttcaagggataattcttcttcaccagttgtaccaccaccaacaacaacgacatcatgtctctattttcatttagtcccacttgccataaaatatacatctatttcgttcacgttaatgatcacatagtaacatcttataaacatttactagcataatcataatgtaagagatgcaaaggaaaataatacccttgacgattgatagagagacatgcaaagatactttcataggtttgttacttgattccaaaattggggttactttcttagtaatattgttcaggttcttaattttgattcaactttaagtgaccggtttaggtgctgtggttaagtggaattgagtaccggttagatggagccaattgaaacggattggagaaacaaatggaaaccttcttttcacgagagagggtcttctgttatgtttgggacttagtataaaagccctgtaatctcttcttcttcattatccgttttcatacttgtaaaaaaaaaaaaaaaactttgagctctgagactccattgttgagctctgctcttgctctgtaattctcgttctgatttagtgaattgccgaactgatttggccccagacgtagacttgatcatatcgatcttgttgaactgggtaaacaaactcttgtgttgttttctttcgttctctgtttcgatctctttcttgagctgatttgagtttcgattgttgagtgattgagagtttgtgaggatctttgtattgtgaatcgagcataaaacgtaacagattggtatcagagcccaggcttttgggtggttcattcacatcgcatcgatcg

SEQ ID NO: 6118 - DNA, 3000 bp, Unknown
  misc_feature (1)..( 3000): cDNA_ID_2139551_gDNA_ID_1620846_Annot_ID_170213 3000 nt of promoter + ATG
tcatctcccgcatcatttttatttctgtcaaaggattggaggtgcataattatgaataaacggatataaacttcactatgcattatgttgaaaatctaaatattccttatgcaaagttacacgacaaacatatttattaaaatttaatttaaaatgtaagatagttattttacctttactagattcttctttctttttgttcctatacatctattgaaagtaaaaaaataaaaaataattcagtacttgccatcttagatagtatatgttttgtagataagttttatacactatataattataaagacctggagatgacttttgacatgtgatattgtgaggtctctcacacccataagactcaaaattctcttaggagttgcacctgcaaatttaaggagaacaataatatcgactatagtgaattaatctaaaaaaggatataaagagaacattaatcatggaaaggtcttaaaaggaaaaaaaagattgttgatttcaatgacaatttttttttctttgaatttatttcagaagaatcgtcttgttatagttttgcgatatggaaagaaaaccgcttactctcttcgccaccgagtttttcaataacttgaataaaacggatatcaagatcgtcggtccagtgcattcgcggattgtctgacctaatgtaagatctaaccatcggatcttgcattttttttatctctcgtaaaatttttagtttgataatattgagagtgtgcaccaattatttatagaaaaattatatggaaaagaatattaatatttatttcccaaaaataacctaagaaacaaatatttagagctagtaaatgttattgttgtcacgtgtaatttatcatttaaatatttctgtaaaaaggatatataaaatcgcattttaagaaatatttattttcttgacagctccatgtgttcttttctctaataataatatttataataaattttaaaataaaaagttaatactactagatttgtttcaattttattctaagaataattctatctatgcttgatatttatataaataaacaaagaacaatccaaaactaatttatggcataaagccttaatgcttattattatcattttgaaccaaatgatataaataacttaaaaacatcccaaacaaatatgaattatatatgtcattatattaatataaattagttgtagacgatagaaataatatattcttattagattaaaaaattctgaaatttagtttttataaatgattatgctatataagtagttttcatttattttttttctgatttctcaagtaattactcgatacaagttagtataaacgcagtcgatccagaaggaccaaagatactctaaggatttccaagactcatttttagctagcgcgaaaaggttgtttgtttggattttcagattgtaaataaaaattgcaaataatttaaagatcaacttatgaattaaagacattgtgctatagggtatttcagatatcaatgaataatgaaaacattagacaaggaattcaaccatgaagcatcgggcttgaacatgaacacaaatttagactaagtctctcttaagacattaatcattatatttaactatgcaactactaaactcttgtttttaattttctagtcaaatccgtattagaattaggttcattcggttcacaatgcattctaacataaactctcattggttagaaatacattgctcaatttacatttgttcagacagtctatcaaacatttttgatgcatagaaaaatctagaatctaaaacagagtgttcgatctttttctagcattaagaacaagtgaatcaaagaacttaaggattaaaaactcaagaaaacaatcaaaccatcaattcattgaatctcctacttagaaccctaaaacccaactaaaggactatttactcatagcaaaaggaataacacaaagagatgaagaagacataatagattactaaacaataaaagaaaagggattagaaatattttccaaagtatcaaagaggatgaatctctagaatcccaataggggaataaaaaattaggtctcaaaaaccctgctctataaaatgaaaaataaaactgcttaaggaagaccgaaactgggcatcaggtagttgcctgatgagatttgcgtgatgtcattccccaaaagatttttaggcaagaaaacgaaactgggcacaagtagttgcatgataaaatttgcatgatgtcattttccaacagagttgtcttgaatcaccaatttttcatttcttctccgaactcttggttttgatacaaaaacgcctccaactccatcattgcttcctaaaacctgtaaagactcaatcaaggactggaagactctaaaaacatactttgactctataaaataatgatttaagaaagaaaacaaagactcaaaaccgataaaaataaaacatatcattttcatcgaaattataagtagttttcatatacagggaaatctttaaaaattaatacttcaatttatagtgattattgatttaaaaaataatacttcaattaatttatagagacggaggttattttaattacttcataaattaataatcactatacaataatacttcataatttataggattttcaaaaatattattatcttatcttctcattgaattatgttaaacattgcaatcttttgctaacatttatgcatcccatgaagggtggcatacattttagcaaaagattgcaatgtgaaggtagttggcatacattttagcaagagattgtaatgtgaaggtagtttgagctcaagtatatatatgtcatgtcattcatgtcttcactagattggactttaatggactcgtttcttaacagaaaaagtagacatacgatgtgtctgcgttacaaacatgtccatgaagacagttttctgatgatgtagacccacaagagcaacattccttataagcccgtgatcgggc

SEQ ID NO: 6119 - DNA, 3000 bp, Unknown; identical to SEQ ID NO: 6111
  misc_feature (1)..( 3000): cDNA_ID_1830057_gDNA_ID_1620846_Annot_ID_170211 3000 nt of promoter + ATG

SEQ ID NO: 6120 - DNA, 3000 bp, Unknown
  misc_feature (1)..( 3000): cDNA_ID_3079603_gDNA_ID_1620846_Annot_ID_170201 3000 nt of promoter + ATG
tttatagaacgaaagataggaaatgatgactatttctttttttcgacccaaaaatcggacctgaaaccaaagccaaaaatttagatttatcctattgggtcctaaactcctcgacccaaacaaccaaacaagaacccgacacgaacccaaatatacccggatatttgattagaatatccaaatttaccgaaaacccaaaatcttacctaaaacacgagtatttaatataaaatttgggtattggtctttaaaattggccctctctaaccaaaagatccttacttgattgggttttagccgaacccgatccgcgtacccggatgtctacacctagttttaaagttttggtgcaaaatacataagaccttgaatataaggttttggcgggaaaaatgtatgcataaaatgtctttcaaaattatgatttcacggattttgtagaacggtaaacagtattctactatttttggtgagaatatggtattgtactattttttcatctatcaaaatagagagagagagagagagagagagagagagagagagagagagagagagagagagagagagagagagagagagagagagagagagagagagagagaatctaaatttgtgttcatgtttgagaacagttcttaatttctgaattacctgttacatctattcttctagattgattattaaaatattctatagctcaatgtctttaattcataagtttaattgtcaatttatttgcatttttatttacaactctgaaaacaaaacaaacaacttttttttttgttttagctaagaacaagtcctaaaactctttagaatattaaccatgtatatttaccttgcgcttgtatcgaggaattactcgagcaatcaaactacatagttataccatcaaatgtagtttaatagtttagtgattttgatgggaaatagataatttgttgtttcactgttttggtgaaagaatattattttaaaatatgataatatatataaagtaaaactatcttggttatcgttgtgatttctagatggaaattgtgttgtatataaactctcctttaagttaaaaatttaaaactcatccaagattttttgttcttaagttacattttccaaatgcatcaagttattaagtccaactcatataattaaatgttatttaacgaataatgtcttgtatatgcatctagatgcacaaacgaaccacttctaattttctttgatgctcttacatttttttcaaatgaatttttctcaaacctcagcatctttcttttgttaaaaataaaattttaatatatgagtcaaactatatgtgtcaatttgatctaatctaattcatcaaccctaataattttactatttggatcataatgagttgatgggtcagtgagttagtggatcgtttggagtaagttgtaatggtttatggttcaccatattaaaccataaattatcatacttaacatcatcattagctttattaatatcatcatgatcaccatataatcatcatcacctttatcatcaatttcttcaatataatcacaatatcataattttccaaccaaaaaatgagattctgtaattcttttgctaaagacactatttcacaatttctcagatagtaaaattgaacaattttctgccaaaaatagatggttttcacaagttttccaccgcaatacgatatcacactttttccgctaaaatattaatctatattttcagtcattgatggtgaataagggattcatacctcatggatcaacctaacttatcacattaatgattttattattttgttctaaatgagttgattggtcaaagaaattataagtagatgagttgatcagtaatcaggatcgcccctgatctaaagcaagtaaagctagggctttaggtgctaataatatatcatcatttataggacatcaaatacgggaaaattatatgtagcacagtgacaaagttaagttttaaggttaacatgaagtcttgagtttgagccaatattttgtggtttttgaatatttttatatttaagtgttatgggttttaaaaaaaaaactcatgctttaggtagctatgcactttgggcctgccttgtcaataatatgtaatggtttatagttagacaaaaactttcataagattataatttttcacatcataattatcttcatactatcatatcatcatattattaacgccaccgtcatcatcatcatcatcataccatattttccccacaaaaacaaccttcataaattttacgaaaaacaaggttccacaatctttagccttacctttaccaataatatgattaactatttggacacatctacttgcagtactctatacaaatatgatgaacattttccacaaacaacgattctacaatgtaactccatttctataagaaaaatgatttcatctcccatttatattttatatcacctacaactcatttgtattcatagctttttttaagaaaatctaattttaattcaaaataaatataattcaaagttctttttggatgattataaatttatttataacctttggttaaaaataataataattaataacaaggctattattagagaaaatatgtttgtttttttgagttttactttatttttacaaatattcagcatatatagatttaattttagaataaaaataaaataaatctggtaagtattcattttagattttaaaatttattatgcatattattattagagaaaagaaaatttggagttgtcagaagataattatttcttaaaatgcagttttatatttatttttagagaatagtaaaatcaaaaattacacgtgacaacaaaaacatgtactagcactaaatattttttttaaggttatttttggggaaaatatataaatatatttttatataaattatcagtatgtagtctaaagttttatcaaactaagagttttacaagagacagaagaacaatg

SEQ ID NO: 6121 - DNA, 3000 bp, Unknown
  misc_feature (1)..( 3000): cDNA_ID_1830072_gDNA_ID_1620846_Annot_ID_170199 3000 nt of promoter + ATG
aaggaaagggaaagtatgagagagatagacgaaagagagagagttaactgttgttgtttttccgcacggtttacaatgaaaaagagataaaaggtattgtaaaaagacgcagttgttgagcgcgaaaactgctcagtaaaccgtgggaacaaaatggacatttcacaaccaaatgtggtatgagttgtaatgcccgaagaaatatggcagattacataacgattgggaaaaatatggcagattttataattttcctacatttaattcatatcaaacaacatttgaacatttaaaaccatatacatttgaacatttaaaaccattcaacgagaaatcataataaagccatcatctgaacagtgccaccgaattagtgtttctactttatccccatcaactcaatccaatcattcactatgacaaattttggattccgattcttaaaagaagaaaaaaaatctaggttaagtttcgacgtgccgcgcgttaatgaacagacaagaaacaatttaacatgtcaatcttcactaaaatttactttcggattcgagacaaacctgagagaagcgaaacagatcaaagcttgctcgggaggaatggacgagaggttgaagaagcggtagcggcagcgcaaataaacgaagaattacaacaatcaacgtagaacaaacaaggactttcagaaaaggctcataaataaactttttaatggaccatattgtgtggtaagaagataaatatatcttatcaaataaaatataaatttactaaaacattataacacaactatacttatttattttatagaaaagaaattaaaagtaaagaaaataattataaaaaaaatgtatatatcttattaaataaaaataggaataaaggtagagaaatttggatctataaccaaaaaaatttaataattaagaaactaacctaaaaaaaaaagctgttgtgatattttttgtattttgtatattaagaccactttacccttctcacctctcacctctcacctctcacctcttatctctggcatctcatctctttttttctatatcgccttcattaaaacagaacaaaactatagttttctattttactttcaattttgttacattctatttgctagaactaaggaaaacaaatacgaagactcaccagatctaattgaatattttctggtttgatcaatatctccttaacacaaatttaaacccaaaatcgaatcgatttcaattcgatttaagaaaggagaaaagagattaagagtatataaacatgattttttcagacttctaaaaactgaaacttgagatgatttcatttagtttaattatttttgtttgggttcatataaagtatcatccttagggtttaatttttttaaatcaatagatgtttgtaattagaatggattgagataaaaaaaagttaatttttctggaaattttttattgaattggggagaagagaagaagcaacgaagaagatgatgaaggaaaaaggtctgttaaataagaataaagtggatatttcccagttctcatatgttagtttcttaatttctagaattatagtgctattttcttaatttagtgttgaaaactagttagttttccaattcacccataaaagtattttcagaaaaaaaatatagaaaaaaagaaaaaaagtattagtgtacttggaacctaatattattcattatcaatcatggaatttttactttacaccgaagtcgaaactctactctggacgataaagtgtatgattggtgccgacaaccaagatgtagccttttttatatactgttcagacctggtgaagatagttttttcctcaaccgaatagtcggcgttttcagcatatttggaggattttcagagcgacaaggaagaattcacaagcttctctttatctttaattttttgtaatgcaaatgttaaaacggacaatttggcacgaaaatttgtactaaatcgttttatgtcacttatgtaaacaatattccgcaagattgattcttttgagctcaaaacaaaaccgatgacaaaaaaaaaaaaaatcatggaatttctaagaaccgtagacacttacttggtcaccgttgccaactacgacgaaatatttataacatttctaatatgctacttgacaaaacaaaaaaggctacttgaaaatcgctaatttttgtttttcttcctcactagtcaatatcacttatgaaaagttatttgtaaatttgcaattactttccaaagtaaggttttgtgagtaaaatgtatgttttgataggaataaacattctcaatttactaagcagttatgtatactatagttgttttaaacgcacaaatgaaaacttgtcaaatgggattgataacaaacatatcatactactttctttctatcttttgtcaatatcgtattactttatgttaaatatatagtaaaacttctcgataaattaataactatataaattaataaattcttccgttccgagttgagatcaatgtaaaaattgatacaaatcaatatattaataagataataatttttttgaaaatcttatataaatatatggtctcatttaccttttagattaaatttttgtaaaaagttacaaaatttgtaaaatctctctataatttaaatttattaattaatcgataaattaatacctttttaaattaataaattttctcggtttcagtattattaatttatagaggttttaccgtatttcaattatatcctaactatacaacgaaaacacataaaataataaaatttgaacatgaacatctctgtatacatatatggacatgagaacctacgcgtatgtccgagtactttcctagtagtaacaaaatctgaccaatacaccattttgtcaagtcaagtagtgtgtactcgttgtctcaagtcaccttataatatacaaaagctctatagtaattgattatcctcgtaacaataacgtatgatcaaaaagat

SEQ ID NO: 6122 - DNA, 2463 bp, Unknown
  misc_feature (1)..( 2463): cDNA_ID_2139509_gDNA_ID_1620846_Annot_ID_170196 3000 nt of promoter + ATG
aattcgttttcagggaatattaccaagcgggcaagagatagcggtaaagagattaagaaaaggttcaggacaaggaggtatggagttcaagaacgaggtcttactcttgacaagactccaacataggaatctggttaagcttcttgggttttgtaatgaaaaagatgaagagattcttgtctacgagtttgtccccaattcaagccttgaccacttcatattcggtgagccttcgcgagacgagactttgcatctttgcatgttacactacttttagaaaacaagaaaaaaaaactgtttctttgagatgtgcagatgaagaaaaacgccgagttctgacatgggatgtgaggtatacaatcatagaaggagttgcaagagggcttctttatctccatgaagattctcagttgaggattatacacagagatttgaaggcaagcaatatccttttagacgcggagatgaaccctaaggttgcagattttgggatggcaaggctgttcgatatggacgagactcgaggacagacaagcagagtagttggaacatagtaagtaagctctgtttttatttttaaagattctttgatcagcatcactattaatatgatttggttaatgcagtggatatatggctccagaatacgcgacatacggacaattctcgacaaaatctgatgtttatagctttggtgtcatgcttctagagatgataagtggtaaaagcaacaaaaagttggaaaaagaagaagaggaagaagaagaagagcttccagcttttgtaagcttatcacttatgtcgatcatctttactcttcttcttcatcttcttatcgaaattttaaaaattatttgcaggtgtggaagaggtggattgaaggaagatttgcagagatcattgatcctttggctgctccgagtaacaatatctcaataaacgaagtaatgaagctcattcacataggtttgttgtgtgttcaagaggatatttccaaaagacctagcattaattcaatcctcttttggcttgagagacacgctactatcacaatgcctgtgcccacgcctgttgcttatcttacgcgaccatcgttatcacttggtcattaatgaaccgtcaatcatgtatgttttatacctatttgtctctctctgtacaatgaatgacaaatgttgagaaaagagatgccgtgtaatgtaagcaaacttatgtttgatttgtgctaaacttatttatattaaatgaatatttgatatagccagcgttttggataatgttggaaattggactgaaacggaggaacgcatagatgaaattaaagtccaatttctatgaaagttcacacgagcagaaacaaaaactttgatctaatgtaagaggaaatgcgtgcggtaggggttgcgtagtcataaagaaaggacattgaacaaaggcacatttttaaacttatatgtaagagcatcatgggctcttaaccatatttagaatttaaatattgcacaatcaaaatacccctcatgagtttttatttttgacaactccaatggtagaagttctaatgaggctcttaaaatttaaatttttgaaatttatatgtgtttgtgtaacaccccgatttcaggaatatggtggtgcatacggtgaaatttaaaataattgatttgaccatttatattaccaaaatgcatttatcttttcgatcaaagatgttgaaaatgctcaagtaaataacatttgacattatattttacttttttcatgtttacaataaagcttcgttttgtatgatctgaaatataaaattttctctatatttataaccaatttactatagactaaatatttttaaattacaaataccgaatgactaatccataaaactgtgatggacaccatatataaagctatattggacgattgtgggtgttgttcattaaattgatgatttccactatgtcaaacctttcctccaaatttaagaatgacaaactatccaaaattattttcaaagatttttgaaagactcactacgagtttctcagaaattaacaattgttacaattttcacttcttttttcttcctgaattgtcacattctttatacagtatatgagtatgactcgtagaccaagcaaaggaagacttttttggtcatgcatgcgaccaaaaacaagtacttacataaccatattgaaaggacaatattttcaatacttctagagaagaaaaaaacccttagttcatacgaagtgattaagaaatgtttaccctttctctacggctatttgaatttgaatggccatctttgaagtcaaccattactcaaattttttcatgtgtactcaaccaaaacccattctctctcatgtcacctaattatacacatatataaacatttattacctcattaacaaaaaaaaaaacaatgaacaaaaccctaaactccattgcttaacaatg

SEQ ID NO: 6123 - DNA, 3000 bp, Unknown
  misc_feature (1)..( 3000): cDNA_ID_1830120_gDNA_ID_1620847_Annot_ID_50940 3000 nt of promoter + ATG
acaccaactgataagatgttactattagaagttacttttattcgcttatgaattttaaattcattcttaaactcatgaaaagccttttttagtctggatgacacaagtgtttttaggagaaacaaacgttttgtaaaacttcaaacgtggaaaatgaaagaaatgtggaaaatcatctcattttcagattaaatgacaaaagctttcatgtatgtgaagtcaagtaatcaagttgtgaatgtaaattaatgttaaagatcactacatatataaaacataaagctctaaagtggaaaactctagtatgaacttgttaaatattggataaaatggggataaccaattttgtcaaaatatgtgtggaagttgtgtaacaaaggtcatattaattaattgttgctatacaagatgaaaggtctctttgttttaaaatttgtgtatctattggaagtaatactgtttggtgaaatttcttatgatgacgaagacatagagaagcaggtgaaacactttctaaagacaaagtcgaatcttgaacaaaggatattgtgctatgatgcaccaactgataagatgttaccattagaagttacttttattcgcctatgaattttaaattcattcttaaactcatgaaaagccttttttagtctggatgacacaagtgtttttaggagaaacaaacgttttgtaaaacttcaaacgtggaaaatgaaacaaatgtggaaaatcatctcattttcagattaaatgacaaaagctttcatgtctgtgaagtcaagtaatcaagttgtgaatgtaaattagtgttacagatcactacatttataaaacataaagctctaaagtggaaaactctagtatgaacttgttaaatattgggtaaaatggggataaccaattttgtcaaaatgtgtgtggaagtggtgtaacaaaggtcatattaattaatttttgctatacaagatgaaaggtctctttgtgttaaaatttgtgtatctattggaagtaattttacaaagtcaatttatatttttctatttagaaatgacaatagattaagtgggagactgaaaggccacttaatgaaagaagtggaaaagtttgaaagtggtgaaacttagtttagtaaaataaatacaaaagtggaagagttacttaaaagaagtgcaaacccatattctaaaataacaaatatgaataaactactttgttatatgtttttttctaagcgtggctgaaactctcttaaacaaggttcgaaacttgctatccacgacacacaatctttttcaaatgacactaaattacatcaatgactatattttcaacactatatttgattttcgtgttgctattttttggtaatgctatatttattactcaacaaagataatatctacaaaagctctttgaactgaaaacacaaagacaaagtaagagcgaagaataaaccttgagtgtgctcgaaccaaaactgaagaatatcttgcagccagactcatcttggaatgaaacaaggtaaactcatgtttgtcgctctgaatggaaattgaatttaaagaaagaagcaagcttcacgtttttttttgggatcatgaaaagctttaggcgagatcttgtaattacgagagagggaagttgacaaagagcttgtggtgaaaaacgacttctgcctgaactgtttgataatccggctctgagatcagaggatgagagtaacgattgtatttattgccaccatgaactagaaaacctttgttgcatattggtgtttgtttttgtgagagaaactgttggatgacacatcactatactaagaaagtcttgttaaattcatcgaagatgtgaagagatgagcgtcattggtctcatgttgaagctgtttgatgggttgatctgaaacttgggttccatcgtcgaaaatgcagtagcattaactggagttacctctggttctattgttggggaggaatggccatgagagttctgctgcgattgacctgaagcaattttcagcttgttatatgtcacttgcttgatttgatgctgcgattagaggactgatgtcatgtttgggaggaagtttgatgcaactctgaatctagtagctcaggggaagaaggtttcaggtttcaaaaacagttttatgttttgatgttgattcttccttcttcgttttgtttggctacagaactctgattttgcttctaaaagatgttctggaaacttgaaagcaagatcattccaatgacatagagatcatcttctggttccttatggtatgataggaattcgtcctcaaaattggctgctcgcaggttatgttattctggatctgtcatgggaaattagccataagtttcaaaccataaacccaaatcgtgatccgtcttctcctgtagcttcgtatatctgatgttgggcttgcaagcaatatttcagaattatcttggttggtttgtattagtcaagtaacacacatggatcatgggcttagagttaacaagaagaagagaagttgatgagcccattaaccccttctagaagtgcgattagagccgttagaagggagaagagaggagagtcacgggtaggctaaggtttcatcttagccatggtcaagtcactatcactctagagaaaagtcgtctactctctcttcatgtctctttcattttgttttgtttgttgtaaagggaaccctagtgtctccctatataaaagtcttgttccctacattgtaaccaatctaatctaagtaatatcttcacttcctattcttggctcttctctcctctataaacttcatacttctccatacttctcatactcttttccgcatattctaacatggtatcagagcatgttcttcgattcttaacatgctaaatctcttctacttactctaatctacttactctctacattcttcttaaatctacactttcctcttcaagaaacactctattacccaacggttaaaagagtgtacacatc

SEQ ID NO: 6124 - DNA, 3000 bp, Unknown
  misc_feature (1)..( 3000): cDNA_ID_1830108_gDNA_ID_1620847_Annot_ID_50943 3000 nt of promoter + ATG
ggagcaaccggcaaagatcacaaacactcacaaggacacaacagaaaaaccatgagaaaccaagttcaaaagaattcagacacaaagtataatgaataagctgccaagattacgagaactttatatcaaacactagagacacaacacaaacatttcagacaagtacacaacacaaacacttcagacaagtacactaaagaattcagacaagtacacaagtacacaacataacagaattcagctgccaagtacacaacataattcagacaagtacacaacagaattcagacaagtacacaacacaacaagctgccaagtacacaacataattcagacaagtacacaacagaattcagacaagtacacaacacaacaagctgccaagaaaaagcacagaagatttacctcagtaaaaatcttgttcttggaatgaacagacaatccacctgatccagtgctctccggattgtccattgagcacatatgagactcttcctcttctatcctagatgtcacttgcttgtaaatctcctttgacttcccatcgatgaaagttccatccgcttttctgtgtgtctcatctagcagctcaaggaaatcaggagttgtttctccagtcttttcacactgaaacacaaagagataaacaagttagattcataaaattgtagtttaagtaatggtaaggagagaagaatacttatcttacccgttttcttgcacgagctttgtatgaggtctggcctgaacgatgtttatagatgtctttgccatccagatcatgatatctagcatttctgctgttgttactctttttctctgactttggatcttgccaaaactgtactagacctttccacacatcaggatcaatccattttggcttggcttcatcacccttctccttccaatttcccttccaccttgacacttgattagacatcctagactttagctttgcttcaaactcaacccttactcttttgttaattgaacggtcccagttatatacttgctacaaaacagacaaagcaaacatcagactatgaaaccaaacaacaaaacaagcataaacatcaaaagagcacagaacttactgcaaacgtttcataccatcgatcgattgtagcctttgatgtctatgaccaattggcatgaggttctttgaaatctctttcaaatatgctgcggattgttgctgcaactatagagtcatcgtcaaacctacaacaacagcaacaaaacacataaggatctctatgtctttatacttctaagaaactacaatgctaagtacaaccaacctaaatccagagacttctaaggcaggaccaaacttctaaggcagaaccaacctaaatccataaacttctaaggcagaactaaccaacttacaagacctaattccagagactataagcttaaccttaccagagagttcccggaggatgctttgggtctagccttgtcaagccagcacaaccaggactatcgaggagctcttccagtgtcagattgttgagacggtcaacttgaacatcataatgattgacagaaggctgagtcgttggcgttggaggcgatggtggaacggttgaacctgaacgtgaacctgaaccttgaacccctgagatattcccaccactaacaggagaattgacatgcaacgggtcacgctgctgttgtctaacccgtacaaaagtattatccgacggcatcttgcacaaaaaacaaatcaagagttagatctgggaaaaagaagtaagatcggagaagaagaatgagttagatttgagagaagaacttagatcggagaaacagaggttacctttgaggcaaaacagatcgagtcggagaagaagaaacgcggcggtgtttgaatacagatcgaagaagaagagaggcggcgaagagagtctgcgtcgtaatcagatcggagaagaagagaggcggcgatgagtataacagattagagaagaagaagaagagaggcggcgacggaatcggatcggagaagaagagatccggcgccgaagagatcagagaagaagaagagaatcgaagaaaatttttagggttagggtttgatgcggctggtttgagctccgctcaaactaggtcttcgagtatatataggaatttatttcctcgcaaaaccctcgcatagtttgctttgaaattgcgaggaagatttttaaaccaattaaaacgcaccacatattgcgagggaattgcgagaacacctagcaagtccctcgcaacttatgatttttaataattttgggtttagggtaaaatttacgacggaagtgcgagtgcgtctagcaattccctcgcaatccttcaaccaattaactccaccattttgatttagtgtttgaatcagatctgatttagattcacctatttcgaataagactcccagcaaattaaaatatgactaaatattttaaataatttaaggtttatggtaaatatttgcgagggaactgctacgacagacttgcaaatctctcgcaaaaacctcgcattgttgaatcaatttgaaaaaacaagaaaacactacttaaaattattcggattagttattctgaatcattaggaagttaaatatctacattagaatctaatttcatctcaaaaacttcaaatgtgcatttttcccaaatacatcaatgatgaacttatgtgttttcaataatatgaatcataagtgtttaacatcttcaatatgaaatgtcatattgaaacatatacaatatgtttttgtgcatcaccatataatcaacttgtatgattatacagtcatttagatttacatttataaatgaaaatcaaagatcccaaatcacttctatgtattttagggtttagggtaaagatttgcgagatttttgcgggtggtttgcgagggttgatattgttcattgcaaagtactcgtactttcctcgcaaatttgcgaggaagcagtctctcgcaatatttgcgagggattagca

SEQ ID NO: 6125 - DNA, 3000 bp, Unknown
  misc_feature (1)..( 3000): cDNA_ID_1830100_gDNA_ID_1620847_Annot_ID_50945 3000 nt of promoter + ATG
gtaacggagatggacatattctgctataagaaataacggttttactctctatcatcttcttctttccttcttttttgtttttgatgagtgaaatcgaaaagatagtatagggattccaaatggatcccaattaaatttgtattgatgagtaaaatcttaaccctaatgagagtatagggaactcaaatgcttcaatcatagacacatatcgaatcaattatgaattttaattaaaaatctaaattatttgagaactttggatagggagttacttggataaacttgatccatggagttctttgaatcccttatagatgacaacatcttatcaatagagacggccttttcattctcacacagactcttatctctcgtaacaaataatttgggattattttaaaaattacacttaaaagctgatcctaatttcataagaaccataattgcaaaatcaaattagaatctaaatacaaaccaccgacgaattaccttattgatttctttgagggaaaatgaagatcatgacttgctatagagacaaaggagagaaaaaatggtaaaatggtcactcaaatgagagagaagtacctaattctataagaatattgaaaaatgatatgagagacaatgacacaaagttttgaaaaatgatatgagagacaatgacacaaagttttttgtgctttatctataattgatccaaattaagcgtgaactaattcgactttagtatggtctgcatcttactacacaacattcaaaggctatacatgttttcaatcaaatcaatatacattcaaagcctatatgttttttaatcagataaacagccagtagtcacatcttttacgtgctttcactagtacttatacactctaaactatatgcatgccttgaatggggaatagtatttagacactaatttaggggttagaatgaaagaaagaaaacttgaaggggttagatgagcaaatatgaaaagttaaaacttcaaggaaacgtatgcttatgggtcccacacagcgtcaacaacgtgaaggcgtttgcttgtgccacaaatcaaagcaaccttatattttccatttgcagcaaacaccaatcaaccaaagtaacaaaccatctattattaattattgtgcaaaaaaaaaaaaaatccttcgcacgttttaacattttattgtgaacatttcagacatttagtgtttttctatgtgagtggagataaaatttttttttttttttttgaagaaatggtataattggggtggcaaagttaatttaaagacgttactgtaacactgtttaagaaaggggttcaatcatattgctctttgctaagctggacctaagcatgggttcaacgtgaagcgtacctaatgctaaacaaacccatatctacggatattttgctaagtataattctcatccattaaaaacagttagacaaataaaatatattgtcttaataaataaataaatgaatgagacaattcttctggattttaaaacaattctttttttgaatcagacaaatatttaaaaattaagatgatagatttaaaaatttcgttgtttatatatatcttggttttaaacctatattgcttaagatcctacttttacactttcagttattatatacctttttaaaaatatttttttattaaacttactatgatttcacttatcttgtagatttttatttagtactaagaaaagttatttatattatataaaatgaataaaaatttagttgagtaaaagaaattaatacataaggttctcttttgaaaatagacatataaggctcttccttgcacacttcaaatagaatgaatttgatgtggaaaacagactaaaccaagatatcatcctagaagatatcttaactatgtacttaatagaaaattgaaaagaaaactttatacttatgcaaaaaaattattaacttttacttaagagaacaattgggatcaatatgaaaataagatataacccaagggtcgataaattaaagtgaattaatatgaaaatgaactttatccttaataaacacaaaacgaattttgctgatctgtctaggtccacgcatagcaagcaaggtttcataaacgtgacgcttgcttatgaaactaactcacacttataactttaatttaattccttcatattcttcaaaagtttccatttacaagcaacaactaaactaattgacatttgacaataaaaagctgaactttattatgtatctctaggttttttccttgagagtttctctctttgaagtcatttacgtatatatatataaacccttgcaccattcttcttcgtcttgttaagcttttaagaatctctactcacattttctctgtgagtgttcttttatacttctttgttatttccaatttttctttctttcctctaaaaattttaggaactattgaatcatttaatttctgtttgttgataaaatttcgatcaactgttctcggcttaccgatgcattttttgtaaaaccgtctttttttggtgaataaaattttaaattcatacaaaaaaaaaacatatttgatactattttagctccattgtatctgaatcttcatttgttaatttttttgtttcctctgttctcacttgaattttggaatattttctctaggttttaccttatattcttcactttaagaactatatgaagatttgattggaagtaataatattcggtgatagaatctgagtttgtttgattctggtgtggggcttatatctaacttttttctttgtaccaatacattttcaattttacatttttgattagcttaaaatgtgaaggataccttgtaaataactattacactattgcttgtcttagtctaatagtcttcactaatattttgtgcagtagaagtaaatattataaagagttgttgtttgattatagagagttgttgtctattctttaacttgatgtgatgttgtttttgatgacaggtaaaa

SEQ ID NO: 6126 - DNA, 3000 bp, Unknown
  misc_feature (1)..( 3000): cDNA_ID_1009437_gDNA_ID_1620847_Annot_ID_50946 3000 nt of promoter + ATG
aacgagaatccaagaaacgagatcataaagttgattcagattggtttgttgtgtgttcaagagaatgcagcaaagagaccaaccatgaactctgtaataacttggcttgcaagagacggtacttttacaatacctaaacctacagaagctgctttcgtcactctgcctctctcggtgaaacctgaaaataggtccatgagtgagcgtaaagacaaagatccgttttcagtggatgaggtctcgattacagtcttgtatcctcggtgaatattccattattttctgacctcatctgcattggtgctagagaaactagagtacgatacaagaaacatgtaacttggggtgggtattcggataattcggtttattttggttactttatggacacattgtcaccgaattatacccgaatttagttgagtaaataattattttaaattctttaaatttcatctttagtataaattctttttgagaatacatattaaaaggaaaagcctaaaaaccgcggtttattttttatttggccgtttaatacctgtaattttaaaattggaataaaaatagctaaattattttttgttgtcttttaaatccatggtcttttaaattttggtaatttcgaatttgcgacttaacatctgttattgggcgttacggaaatcgttaacggcgttaacaaaattaagtgaaattagaaaagcaaaaaaaagtggtctaaaaaaccacgatttatattttaccgttaaccggtaacgacttccgtagaacccaataacagatgttaagtcgcaggttcgaaattaccaaaatttaaaagattatggatagagtaagatacaaaaaatatgtaatttggggtggatattcggataattaggtttattttggttactttggtatggaaacattgtcaccgaattatacccgaatttagttgagtaaataattattttaaattctttaatttcatctttagtaaactttctttagtgaaatataaactctttttgaggatatgttatattaaaaaatatttggtttaataaattaaattaaaaattcgattgagtccgtttttttagtgaactttctttaccctaatcggtttaattttagattgggtcaaattcgttgaataatttcatttctgttttgaatcggtcgtatcatttcggttcattaaaatgctcaagatcaggacaaagattcatgtttcattcaaactctagtttaaaatttcgatcaaaagacaaatttctttgtaaaagtaaatcaaatttgctaatataatatgtcggtaacaaagaatgaatgaacaaattcatctatacaaaaaaaagaaaagaatgaagaatgttctctctaagaaaaactagaaaagcttgctagcgaattctttggccttaacctgagagagattcgatcttttcgcgagatctctcagttctgataagcttctccctagcttcaccgcaactcttgtctcaaacacttgtccgttctctctcttctccgtcgatttcatagtttcttctaatagagagaagaatccagctgagtttctatacatctcaaacaccattcccacttgaccaccatgctctaaagtgttgacaaccgcagccaaagaagcacaagtcatcgccacgattccagctaaaccggaatcttgaccgataaagacagagcttacagcagaaactccggttaaaactggtccagagatagccaagaaccggtttagcttcaacgccacgtgacctaatttctcatactcttctgcgtctctgctcttcaccacatgagcaacttctctcatctccgcctcaagctcttgactccatccattcgcaagactagttttagggtttttctccttgttttcaggccaccaagtcgccggtttaaactcttccggaaacttctcgagcattgttccgatcagaggaagaggataagctttatctagagacaacactctctttatcacttccttaacatcttcttcttcgatctcctcgttttctctcagaaacatttcgatttcgactctcagcttcttgaacagcctcgtcgcgttcctctgttcttcagctagctgcgaaggttgaatcttgctcatcaaggcagcaaaacccgtcgcagatgttaacaacaccgttgaagctatcttcacagcggttacagaatctacaccgtgaccgttaaccgaggctattccggccatcaaagcggcagtgagagtaatcatgttgacagaattgagcagtaaagagttccaattgttacgttgatctccgatgttcttgtgcatctcaatcctatccataacttcttcaagaaccgcattgagacgagttctttggatagaatcagaacctctcttttgtttcaacgaaagaggaagactttctacaaactcaaagctcggttctttaaccgataaagtcggtattttcggaaccgagacgtgaaatttcggtagcttcgggattgaaactgctgctttaggtcttgtactagaagaagatgacgaaagaactaatcttgatacctgcaatgaagccattattgataggttttttggttatgttggtttcttaatatctctcaggagatttgtgattgtgtttgatgaatgaagagagaaatgttatgtgtggtgttatatataggtttaagatgataggcataaaacaaaacaagaaaatttaaggaattgaattgaccaaagagagaattattgaccaaagaccaattaggctttgatagattctcctgtgacggtttttggtctaaccgtaaagctagcctcccaattttacccgccatcctcgtagaacgagtcttaattacatctaaaccggctcggtttatattggtttgattaaaccggttcggttttgttttgtaggtaggaatttggtcaaattgcttaagacacaaatgacaaaacactagagagagtatcgaagagaagaatccaaaaaaatg

SEQ ID NO: 6127 - DNA, 3000 bp, Unknown
  misc_feature (1)..( 3000): cDNA_ID_1830092_gDNA_ID_1620847_Annot_ID_50948 3000 nt of promoter + ATG
tgtacggttaagttagacgatttagttaggtacactattccggtttggttaaagatattttggagaaacattgatttgtgcggttgtacagttaaaaggggggcttactaacattgaaaaacaatttgccatcaatatttaatgcccaaaaagtttagacgtgactcttgtcacaattaatgcaaaatcattattactttggattaatatttgagataataattgttgaattaaagatgaacccagaaacaaaatttattttacgaaggaatgtgatgctgaagaagggttgatcttgtttatttacgaagtttggagccaagacaagcattatcgtgtaactaatgaaggttttaagaagttttttgttataacacactatgatcttcattgtattcgaaatcaactttgttttttatagaaaaacccagaaatcttttatttcctattttgttggttgaaaatgctaaatgagtagatatttatgtttataagtgtgtatatcgaaattctatttgtttttgtagatataatcatgttttcagttgcatttaatgggtttctcctgaatttatgatgcagttgggtaatggatattcccgtatttactatggtcggtgagtggagatgcaaagaagaagaatggaaatttgaaccagaggaagacatgtttggtcgatgtgtacgtgttaaggaaaatatgacgtacactaagcgaggctttcagtttgaagtccgcagagatcaatcccataattagttactggatgccgggagagatgtcagtgatgatagatactaaacgccctcctgtctacattgacagtcaagtggggttagatacgttctttttgattcgtggtgggtatctttttcttaacttgtttgtctctttcattacaaccgtcaagacactcggaaataatgtctctaggactcatggtgacgatgctgaaagtgaccatgtgtgtgatagtgtttcaaatgttgatgaaaataatgaggcgctagatgagcaagacgacgttgaagacggtaaaacagatgaagatgaataggagggggacaacgaaaatggtgatgggtatgatgattatcagggtgactatggatctatgggagaagtaccctcgatcctactatcgatggtagtgaaagtagtggcgaagattatgattacaacaagtggaacgatgtaattgtagaagaatatggaatagggaatgttgaggaggacttcattttcactcaactgactgttcaacgtccaggggaattcagtcggctgttggcagcgtgtacgtacacaagtcagcgtgtacctaacaaagataacatttctcactcgggtgaccgtacaccagctgtgactccaagaagtacgtgtcaacatggtttgtaccaatgtacgtacactatagattgaggagtatttttaagaacagaaaagtcatacaacaaacaatgtcttatctcgcaatcaaacaatgtttttgctataagcaacctaggtcatgtcctacaagattggagatagtatgcgttgatgatacctgtccatgacatttgactgctcaagtcgtcaggaattcagaatgtttcaaaatcacatcgtatgaaagtcttagaatatatctcagtcattgtcaatatcggtttattattgaatcaataaatttttcttaataatttaattcacaaacaaagatgtacgtatattactacacatgtacatacattaatttaccaacaaaaatgtacgtacattattgcacatatacgtacataatttttcaatatgaggaacaaatattatttcaccatatatttttatttaattattatgtatgtatggagattattgagatataagaatatgtaataaaatagcttaagttattagaaatcgtaccatatacgttccactaaataagttcgtgtacgtacattgtaaattgaatatacgtacacaaaagaaattcgatgaaggttataactgtaatttttcagtcatcttcaacctctgtatccttttttgcaaacctaattttgcggccgtctttaccagttttttcaaaatctcattttttttttcattttgaatactttttacaaataaatcttgtaaacctagagtatttttagttttaaaagctaaagtgtttgaatttttggttttttttgtattttgttcatctctgaaaacatgaaatttgtttctcaattttaaagttcaataggatgcctcaaatcaattacccaacaatttgaacggtaatgtcgaaaaatgaaggagtggatgaatgaatttcgaaattatttctacttttctctcggatctctccgtctctttctcgttttcttcgtttcagttttttttttttttttcgcaaaaccaaactgcaaaaaaaactaaaccaaaaccaactgcaactgtgcgattggttgattctattaagggtatttcagtcacaaaatgtttcaaaagggaaaacgtgaaaaccaactctcatttatccaaacgatgagagcaaaaaaaatttcatccacttttgtgaaaatttcttaatttttaataagtcatgaaagttgaaaccatttttggtcacctaatttgactttcacttgtcctttgatccttgacagtatatgaaacccgtactaggccttgactcgtttcatattcattcccttgtagtttccaaactatttggaagcggaaacgacgtcgctctttccagtgttactatcgaagacatttacatgccacttaaggcataatgacaacgaagtgttcgacgtatcgtttacgtaagcgcaatttagggaagaaaagtctttttgccttgctccttacgtcaccctaaaagtcaagtgttcgtgatagaaaagtctcttcgtatttgatccacaattctccaagagaataaatacaaatcaaaatctgtttatttaaagccaaacaataggttttaataaggaaacgttaatagataaatg

SEQ ID NO: 6128 - DNA, 3000 bp, Unknown
  misc_feature (1)..( 3000): cDNA_ID_1830084_gDNA_ID_1620847_Annot_ID_50950 3000 nt of promoter + ATG
gttagtcggcctagctgttatttccggtgggatctttatccgtactacagagcttttgacaatgttgtaagagttcctgctcctcctcctcaagcttcttctactattatcgattacgggagagacgagaaaagttttcaaggaagcaacatagcaattattgtggtcccttcagtcatcaatctcatcatatttgtggttctaatattctcttggaagagaaagcagtcacacaccataatcaatggtaaagtcttttaaaataagcaacatatatattccttatcttactaagagtttggttttaaacttgacatgttttatttgatgacgtgcagatgtttttgattcaaataatggtcaatctatgttacgttttgatcttcgaatgattgtaactgcaaccaataacttctctcttgaaaataagcttggccaaggtggatttggatctgtctacaaggtaaagaaactagtaagaagagtcctaacaaaatcttaagatgggtcagtgatctttaattatagcatgagaattcgttttcagggaatattaccaagcgggcaagagatagcggtaaagagattaagaaaaggttcaggacaaggaggtatggagttcaagaacgaggtcttactcttgacaagactccaacataggaatctggttaagcttcttgggttttgtaatgaaaaagatgaagagattcttgtctacgagtttgtccccaattcaagccttgaccacttcatattcggtgagccttcgcgagacgagactttgcatctttgcatgttacactacttttagaaaacaagaaaaaaaaactgtttctttgagatgtgcagatgaagaaaaacgccgagttctgacatgggatgtgaggtatacaatcatagaaggagttgcaagagggcttctttatctccatgaagattctcagttgaggattatacacagagatttgaaggcaagcaatatccttttagacgcggagatgaaccctaaggttgcagattttgggatggcaaggctgttcgatatggacgagactcgaggacagacaagcagagtagttggaacatagtaagtaagctctgtttttatttttaaagattctttgatcagcatcactattaatatgatttggttaatgcagtggatatatggctccagaatacgcgacatacggacaattctcgacaaaatctgatgtttatagctttggtgtcatgcttctagagatgataagtggtaaaagcaacaaaaagttggaaaaagaagaagaggaagaagaagaagagcttccagcttttgtaagcttatcacttatgtcgatcatctttactcttcttcttcatcttcttatcgaaattttaaaaattatttgcaggtgtggaagaggtggattgaaggaagatttgcagagatcattgatcctttggctgctccgagtaacaatatctcaataaacgaagtaatgaagctcattcacataggtttgttgtgtgttcaagaggatatttccaaaagacctagcattaattcaatcctcttttggcttgagagacacgctactatcacaatgcctgtgcccacgcctgttgcttatcttacgcgaccatcgttatcacttggtcattaatgaaccgtcaatcatgtatgttttatacctatttgtctctctctgtacaatgaatgacaaatgttgagaaaagagatgccgtgtaatgtaagcaaacttatgtttgatttgtgctaaacttatttatattaaatgaatatttgatatagccagcgttttggataatgttggaaattggactgaaacggaggaacgcatagatgaaattaaagtccaatttctatgaaagttcacacgagcagaaacaaaaactttgatctaatgtaagaggaaatgcgtgcggtaggggttgcgtagtcataaagaaaggacattgaacaaaggcacatttttaaacttatatgtaagagcatcatgggctcttaaccatatttagaatttaaatattgcacaatcaaaatacccctcatgagtttttatttttgacaactccaatggtagaagttctaatgaggctcttaaaatttaaatttttgaaatttatatgtgtttgtgtaacaccccgatttcaggaatatggtggtgcatacggtgaaatttaaaataattgatttgaccatttatattaccaaaatgcatttatcttttcgatcaaagatgttgaaaatgctcaagtaaataacatttgacattatattttacttttttcatgtttacaataaagcttcgttttgtatgatctgaaatataaaattttctctatatttataaccaatttactatagactaaatatttttaaattacaaataccgaatgactaatccataaaactgtgatggacaccatatataaagctatattggacgattgtgggtgttgttcattaaattgatgatttccactatgtcaaacctttcctccaaatttaagaatgacaaactatccaaaattattttcaaagatttttgaaagactcactacgagtttctcagaaattaacaattgttacaattttcacttcttttttcttcctgaattgtcacattctttatacagtatatgagtatgactcgtagaccaagcaaaggaagacttttttggtcatgcatgcgaccaaaaacaagtacttacataaccatattgaaaggacaatattttcaatacttctagagaagaaaaaaacccttagttcatacgaagtgattaagaaatgtttaccctttctctacggctatttgaatttgaatggccatctttgaagtcaaccattactcaaattttttcatgtgtactcaaccaaaacccattctctctcatgtcacctaattatacacatatataaacatttattacctcattaacaaaaaaaaaaacaatgaacaaaaccctaaactccattgcttaacaatgata

SEQ ID NO: 6129 - DNA, 3000 bp, Unknown
  misc_feature (1)..( 3000): cDNA_ID_1830080_gDNA_ID_1620847_Annot_ID_50951 3000 nt of promoter + ATG
ttgtcagggtttgcaataaatatttgtgatgcatcattgctcatagtttttttttttttttggtatgtgcagaggcgcaatatgattatggtggtcagtctaagctacggttcgattttcgcatgatcctaacggcaaccgatgatttttcctttgaaaataagattggccaaggtggatttggatctgtctacaaggtaaataaacttgagaaaaattactatcaaattctttagatgtgtaagcaatcttatagcacgataatcgggtttgcaggggaaattaccgggaggggaagagatagcggtaaaaagattaacaagaggctcaggacaaggagagatagagtttagaaacgaggtcttactcttgacaagactccaacataggaatctagttaagcttcttggattttgtaatgaaggcgatgaagagattcttgtttacgagtttgtccccaattcaagcctcgaccacttcatatttggtgagccttttttcactttgatgtttgtgtaaaaatttttgaatgttctagtcgctggttcgagtgacacttgggagatgaccatataaaaatattcagtggtttagtatattgatgcttctttggtaatatgcagatgaagagaagcgtttgcttctaacgtgggacatgagagccagaattatagaaggcgttgcgcgaggtcttgtttatttacacgaagattctcagctgaggataattcaccgagacttgaaagcaagcaatatccttttagatgcatatatgaaccctaaagttgcagactttgggatggcgaggttgttcaacatggaccagactcgagcagtgacaagaaaagtagttggaaccttgtaagtatcctctgtttttactgattcttttagacaaaacaagatactctgtttttttttaccctaaattttcgagattcttggaatcagaaactaatttgaatttgttttagtggctatatggctcccgagtacgttaggaacagaacattttcagtcaagacagacgtttacagcttcggagtcgtgcttctcgagatgataaccggtcgaagtaacaagaactatttcgaagccctcgggctccctgcatatgtaagcaaaatccagtcttgtttactactttagacacaaatgaatctcaaaagataatttgagtataaacttatggtgataatatataggcatggaagtgttgggttgcgggcgaggcagcgagtatcatcgatcatgtcctcagtaggagccgaagcaacgaaatcatgagattcatccacattggtttgttgtgtgttcaagagaatgtttcaaaaagaccaaccatgagtttggttattcaatggcttggaagtgagactatcgccattcctttacctacagttgctggttttacgaatgcatcgtatcaagctgaacatgaagctggtacattatcactaaatgagctttcaatcaccgagttaagtcctcgttgaaaccaagatctctctgtcaactcttatatccaagttttattcacctaaatttcacgatataaacatatgcacaataaattaagttgttattcacctaaatttcaatttctgaccaaggagatggaagatatgagaagcatatgacagtttggtttgcaacaagataaggagggtagttactactaaatatttttcagtgtatgtatttttaaaaacgttaaactttccgatgcacttgatgtaaacacgttttttcgaataaattttacattctattcaaaaaaaaaatttcaatttctgatcatgggctgaccattggacaagttttcagaccatgtccattaaggaccaacaattaaaacccatgaaaaataatggtccaagtggacatgaccgttgggttttagacagtccaattgacacttctacatatatgtatgtatctaaatggggttccaactcgaaactcattatcaataagtggattggtttatgtctcttatatactgttcaagtctcttcttttcttcccagcattccaatgtgagatatttctccacatctactaaaatggatacataacataacaataattcaaaatattccttctatacttgagagtaaagaatcttggtcttccatgatacttccacgcttcttctttattttgttagggttttaaatttatatgctaaaacaagtgttcaaaaaaatgctaggcgctaatcgggcagtgatccaatgcctagcgtctagaacgcttaattgaagcctatatgattttaggcggttaaagcgtttatagcctaaaacattatatatatatatattattatagataaaaataatttaaaatatgcattaataaaataaaaatattaaatttataaacaaaaattagataaaacgtacatttaagagaatcttgcaaaacctgccatattcccctcaaaatcttacaatccctatcatattcacagtcagcttacagaatctaccacatttagctacacgtggaaattcgtggacgaaattacccttaaggtgggtcagtgctctgacttagatggcgacagcttcgtccagcgaaaagaggcagcccctgttccgtaataaatgtttccgtttccgattggatgttatgtggatttattttttaaaaatggtaatataggggttagtcactttaattgtttattaatgttgcagaggaaagatgttgtgttgaacagaacaaagtggtaaactggggaatttgggaggtgttgttgaagacacaaccatttattgcggacgaggtaaaatttattatctggaatttctgtccttcgattcgctttagtttggtagttctatttgtttgtttggttgtgataaatgcaactacctcatattccaaaatggtatatttgttctgtttgaagaacagaaaaggatggacgaaggagttatggtattggtcggtggctgggaatgcaaagacaatggggagtggcgtttcaag

SEQ ID NO: 6130 - DNA, 3000 bp, Unknown
  misc_feature (1)..( 3000): cDNA_ID_3079603_gDNA_ID_1620847_Annot_ID_170252 3000 nt of promoter + ATG
ttttatagaacgaaagataggaaatgatgactatttctttttttcgacccaaaaatcggacctgaaaccaaagccaaaaatttagatttatcctattgggtcctaaactcctcgacccaaacaaccaaacaagaacccgacacgaacccaaatatacccggatatttgattagaatatccaaatttaccgaaaacccaaaatcttacctaaaacacgagtatttaatataaaatttgggtattggtctttaaaattggccctctctaaccaaaagatccttacttgattgggttttagccgaacccgatccgcgtacccggatgtctacacctagttttaaagttttggtgcaaaatacataagaccttgaatataaggttttggcgggaaaatgtatgcataaaatgtctttcaaaattatgatttcacggattttgtagaacggtaaacagtattctactatttttggtgagaatatggtattgtactattttttcatctatcaaaatagagagagagagagagagagagagagagagagagagagagagagagagagagagagagagagagagagagagagagagagagagagagagagagaatctaaatttgtgttcatgtttgagaacagttcttaatttctgaattacctgttacatctattcttctagattgattattaaaatattctatagctcaatgtctttaattcataagtttaattgtcaatttatttgcatttttatttacaactctgaaaacaaaacaaacaacttttttttttgttttagctaagaacaagtcctaaaactctttagaatattaaccatgtatatttaccttgcgcttgtatcgaggaattactcgagcaatcaaactacatagttataccatcaaatgtagtttaatagtttagtgattttgatgggaaatagataatttgttgtttcactgttttggtgaaagaatattattttaaaatatgataatatatataaagtaaaactatcttggttatcgttgtgatttctagatggaaattgtgttgtatataaactctcctttaagttaaaaatttaaaactcatccaagattttttgttcttaagttacattttccaaatgcatcaagttattaagtccaactcatataattaaatgttatttaacgaataatgtcttgtatatgcatctagatgcacaaacgaaccacttctaattttctttgatgctcttacatttttttcaaatgaatttttctcaaacctcagcatctttcttttgttaaaaataaaattttaatatatgagtcaaactatatgtgtcaatttgatctaatctaattcatcaaccctaataattttactatttggatcataatgagttgatgggtcagtgagttagtggatcgtttggagtaagttgtaatggtttatggttcaccatattaaaccataaattatcatacttaacatcatcattagctttattaatatcatcatgatcaccatataatcatcatcacctttatcatcaatttcttcaatataatcacaatatcataattttccaaccaaaaaatgagattctgtaattcttttgctaaagacactatttcacaatttctcagatagtaaaattgaacaattttctgccaaaaatagatggttttcacaagttttccaccgcaatacgatatcacactttttccgctaaaatattaatctatattttcagtcattgatggtgaataagggattcatacctcatggatcaacctaacttatcacattaatgattttattattttgttctaaatgagttgattggtcaaagaaattataagtagatgagttgatcagtaatcaggatcgcccctgatctaaagcaagtaaagctagggctttaggtgctaataatatatcatcatttataggacatcaaatacgggaaaattatatgtagcacagtgacaaagttaagttttaaggttaacatgaagtcttgagtttgagccaatattttgtggtttttgaatatttttatatttaagtgttatgggttttaaaaaaaaaactcatgctttaggtagctatgcactttgggcctgccttgtcaataatatgtaatggtttatagttagacaaaaactttcataagattataatttttcacatcataattatcttcatactatcatatcatcatattattaacgccaccgtcatcatcatcatcatcataccatattttccccacaaaaacaaccttcataaattttacgaaaaacaaggttccacaatctttagccttacctttaccaataatatgattaactatttggacacatctacttgcagtactctatacaaatatgatgaacattttccacaaacaacgattctacaatgtaactccatttctataagaaaaatgatttcatctcccatttatattttatatcacctacaactcatttgtattcatagctttttttaagaaaatctaattttaattcaaaataaatataattcaaagttctttttggatgattataaatttatttataacctttggttaaaaataataataattaataacaaggctattattagagaaaatatgtttgtttttttgagttttactttatttttacaaatattcagcatatatagatttaattttagaataaaaataaaataaatctggtaagtattcattttagattttaaaatttattatgcatattattattagagaaaagaaaatttggagttgtcagaagataattatttcttaaaatgcagttttatatttatttttagagaatagtaaaatcaaaaattacacgtgacaacaaaaacatgtactagcactaaatattttttttaaggttatttttggggaaaatatataaatatatttttatataaattatcagtatgtagtctaaagttttatcaaactaagagttttacaagagacagaagaacaatg

SEQ ID NO: 6131 - DNA, 3000 bp, Unknown; identical to SEQ ID NO: 6121
  misc_feature (1)..( 3000): cDNA_ID_1830072_gDNA_ID_1620847_Annot_ID_170250 3000 nt of promoter + ATG

SEQ ID NO: 6132 - DNA, 3000 bp, Unknown
  misc_feature (1)..( 3000): cDNA_ID_2139509_gDNA_ID_1620847_Annot_ID_170247 3000 nt of promoter + ATG
ggtggggttagtcggcctagctgttatttccggtgggatctttatccgtactacagagcttttgacaatgttgtaagagttcctgctcctcctcctcaagcttcttctactattatcgattacgggagagacgagaaaagttttcaaggaagcaacatagcaattattgtggtcccttcagtcatcaatctcatcatatttgtggttctaatattctcttggaagagaaagcagtcacacaccataatcaatggtaaagtcttttaaaataagcaacatatatattccttatcttactaagagtttggttttaaacttgacatgttttatttgatgacgtgcagatgtttttgattcaaataatggtcaatctatgttacgttttgatcttcgaatgattgtaactgcaaccaataacttctctcttgaaaataagcttggccaaggtggatttggatctgtctacaaggtaaagaaactagtaagaagagtcctaacaaaatcttaagatgggtcagtgatctttaattatagcatgagaattcgttttcagggaatattaccaagcgggcaagagatagcggtaaagagattaagaaaaggttcaggacaaggaggtatggagttcaagaacgaggtcttactcttgacaagactccaacataggaatctggttaagcttcttgggttttgtaatgaaaaagatgaagagattcttgtctacgagtttgtccccaattcaagccttgaccacttcatattcggtgagccttcgcgagacgagactttgcatctttgcatgttacactacttttagaaaacaagaaaaaaaaactgtttctttgagatgtgcagatgaagaaaaacgccgagttctgacatgggatgtgaggtatacaatcatagaaggagttgcaagagggcttctttatctccatgaagattctcagttgaggattatacacagagatttgaaggcaagcaatatccttttagacgcggagatgaaccctaaggttgcagattttgggatggcaaggctgttcgatatggacgagactcgaggacagacaagcagagtagttggaacatagtaagtaagctctgtttttatttttaaagattctttgatcagcatcactattaatatgatttggttaatgcagtggatatatggctccagaatacgcgacatacggacaattctcgacaaaatctgatgtttatagctttggtgtcatgcttctagagatgataagtggtaaaagcaacaaaaagttggaaaaagaagaagaggaagaagaagaagagcttccagcttttgtaagcttatcacttatgtcgatcatctttactcttcttcttcatcttcttatcgaaattttaaaaattatttgcaggtgtggaagaggtggattgaaggaagatttgcagagatcattgatcctttggctgctccgagtaacaatatctcaataaacgaagtaatgaagctcattcacataggtttgttgtgtgttcaagaggatatttccaaaagacctagcattaattcaatcctcttttggcttgagagacacgctactatcacaatgcctgtgcccacgcctgttgcttatcttacgcgaccatcgttatcacttggtcattaatgaaccgtcaatcatgtatgttttatacctatttgtctctctctgtacaatgaatgacaaatgttgagaaaagagatgccgtgtaatgtaagcaaacttatgtttgatttgtgctaaacttatttatattaaatgaatatttgatatagccagcgttttggataatgttggaaattggactgaaacggaggaacgcatagatgaaattaaagtccaatttctatgaaagttcacacgagcagaaacaaaaactttgatctaatgtaagaggaaatgcgtgcggtaggggttgcgtagtcataaagaaaggacattgaacaaaggcacatttttaaacttatatgtaagagcatcatgggctcttaaccatatttagaatttaaatattgcacaatcaaaatacccctcatgagtttttatttttgacaactccaatggtagaagttctaatgaggctcttaaaatttaaatttttgaaatttatatgtgtttgtgtaacaccccgatttcaggaatatggtggtgcatacggtgaaatttaaaataattgatttgaccatttatattaccaaaatgcatttatcttttcgatcaaagatgttgaaaatgctcaagtaaataacatttgacattatattttacttttttcatgtttacaataaagcttcgttttgtatgatctgaaatataaaattttctctatatttataaccaatttactatagactaaatatttttaaattacaaataccgaatgactaatccataaaactgtgatggacaccatatataaagctatattggacgattgtgggtgttgttcattaaattgatgatttccactatgtcaaacctttcctccaaatttaagaatgacaaactatccaaaattattttcaaagatttttgaaagactcactacgagtttctcagaaattaacaattgttacaattttcacttcttttttcttcctgaattgtcacattctttatacagtatatgagtatgactcgtagaccaagcaaaggaagacttttttggtcatgcatgcgaccaaaaacaagtacttacataaccatattgaaaggacaatattttcaatacttctagagaagaaaaaaacccttagttcatacgaagtgattaagaaatgtttaccctttctctacggctatttgaatttgaatggccatctttgaagtcaaccattactcaaattttttcatgtgtactcaaccaaaacccattctctctcatgtcacctaattatacacatatataaacatttattacctcattaacaaaaaaaaaaacaatgaacaaaaccctaaactccattgcttaaca

SEQ ID NO: 6133 - DNA, 3000 bp, Unknown; identical to SEQ ID NO: 6127
  misc_feature (1)..( 3000): cDNA_ID_1830092_gDNA_ID_1620847_Annot_ID_170242 3000 nt of promoter + ATG

SEQ ID NO: 6134 - DNA, 3000 bp, Unknown; identical to SEQ ID NO: 6126
  misc_feature (1)..( 3000): cDNA_ID_1009437_gDNA_ID_1620847_Annot_ID_170240 3000 nt of promoter + ATG

SEQ ID NO: 6135 - DNA, 3000 bp, Unknown; identical to SEQ ID NO: 6125
  misc_feature (1)..( 3000): cDNA_ID_1830100_gDNA_ID_1620847_Annot_ID_170239 3000 nt of promoter + ATG

SEQ ID NO: 6136 - DNA, 3000 bp, Unknown
  misc_feature (1)..( 3000): cDNA_ID_1830076_gDNA_ID_1620847_Annot_ID_50952 3000 nt of promoter + ATG
acgaggataatcaattactatagagcttttgtatattataaggtgacttgagacaacgagtacacactacttgacttgacaaaatggtgtattggtcagattttgttactactaggaaagtactcggacatacgcgtaggttctcatgtccatatatgtatacagagatgttcatgttcaaattttattattttatgtgttttcgttgtatagttaggatataattgaaatacggtaaaacctctataaattaataatactgaaaccgagaaaatttattaatttaaaaaggtattaatttatcgattaattaataaatttaaattatagagagattttacaaattttgtaactttttacaaaaatttaatctaaaaggtaaatgagaccatatatttatataagattttcaaaaaaattattatcttattaatatattgatttgtatcaatttttacattgatctcaactcggaacggaagaatttattaatttatatagttattaatttatcgagaagttttactatatatttaacataaagtaatacgatattgacaaaagatagaaagaaagtagtatgatatgtttgttatcaatcccatttgacaagttttcatttgtgcgtttaaaacaactatagtatacataactgcttagtaaattgagaatgtttattcctatcaaaacatacattttactcacaaaaccttactttggaaagtaattgcaaatttacaaataacttttcataagtgatattgactagtgaggaagaaaaacaaaaattagcgattttcaagtagccttttttgttttgtcaagtagcatattagaaatgttataaatatttcgtcgtagttggcaacggtgaccaagtaagtgtctacggttcttagaaattccatgattttttttttttttgtcatcggttttgttttgagctcaaaagaatcaatcttgcggaatattgtttacataagtgacataaaacgatttagtacaaattttcgtgccaaattgtccgttttaacatttgcattacaaaaaattaaagataaagagaagcttgtgaattcttccttgtcgctctgaaaatcctccaaatatgctgaaaacgccgactattcggttgaggaaaaaactatcttcaccaggtctgaacagtatataaaaaaggctacatcttggttgtcggcaccaatcatacactttatcgtccagagtagagtttcgacttcggtgtaaagtaaaaattccatgattgataatgaataatattaggttccaagtacactaatactttttttctttttttctatattttttttctgaaaatacttttatgggtgaattggaaaactaactagttttcaacactaaattaagaaaatagcactataattctagaaattaagaaactaacatatgagaactgggaaatatccactttattcttatttaacagacctttttccttcatcatcttcttcgttgcttcttctcttctccccaattcaataaaaaatttccagaaaaattaacttttttttatctcaatccattctaattacaaacatctattgatttaaaaaaattaaaccctaaggatgatactttatatgaacccaaacaaaaataattaaactaaatgaaatcatctcaagtttcagtttttagaagtctgaaaaaatcatgtttatatactcttaatctcttttctcctttcttaaatcgaattgaaatcgattcgattttgggtttaaatttgtgttaaggagatattgatcaaaccagaaaatattcaattagatctggtgagtcttcgtatttgttttccttagttctagcaaatagaatgtaacaaaattgaaagtaaaatagaaaactatagttttgttctgttttaatgaaggcgatatagaaaaaaagagatgagatgccagagataagaggtgagaggtgagaggtgagaggtgagaagggtaaagtggtcttaatatacaaaatacaaaaaatatcacaacagcttttttttttaggttagtttcttaattattaaatttttttggttatagatccaaatttctctacctttattcctatttttatttaataagatatatacattttttttataattattttctttacttttaatttcttttctataaaataaataagtatagttgtgttataatgttttagtaaatttatattttatttgataagatatatttatcttcttaccacacaatatggtccattaaaaagtttatttatgagccttttctgaaagtccttgtttgttctacgttgattgttgtaattcttcgtttatttgcgctgccgctaccgcttcttcaacctctcgtccattcctcccgagcaagctttgatctgtttcgcttctctcaggtttgtctcgaatccgaaagtaaattttagtgaagattgacatgttaaattgtttcttgtctgttcattaacgcgcggcacgtcgaaacttaacctagattttttttcttcttttaagaatcggaatccaaaatttgtcatagtgaatgattggattgagttgatggggataaagtagaaacactaattcggtggcactgttcagatgatggctttattatgatttctcgttgaatggttttaaatgttcaaatgtatatggttttaaatgttcaaatgttgtttgatatgaattaaatgtaggaaaattataaaatctgccatatttttcccaatcgttatgtaatctgccatatttcttcgggcattacaactcataccacatttggttgtgaaatgtccattttgttcccacggtttactgagcagttttcgcgctcaacaactgcgtctttttacaataccttttatctctttttcattgtaaaccgtgcggaaaaacaacaacagttaactctctctctttcgtctatctctctcatactttccctttccttcaccgataactttcatcggattatg

SEQ ID NO: 6137 - DNA, 3000 bp, Unknown; identical to SEQ ID NO: 6121
  misc_feature (1)..( 3000): cDNA_ID_1830072_gDNA_ID_1620847_Annot_ID_50953 3000 nt of promoter + ATG

SEQ ID NO: 6138 - DNA, 3000 bp, Unknown
  misc_feature (1)..( 3000): cDNA_ID_1830199_gDNA_ID_1620849_Annot_ID_50964 3000 nt of promoter + ATG
gaattattttttacttttagataacaatgtatactctatggtaacattgcatcaattatgaatggattggccaagtataaaatttaattatgattatacctcaaattcacactacttaaccatctattttcaggctattccattaattagtttttattaacacagtaatttatttgagaacagatttgaaaatattttgctaaactacttaaccttagactaactggaaaacaatatttaactaagtgtctgctaattaagaaaattaaagtatcgttcaccttctagacacactatgtcgattactgttttgagtgcaactagtgtattcgaaataatacttgggtgaattaagtttaagctttgagtaactaaaaattatatataaggatccataagttttgttgaaatagaataatcggaacttttacattcaaaaactttttcatatatatacagaaattcaacccccaataaacaaatgactaatgagtgatagtctgataggtgttaatgactgtcttaatatgagatacataagaaattttgaatggaattatttaataaatgtgaattatgtgggtgacttgactattcagtgttcactgaacacaaaaaggtaccaaaaaaattattccaatcagtgagagatcttcaaaggaaagattctcattcgcgccaatatttttgctgggaaaaggtaaaactttttagattattctataaattattttgctgatgttcccttacgaaaaaaacagtattcagtaccaaaatgtctggcacatataatcgtatagacgataagtagttgtcgaaattttatagggcaatggctcaagcaagtgaaacattgacacctagcccattcacatctatgtcactatatatgtgggttcacaaaggtgacgttttccttatgtgaatcatgtaaatgctataaagttttgtagtacatgagcgattatatattattacgaaactcctgaaatatatgatatataatcagatgggttgaggtagtgacaatagtttgtaagtgcaccaaaatacgttttgagctattaagtccgaagtttaggtccttttaagttatcgaaggtatgcttaaaaaaatttactaccttttagtttttttttgcatgatcgttattcgagaaacatgctgacgcacagattgatcagacgctgtggtaatccaagtgatagcaacaacacaaaatcatgtggagaatgatgatgatgatgcacatatggatttgcataaattttgtaatctccgaaatattgtggagaatgaaggaggagaaacataacattttaaaaatggataaagaaaaagaaagtgatggaaaaataagtatgtggtagaaaaatagggttccttcttctcatttgtctctttcaagctttatgatgcaaagcgacccttctttttcttccctttattttcttttattgttatcgttagtgtcactttctttttattaatttcataaagtcgtatgatcgtatccattgtttttattttgctccgacaggaccgacactgatctttctatatctttcggtaattaatgttataggattcctttttcagatcacatcatttgtattttatgttattttcgtttaacataatacactaataaaatgacttcataaaagatatggtttaggttggggaataaaagatatggtcgagccatacttctaatccttaatttaggttgatagaacatctaccgtcactaacaagtaatgaagtcagattaaaacttgatcgtgacaaaaattgtcccatatattttaaatgaacatgataacatattaattgaaaaatgttttagtgacttagttgtattgaatagcaaaggcaagtaagtagttatatacaatgactttcctatactcgagaagaccgtatccaagtaaatcaagaagatcgatatatatctagccggatctttggattgtcaagtgtcaacaatcttaattagatcaaaacagtctgttttaaaacatatgccaagttgtcaaacagaaaccaagcttttcatcactcaaaggagaatcacaaattctgcatggcgtgggggatagatatatatcatcgggagccactgagtccaagaaattgaatctattgacttcctattgctaatctatttcaaaataaccacgtcagagagatacgagtacatgtaatatcaatgagatattttcttaggagtaatttgaagatatttaatttgcggttgtaataatcccttttgaaaataatttgacttgtacacacggcaacaaaagaatgatctaaaggcaagtaacaagaatctgagtatccaccacctcttcctgttcctgttcttgttcctgttcgattccaaactctcactttctctgcccccctcgtgtctggctcccaccttttgtgtccactcaaccaacaacaacagtgtatctcttctcctccgttaaataactttatatttccccgttacatttccttattgtaacaaccaaaaaataattcacctgagactcacattctttaaggttttcgcatttaatatttcactttcttgaaatctcctatatttttgttatatatggtcgtcggcgatgccaacggcggtgaatgtagcgaaacaatgcttaacggcagaagcatcctacgcattagaagaagctgtgaacgttgcacgtcgaagaggacactcacaaacgacgtcgcttcacgctatctcagctttactctctctaccaacctcagtcttacgtgacgcatgtgctcgtgttcgtaactctgcttactctcctcgtcttcaattcaaagctttagatctttgcttaagcgtttctttagaccggatccagtcgggtcatcaacttggatctgatgattcaccacctgtttctaactctctaatggctgcaattaaacgatctcaagcgcatcaacgtcgtttacctgagaacttcaggatctatcaagaa

SEQ ID NO: 6139 - DNA, 3000 bp, Unknown
  misc_feature (1)..( 3000): cDNA_ID_1830191_gDNA_ID_1620849_Annot_ID_50966 3000 nt of promoter + ATG
tttgctcatctaaaaccctaacagaagtcgaattcatgaggcagaaatcagaagacggagcttccgccacgtgtctcctcgaattcgccgcctgtgatgatctttcatcgtttaagagagagatcgaagagaatccatcggtggagattgatgagtcagggttttggtattgcagacgggtcgggtctaagaagatgggttttgaagaaagaacaccacttatggttgctgctatgtatggaagcatggaagtgttgaattacataattgccacaggaagatccgatgtgaacagagtttgcagtgacgagaaagtcactgctcttcactgtgcagtttctggctgttctgtttctatcgttgagatcatcaagatcttgcttgatgcttctgcttcacctaattgtgttgacgctaatgggaacaaaccggttgatttgttggctaaagattctcggtttgttcctaaccagagtagaaaggcggttgaggttttactgaccgggattcatggttcggttatggaagaagaggaggaggaactgaagagtgttgtgactaagtatccagctgatgcatcacttcctgatattaacgaaggtgtttatggaactgatgattttaggatgtttagctttaaggttaagccatgttctagggcttattcacatgattggactgaatgtccttttgttcatcctggtgagaatgcaaggaggagagatcctaggaagtatccttacacttgtgtgccttgtcccgagtttcgtaaagggtcttgtcctaaaggagattcgtgtgagtacgcgcacggtgttttcgagtcttggcttcacccggcgcagtataggacacggctttgcaaagatgagactggttgtgctaggagagtttgtttctttgctcatagacgggatgagttaagaccggttaatgcttctactggttctgcaatggtttcaccaaggtcgtctaatcagtctcctgagatgtctgttatgtctcctttgacgctgggatcatcgccaatgaactctcctatggctaatggtgttcctttgtctccaagaaatggtggtttatggcagaacagagttaatagccttacaccaccaccgttgcagcttaatggtagcagattgaagtcgactttgagtgctagagatatggatatggagatggaacttaggtttcgcggtttggataaccggagacttggtgatctcaagccatccaacctcgaagagactttcggatcatatgactcagcttctgtgatgcaacttcaatcaccaagcaggcattctcagatgaaccactatccgtcttcacctgtgaggcagcctcctcctcatggattcgaatcttcagcagccatggcagctgcagtgatgaatgcaagatcctcagcgtttgcgaaacgcagcttgagtttcaaaccagctccagtagcttctaatgtctccgattggggatcaccaaatgggaagcttgagtggggaatgcaaagagatgagctgaacaagttgaggagaagtgcctccttcggcattcatggaaacaacaacaacagtgtgtcacgccctgctagagactacagtgacgagccagatgtgtcgtgggtgaactcactggtgaaagagaatgcaccagagagagtgaatgagagggttgggaatacggtgaatggtgcagcgagtagagacaagtttaagctgccgtcgtgggcagagcaaatgtatatagaccatgagcagcagattgtggcataagaagcagaaagaaagatgtgggatttatattgcttttgtcttctgggcctctctacacagaatctaacaaatctggcaataattctttgatttgtgtttgacccatagtttggttactagtatatgtttttttatgttctttttttctttgtcattctcttgtccttcgtgacactatgtaatgattaaaagcaaataattgatgcatgagttcaaatgttctttgaaggatccatcttattagctttgtaattgttgtgatatcttaatcttattggttacgtatttcaagtgctttagaaaaaatgggcctaagagattttggggagcttttttggcttgttattttcctcacatatacaacttgcagcttattatttattgaaaatcttttcttatctagattcaaaaagatttccacaaattttaattaacgacccctgattacaaagaaacctacccaaagtcaaattttgtccataatttctatcgtgtaggacactaaaaagtaaaaactcatacctaattggtttctagtagaaacggtcagtgcactatctttctttcaggttatcgaaggaaaaaagatcagtagagtagcatcgttaatagtagagttaagaaaagcatgtaacatgtggtctactttttatttcacagaaaaataccataccatgtgataatgtcgcataaaatctttacttttccggtgttatcgatgtgtgttaatgctaaatacccgaaacaatttcaagactcaattttgaactatcgaatagaattcttctaaaatggatgaggaaaaagtcgctggtttaagtcgtgcgaccctcaaaataaagttaggaatataatcacaagctgcatactttcattaatcaatttaaaaagaaacgactaactttattctttctttgccaaactccataattagttaagtctatgaatgaatgtgaagagagagttttacatttaaaattgtaaagggcaaattatagaaaattctgtgtccaccaattaggcttggctctttaactcactgttctcaatctttaataatccccatcttcttttctcctatatgattatctctctttccttcgtgcgtgttatctctctgagccacatgccgacacttacataactgttgaccaagtctctcttccttctttatcaaatcatgcaaccttcaagaacaagagtttcattttttgaaacaggagagacc

SEQ ID NO: 6140 - DNA, 3000 bp, Unknown
  misc_feature (1)..( 3000): cDNA_ID_1830180_gDNA_ID_1620849_Annot_ID_50969 3000 nt of promoter + ATG
aaattatagagaaaggtaatttgggcaccgacgtgaatttgactaaattacgagagagaaagaaagagagacttggtcacgaaggtgttaattagcatgaaagagagagaaataatcgtcgttgaccattgaccataacttagtcagtcatatatataaaaatccaaccgcccactattgttcccctattcacaaggtccttgctttctcagacgtaaacaacaagaaattatattaacacaacaacaacaacaaaaagaccaaccctatttattcatattttctcttatatgcaactctcaaagaatccgatcaaacaaacgagaaatcgagagaagaattacaccgacgatttcaccatgaagagatctgtaatcatggctcctgaatctccggtttttttcccacctccgcttgttttctctccgacgtcggtcaaaacgccgttgtcttctcctcgttcgtcgccaccgaagctgacgatggttgcttgtcctccaagaaagccaaaggagacgaagactacgggttctgattctgaaacggtgttgaaaaggaaacgaccaccgatgcttgacttaacggcggctccgacggttgcatcgtggtgcagtacgacgagagagacggcggagaaaggagcggaagttgttgaagcagaagaagatggatactactctgtttattgcaagagaggaagacgcggaccaatggaagataggtatttcgcggccgttgatcgtaacgacgacggaggttacaaaaatgctttctttggggtatttgatggtcacggcggatccaaggcggcggaattcgctgcgatgaatctagggaacaatatcgaggcggcaatggcatcggcgagatcaggagaagatggttgttcgatggagagtgcgataagagaaggttatatcaaaacggatgaggatttcttgaaagaaggttcgagaggtggcgcgtgttgtgtaaccgctttgatatcgaaaggcgagcttgcggtttcgaatgcaggcgactgccgggctgttatgagtcgtggtggaaccgcggaagctctcacttccgatcataatccttctcaagcaaatgagctcaaaaggattgaagcattggtgagttttatccttgtgcattggattttgattagtaacatcacataattgtggaattgcatttcaaaaaaaaaaaatcattgaattcgtggaaaaagcgactctagtaaaaatgcggttgataaaatttttgcaaattggagaatcattctaccattttgcgttcaaaataatgttttagtgcggtttggtttaatttgtgtttggtttacttatttttgaatgtgtgtagggtggttatgttgactgctgcaacggcgtttggagaattcaagggacattagcagtctcacgaggaattggagaccggtacctcaaggagtgggtgatagctgaaccggaaaccagaacattacggattaaaccggagttcgaattcttgatcttagcatctgatggcctgtgggacaaggtaagcataacaagaaatgcatgatttcaaaaatttgattttcatttttggtctttggatttaatgttgaagctggtttgtcctataggtaacgaaccaagaggccgtcgatgtcgttcgaccgtactgcgtaggcgtagagaatccaatgacactttctgcttgcaagaaactggctgagctatcggttaagagaggctctttggatgatataagtctaattataattcagctacaaaactttcttccatgatatattaacacatagtacattagctaaacttaattaatttcattaggtcgtagttattaataaattttgttcggtattttacatgtaaatacataaaggtttggaaaataattaatttattgttattgttcttagagataagctccaaaatatttttggtttacgatataaacactacataatacatgaaattgcactatctaaccatttatcatcctttttatcctcaacttttttattctcatgcattttgaaaaccacattctaatcatatttctgcttttatgtgtaaaaccaacaaagatgtacatggttgatatacacacgtagacataaccttgacaagcaacatcttcgtcgttactcattttacagatttctacccatctgccttcaataaaacaaacatcaaccatattagtaactgcatggtaaccaagcatacgtgagtttttgttgtaaggaccggtaaacactttgaacctataaacacctccgcctcttccaacaactcagaataatgaacaagatcacatgctaaggttttgtaatgcttcttacaaacaaaagtttatttaaaaagggaagggagagtttataaaatataaattagcattgacattggtgtgaggttcttcacataatcatatcattctgaccaaaatattagtcggaaaatggttagaaacacaccaatatgagttgttttcttgtagttctgagaaaacatagatgaaccaatatatcaacgtaagtaactaagataaattgtgaatcatgagaatgcaagaaatattttctcatgattacatgagatgaaatactaccttacaattcatcaaactttttgtagaaaaaggtattgaagaaatgaaaattggatgtagacaaaaaaataaaaaattcttgctgcaagatcctggacaaagacaataatcacattaagaacaatgtaaattttttaaaattagtaaaaactctctataaattaataattcacaccatttaaattttagaggaggtgatgaaaggacattatcatcaattttggtagttaacccccaattatttaactaatcaagatacaaggggtacaactgtaatatattcatagtttggtgtgttttctacaatattcagaaacacgatttaagacgattgaaactaaaaataaaaagtgtcggacttgtaaattttcgctcagcgatctgcttcca

SEQ ID NO: 6141 - DNA, 3000 bp, Unknown
  misc_feature (1)..( 3000): cDNA_ID_1830167_gDNA_ID_1620849_Annot_ID_50976 3000 nt of promoter + ATG
ctaattaacatcttctatagataatttgggaagagtagagtccaattggcctaattgggtgatggattttgttgtagagaagatcgttaataactaaaaaaatatcgatttagaaggacattttacttatgaaaaaaaaaaaaacagaaggaagaaaaactaaaatttagagttttaggtgatgtttgcagttttgctccaaaaaaaaataaaatgatgtgtgtagagattttgattaagaacaataataacgttttaaatttcagtcaaaaacattattccacagtcattgtttgattgaatacattttgtttgtgtcatcactgaattccccaaagtaaaaaataactaattttcaagcatcacatatgaaacgaaattcctaatttttaattcgacaagcaacctacattccacgaagttgccctggtccaaactttattcgtttttattataaaaaaattgcgagcacgacttttgtcctcatggtaatataataatgtcagaccaaaaaacgatataaaagtgactacgaataatataatatgcaattgtggtttcaatacctaaactattgggccatactgattgattacttagctgcagtgactatgcatgcaaccccatgcataatacgtacaaatctcattattattatattcctctcggttcacccctaatttattctttccgattaatatatttacgttcacatatggttgcacattatttgaagtacaattatataatatattacttgaattttcttcggtctagtgtacactgcgtatatagtttctacaatctcagatcttcagttcaaaccctatattataaaaaagttatagccttataggtaccgaaattttaaaagttgagagacataaaacacgaagactttggtccacgcttagaatttgattggttcatttcatatatgtgtcaaggaaaatgaattagcatagtgtcgtggtcaatttcaacggattatataacttagtaaatcaataccgtagttaatataccctttttttgtcaataccgtgattgatattaatacttagcatttggtatctgttgggtcgtataattgatcatgggttgtctgagcatggaagtaggattatagggtagatatgaagaacgtcattctaacgtaaattattattgctacacttttaaaaccaaaatatacgacagctttaattcttcctaccaattaataacgacgacgaaaatatacgattacggctggacattgggcttccaaaaacgattttgaaaaaaaaaaaaaaaacagaaagaaatgtcatatacctaatttatttgaccgatgactttcacattatctggtcaccattcacaaaatttgacacagtacttgcatgtcgcttacaagaaaaattagcctgctgatgttagaggaatacagatagatacaattctgccttgaccctctcctggaggcgcaaagttcatgacaataagtaaatcatatattatacattttaattttctcctttctaagttcttaaaaaagtatgacatcccctactttgcctacttccttaatttcacaaaaataaaagtatgacatacttaattagaacatatcttttgtttagtattttactagtaattttaatagtacgtacgctatatagaacgaactaatcacccctgaactgaattccaaactaaatcaattggttgcatgtgtgtacgtacagaaactcatataattctcaagttcaattctgtgataatcatgtgacttattagcttcagttgttatattctgtatcctaatttatttatttattttttaacatttatttgggttatatatagaaaaagagatgtactatttgcatgtatatagagagaggcgcatgtgtagataattatagataatatgaaatcgtaagagtagtggagatggagacaaacccgtgattgtcgttggtgacagaaacaagtagtaatattttcttctcgtgtctttcagtgaagacagcccagccaagcaccttttaacttctgtctgattcctctctctatgctctttctctgtctatctatctaattatgcttttgggtttcttctttttctggtttcacagctttggctttgaagtcacgagcccatccccctaaccatccccttttatgctttgcttttctagtcaatttaattcatgagttgtaacgatggaagaagtttcatttatctaattaatgtgtatgcctcattaatgttgccttcttcctatattgctaaaagctagttcgaatgaaacaaaaacacgtaccaaatccaatgaaaaacatagatcttcagttggttttgaaagaaagaacaaaaaaaattgttaatgtacatgtcatattgaaccctgatttatgtcataaaattggtatacgtacgggttgatatcatgaaaacgtttgatcttttaccatgaaaatgatcattatttagataaattcaatctactccttggaatttcttttcactccctatcacaacgagattcaaagattaattgtactaattgacttaatagttattaactcattttaaaatacatcttatgactgaagttactaatgtttaatgaaattaaaagtaccatttttgtcatgaggtgtaattctagatctatctttccctaagatgtatataactgtagaaaaaaccattggtgtaataaaaagctatatattaaatagaatttagaatatccgttgccatcatatacatatttcaacatatatgttgagttggagagagagggggagaaaaaggaatgatggatacaagcatccaaaaagtcatacacatagaccatcaaaagtcttcaccttaaattcctaacacatatgtatgagtgtgtgatctttgtttgatctttgtccagagaactccaagatagaccaaaaaggttcaacctcaaaacaaacaacacaaaaacagccaaatagctagagaccaagatg

SEQ ID NO: 6142 - DNA, 3000 bp, Unknown
  misc_feature (1)..( 3000): cDNA_ID_1830163_gDNA_ID_1620849_Annot_ID_50978 3000 nt of promoter + ATG
tttggactgccaaatgtggattcgagctctagtttagtttgctccggtttaaacgcaattcatgaataagcaaaggaaatcaatccaaacttacgttgtgaaagaagttgggccgaaaatgtctgaaacccgaataggcttttaacccctaaccccttgaaactatcttgtggcccaattaaaacctaattgtttaactgacacggtgccgtttaacttggcatctttgacgcaagtcgactcattttccgtttgtgttccttgctcatttcttatctctagaaacctgtctgatttgctccgtcgcctaaaaagtctaaaaccctaagtgtctccgcctcgtagctttacccgattcaacgaagagtgaattcgcgtgagctcaagcagtatcgaaatctaccaatcatggcgagtcaaacaccgaatctcgagtgtcggatgtacgaggcgaaatacccagaggtggatatggcggtgatgatccaggtgaagaacattgccgatatgggagcttatgtttctctcctcgagtacaacaacatcgaaggcatgatccttttctccgagctctctcgtcgtcggatccgaagtgttagcagtttgattaaggtcggaagaattgagcctgtcatggttctccgtgttgacaaagagaaaggttacattgatctgagcaaacgtagagtcagcgaggaagatattcagacttgtgaagagaggtataacaagagcaaacttgttcattctatcatgcgccatgttgctgagactctttcaattgatttggaggtaaaatatcgtagttcaaatctgggattatctactggatttggattttgcttgttagagatattatcaaatatcatagcttagtgatgtgatcgttgaatagaaattgatttgagctttcatgttgcaggacttgtatgtgaacattggttggcctttgtatcgacgacatggtcatgcttttgaggtaagaattttgtgaattggagattcattgtgtatctctatggttatttagttctcatatataattttcttttgttcaggctttcaagatcttagtgacggatcctgattcagtgttgggtcctctcacccgtgagatcaaagaagttgggcctgatgggcaagaggtatatactttgttctctggcattgttttagcggttagtactaactttatttggtgctaatcttacaagttttctgtttgtaggtgactaaggttgtacctgctgttacggaagaagtgaaagatgcacttgtgaagaacattaggaggagaatgacaccacaaccaatgaaaatccgggctgatatcgaattgaagtgttttcagtttgatggagttgttcacattaaggtcgtatctcttattagattatctttaacttgtgaaatgaatacattatgatttcatttgattttctcacccatgcttgtaatttcaggaggctatgaaaaatgctgaagccgctggaaatgaagactgtcctgttaagattaaattggttgctccacctctgtatgtccttactactcagacacttgacaaggttaggcaatcttctatcttgcactatgatttacttggtttggtaattggtatattatagaaatcctcccctacttatctttaagaggtttatgatctctgtttagattgtatatccactaaagctacttgccagaattttgaaaacactgtagttgcaaggaaagtaaatgcttaagaaaacactggacattgcaactttgtttgccaattatgtagctctgcggatttgtcttcacttaaaccataaatgtgtaaatgctatgttttgtcccattttatcttctcaatttctcaaatattaaacaggaacaagggattgaaattctaaacaaagccatagcagcatgcactgagacaattgagacacacaaaggcaagcttgtcgttaaggagggggctagagctgtgagtatcttaaattagttttttttaagtgatgaaccgtctcgagttgcatgtcacaagaacgagcttttcttttgtgttttgtttaatttggttcacaaccgcctattaatgtttataatctatgtcaaatataggtgagtgaacgtgatgaaaagatgctgacagaacacatggctaagctacgtcttgacaatgaagaaatgagcggcgatgaagatagcggagacgaagaagaggacactggtatgggcgaagtggatctcgatgcaggtgccggaatcatcgagtaagattgccggatttttctttctattaaatctacccaatctcaacagtcccagtattttggtttaagctttgacaaggcagtagaaaaacctccgagaggatttatgtgctttttgatgactctgaggcattttattttacccatagggggtggttacatatcaatcatacattcatggttttataaaagatttgattctttgcatatgttactactgctcaagaatatgttgctccaccacatgactcattattatcttaggaaaactttggctcaatatgatcatacttttgagtttaaacctcaggaaagtaggttgattggatctggcaatgataggtgtgtagatttaattcagatctgatgtctccgaagatgcagatattcatcaattactactgcgatcttctattgagaaaatttaccaaaaatgaaattcttaaaaatcctctgtctgatacataaatggttaacttgcaattgattcataattaaaatgatttattacaagatcaaacatcttgtcttatactactaatcagaaaagaaaaattctttcggacacaaatccttttttaatctgtcggcgcattaaaaattacttaagctctctctgcaaaatcgaaatgtgaaagttgcgacttttggagctcagctcagctcacactttcctcttcctcttacctgaaacgcgtctcgtaacactgatctctaatgatcttcgtctccaatg

SEQ ID NO: 6143 - DNA, 3000 bp, Unknown
  misc_feature (1)..( 3000): cDNA_ID_1830159_gDNA_ID_1620849_Annot_ID_50979 3000 nt of promoter + ATG
ttttagtggtaatgattttgattggttaataatatcttgttatgaagatttttgagtgtatatgttttttttttgttctctcctctaaaacagaatcttcaatttgaggaatgtgccaatcatatttaccaattacttgttgtttttgtttgttttaatttaaattgcataaaaccaaattgttttccttatgcactctttcttatttgttccaattttaagggatatttaattttagtattttagttgttctgttaacttttttattcactaatcacaaattacaagagattttctattaaataaatgattatttacttaattaagtaattagtgaaagagattttgaagctgcaatttcaattttcatcacataaaacaaaattatacagcttcaaaacaaataagtcacggataaacaaaattccagcaacgacaaaaagaaaaagaaaaaaaattccagcaacgcagttgaaccacaagcttgccacgcgccatgacccatcccacgatctcgtacgtacacgtgtctctcatccgcagcctcatcatcaacacatcacaatctcacttttacatatatctccctcgcctcacgaaaaatccattcgtcttctccaattttctcgcgaagaaaactttcctactttgtttcaatccaaacgagtcaaaatgcttctcaagactgtttcttcatcttcttcttcagctctctcgctggtgaatttccatggcgtgaagaaggatgtgtctcctttgttaccttccatttcatcgaatcttcgagtttcttctggaaaatctggaaacttaactttctcttttcgcgcatctaaaagctcaaccaccgacgcgctaagcggcgttgtcttcgagccgtttaaggaagtaaaaaaggagctcgatctcgtccctaccagctctcatctctcactcgctcgacaaaagtactcagacgagtgcgaagccgccattaacgagcagatcaagtaggttattctttctcaccccagtctcttagattcggtattataatctggttgattggctataagatttggtaacttggaacctcatgttgattctgcttattgtttatgaacctgtgaatttgaaattcttcaatggattttggttgcagtgtggaatacaatgtctcgtatgtgtatcacgctatgtatgcttactttgatcgggataacatcgcgctcaaaggtcttgccaagtgagtctccggttattcaagagtgttgatattttcggattttttttgtttatccatagttaattgttggtttcatggaatcaggttctttaaggaatcaagtttggaagaaagagagcatgctgagaagttaatggagtatcaggtcttatgaaagttatttccatttgtttaccttattggagctaatttggttctaacatgttttagtttttttccatgaattgcagaacaaacgtggtgggagggttaagttacagtccattgtaatgcctctttcagagtttgaacatgttgacaaaggagatgctctttatggtaagctcaaaaatgctaacactaataatcccaagtgaaaaaacttctttagtttcatatgtctgccacattctaagaaattagatattgacaccaatgattttgttaagcttttgaagagattgcatattttcactagcaaagactgaattttatctgagttcttaagtattatgaaaatgtatctctcatatggagattcaagtctcaatggatataggaattttaacatacaattctgtgatttgttgttgcaggcatggagcttgctctgtcactggagaaactagttaatgagaagctcttaaaccttcacagtgtaaagaccatctcttcttgagttcatactatatatgtcaaatccgtatttgagaagtaaatctaatcttcactcggcaagaactgttctcagtttggtaatgctttgcttcaacaggttgcttcgaagaacaatgatgtccacttggcagattttattgagagcgagtttctgacagagcaggtaatttatttggtgttctatgttagtggcaaagagctactgttgtatataagctatcaaagagaatctaataggaatttttgataaaataaaacatttctcaggtggaagcaatcaagttgatctcagaatatgtggctcaactgcgacgagttggcaaaggacacggtacataaataatctctcacattttgttctaatctataaatttataaaagaacaagaaaatccacttattcatcctacgtcgtgcctcaaacttggttttaatatatgtctttgaatgcttgtgggtaatttcaggaacatggcatttcaatcagatgcttctggaagggtaagcagcttcgagggactcttgtgtctactgtgtttctatatgtgtctactttatgtttagttctttagcttttacgattttgtgaggtagtagacttctttttctgtaagagacaaaagacatgatcacataactttatattctggtataaggttcatcaaacccacctggtgatcgattctacatcggttcggtcagaatgtttttggactgccaaatgtggattcgagctctagtttagtttgctccggtttaaacgcaattcatgaataagcaaaggaaatcaatccaaacttacgttgtgaaagaagttgggccgaaaatgtctgaaacccgaataggcttttaacccctaaccccttgaaactatcttgtggcccaattaaaacctaattgtttaactgacacggtgccgtttaacttggcatctttgacgcaagtcgactcattttccgtttgtgttccttgctcatttcttatctctagaaacctgtctgatttgctccgtcgcctaaaaagtctaaaaccctaagtgtctccgcctcgtagctttacccgattcaacgaagagtgaattcgcgtgagctcaagcagtatcgaaatctaccaatcatg

SEQ ID NO: 6144 - DNA, 3000 bp, Unknown
  misc_feature (1)..( 3000): cDNA_ID_3079655_gDNA_ID_1620849_Annot_ID_170296 3000 nt of promoter + ATG
tgtcagaaaatgtaagaggtattaaaatcacactctgacagcatgttatcttaatgtatattatgtagctcagtagagaatgataaggttgcagattgcacaatgcttttgtgctaatgaagagttaaaccatcttaaaaatctaatcatttgcagggtatgatgtatgcacttctctagggcatgcctcaagcacaaaagttgatattattggtaaggtttaagatatgtgaaaattgagactattttcaccctgtgttctaagttgtgaaaaagctaaattgttaatgctgttttctcccaacttcgtttgcaataataatgtaataaatgtgcctcaggatttttgttttgaatatggtagataaagaggatcctggcaaaggcgtcattgttcagatgtcaactggaaataggaaccaaaattgctcgctttcagtttctgttatttgccagaaaactaaagttgatgtaaggatttgtatatcagacatcctacttaagcgtatgaattgaagttgattttaggagtttttaagacgtaaaacctcgttcaccattttcttttctcagggaccactcactttggcgaaatctggtacctgtcagtatgtgagtgttcagtaactcatctatttgctcttttcctgtagctttcaaattaccaagtgtgattgtttcttttgtgaattttatgggttttaagtttgaaaactgagtttttatttgcatctcaatatcttgattcttaagaagtatggactctgggtagttatggtcttgtttcactgacaggctactcagctgcgacatcctgccggttgtgcagcagctatatccggccatagtagtggatggggctggtttagtaccttactaatcatgtgagcaaaccaatctttttaatgtgaggcctattggaatatgtttagatatcgtgggaatcaaaaatgaaatgttcttatctttctcagtatcttgtgcctgtttggagcttatctggtgggtggtgcagtatatcggtatttctcccttggaattcgtggcatagatgtatgtttcactaccttcctttatatatgcaagtttttctcatgtactgattctatcacaattgaaatgtaaacaccctgttttataggtaatcccgaatatggattactgggccactgtacctcacagtatacaggtattgttctgtgtttctatattctcttctggtagattggtgtctaagaattaaatttaatgagcttacgtttcctcttcatcttgcagagctgttttggctcactattttcaagattcggggggtctattcgtggtcagcaaacctcatattctcaggtcaacttctgagcagtctcagcatcttctctgatccatggtctggagacacatccccaaactttccttgactggttcaaccaattgcaaacgccgctagattgttataccctgagtactcttttggccattatatgactgcaagttataaggtgcctctccttttcagcttgttatgtcatggatccctgtagaaacaaaagaatcttgttcattggatagaaacaatgtcaagccattgcaatctgcagcctttcccatttcgtgtgtttgctctttggagattgtttcagtttcttgatgctgattttgagtaatggtaaccgatgtgttgatgttttagcacattttgcatccgcttggcgttggataagtggatatctcttttctttcagtgagttttctgataggcgagtgatcaatgtttaggatagagatgttgcaattgaccaaaaatccacgaaccagattgttcttttagtgatctcggttaaatttgagccgatttagaaactggtctagctgagccaaaccggtcaaactggccggtccagtcgtcataatatacagtagttgccaatgaagcttcttgaaagcatctctttgtacaattttgagtattgtagcatctaaagaaacattggcttagtgttttgttttgttggacgaagagtgtgtacaaagaggaaaagtgagagccaacaacttgagcttgaaagcccaacaatttctcaactaattccactattcatttcatcttgaactctctcctgatagttactatataaaaaaaaaaaattatagaccgataattaagattttgtttgatctcacattgttcagtattaattttaataaatgtcagttttgttctatattgttttctaagtaacatcaaaaatccattggacaaaggtaaagacaacgatgtctcatctttacaaattgatcaactgtacgaaaacacctcaaggacacttagcttagaagccaagtgaatttatattcctcacctccatcaatcatcatctcaaagtttccaatagcctaagaaactaataatttttgttcctttttgacagatattagaagagtattcatagtaaaaaggacaaaggaagccaatgatttaatcataaccatctaggttggatttaatcaaatacaaaacggactagatgtagtccacagtgaactcagtgattgtttttgtcttaaaatcaaggtaaatcacatgattacttaaaaacaaacagagatatacatttttgctgaaaacacgaatgtgtatataaatggattaaatcttacgaaaaagcattagttagtagacaaccactctgttgcgtcaacatttacctactcatcactcttaagtatacttcctttgctaattcacaaaaatttcatcacctaatataatcataaccatattataaatagtttaatcattgtacaattcacatctttagtatttcttgaagcaattccaaaataaagttcttttggcttcctcctcccacattcttatttggttgaggagaatgagatcatcaagaacacaaagtgttcatttcttaattttatctcctcttttcctaataatataaaatttgaaatcacatttgtaacactaattctcaaatcctaaac

SEQ ID NO: 6145 - DNA, 3000 bp, Unknown
  misc_feature (1)..( 3000): cDNA_ID_1812409_gDNA_ID_1620849_Annot_ID_170294 3000 nt of promoter + ATG
gcgtcaaagatgccaagttaaacggcaccgtgtcagttaaacaattaggttttaattgggccacaagatagtttcaaggggttaggggttaaaagcctattcgggtttcagacattttcggcccaacttctttcacaacgtaagtttggattgatttcctttgcttattcatgaattgcgtttaaaccggagcaaactaaactagagctcgaatccacatttggcagtccaaaaacattctgaccgaaccgatgtagaatcgatcaccaggtgggtttgatgaaccttataccagaatataaagttatgtgatcatgtcttttgtctcttacagaaaaagaagtctactacctcacaaaatcgtaaaagctaaagaactaaacataaagtagacacatatagaaacacagtagacacaagagtccctcgaagctgcttacccttccagaagcatctgattgaaatgccatgttcctgaaattacccacaagcattcaaagacatatattaaaaccaagtttgaggcacgacgtaggatgaataagtggattttcttgttcttttataaatttatagattagaacaaaatgtgagagattatttatgtaccgtgtcctttgccaactcgtcgcagttgagccacatattctgagatcaacttgattgcttccacctgagaaatgttttattttatcaaaaattcctattagattctctttgatagcttatatacaacagtagctctttgccactaacatagaacaccaaataaattacctgctctgtcagaaactcgctctcaataaaatctgccaagtggacatcattgttcttcgaagcaacctgttgaagcaaagcattaccaaactgagaacagttcttgccgagtgaagattagatttacttctcaaatacggatttgacatatatagtatgaactcaagaagagatggtctttacactgtgaaggtttaagagcttctcattaactagtttctccagtgacagagcaagctccatgcctgcaacaacaaatcacagaattgtatgttaaaattcctatatccattgagacttgaatctccatatgagagatacattttcataatacttaagaactcagataaaattcagtctttgctagtgaaaatatgcaatctcttcaaaagcttaacaaaatcattggtgtcaatatctaatttcttagaatgtggcagacatatgaaactaaagaagttttttcacttgggattattagtgttagcatttttgagcttaccataaagagcatctcctttgtcaacatgttcaaactctgaaagaggcattacaatggactgtaacttaaccctcccaccacgtttgttctgcaattcatggaaaaaaactaaaacatgttagaaccaaattagctccaataaggtaaacaaatggaaataactttcataagacctgatactccattaacttctcagcatgctctctttcttccaaacttgattccttaaagaacctgattccatgaaaccaacaattaactatggataaacaaaaaaaatccgaaaatatcaacactcttgaataaccggagactcacttggcaagacctttgagcgcgatgttatcccgatcaaagtaagcatacatagcgtgatacacatacgagacattgtattccacactgcaaccaaaatccattgaagaatttcaaattcacaggttcataaacaataagcagaatcaacatgaggttccaagttaccaaatcttatagccaatcaaccagattataataccgaatctaagagactggggtgagaaagaataacctacttgatctgctcgttaatggcggcttcgcactcgtctgagtacttttgtcgagcgagtgagagatgagagctggtagggacgagatcgagctccttttttacttccttaaacggctcgaagacaacgccgcttagcgcgtcggtggttgagcttttagatgcgcgaaaagagaaagttaagtttccagattttccagaagaaactcgaagattcgatgaaatggaaggtaacaaaggagacacatccttcttcacgccatggaaattcaccagcgagagagctgaagaagaagatgaagaaacagtcttgagaagcattttgactcgtttggattgaaacaaagtaggaaagttttcttcgcgagaaaattggagaagacgaatggatttttcgtgaggcgagggagatatatgtaaaagtgagattgtgatgtgttgatgatgaggctgcggatgagagacacgtgtacgtacgagatcgtgggatgggtcatggcgcgtggcaagcttgtggttcaactgcgttgctggaattttttttctttttctttttgtcgttgctggaattttgtttatccgtgacttatttgttttgaagctgtataattttgttttatgtgatgaaaattgaaattgcagcttcaaaatctctttcactaattacttaattaagtaaataatcatttatttaatagaaaatctcttgtaatttgtgattagtgaataaaaaagttaacagaacaactaaaatactaaaattaaatatcccttaaaattggaacaaataagaaagagtgcataaggaaaacaatttggttttatgcaatttaaattaaaacaaacaaaaacaacaagtaattggtaaatatgattggcacattcctcaaattgaagattctgttttagaggagagaacaaaaaaaaaacatatacactcaaaaatcttcataacaagatattattaaccaatcaaaatcattaccactaaaaaaaaaacacaattttagttgttaattagtaaccataatccagttcttctacctgttcattgagagatgctaactctatataagctgataatgtaggctaacacttctcatcatctcttagaacaagtattgataaacaacaattttttttttccatacaccttaaactcaataataag

SEQ ID NO: 6146 - DNA, 3000 bp, Unknown; identical to SEQ ID NO: 6143
  misc_feature (1)..( 3000): cDNA_ID_3079662_gDNA_ID_1620849_Annot_ID_170292 3000 nt of promoter + ATG

SEQ ID NO: 6147 - DNA, 3000 bp, Unknown; identical to SEQ ID NO: 6142
  misc_feature (1)..( 3000): cDNA_ID_1830163_gDNA_ID_1620849_Annot_ID_170291 3000 nt of promoter + ATG

SEQ ID NO: 6148 - DNA, 3000 bp, Unknown; identical to SEQ ID NO: 6141
  misc_feature (1)..( 3000): cDNA_ID_1830167_gDNA_ID_1620849_Annot_ID_170288 3000 nt of promoter + ATG

SEQ ID NO: 6149 - DNA, 3000 bp, Unknown
  misc_feature (1)..( 3000): cDNA_ID_3079672_gDNA_ID_1620849_Annot_ID_170281 3000 nt of promoter + ATG
aaccccttcgtctccttcctccgtctcttcctcttcctcctccgtctccgccgcttcttctccttccacctcctcttcctccactcaaaccctaagacctctcctccctcgccccgccgccgccaccgtaggaggaggagccaactttggtccgtacggtatcccttttaacaacaacatcttccttaatggtgggacctctatgttatgccctagttatggttttttccctcaacaacaacaacaacaaaatcagatggtccagatgggacaattccaacaccaacagtatcagaatcttcattctaatactaacaataacaagatttctgacatcgagctcactgatgttccggtaactaattcgacttcgtttcatcatgaggtggcgttagggcaggaacaaggaggaagtgggtgtaataataatagttcgatggaggatttgaactctctagctggttcggtgggttcgagtctatcaataactcatccaccgccgttggttgatccggtatgttctatgggtctggatccgggttatatggttggagatggatcttcgaccatttggccttttggaggagaagaagaatatagtcataattgggggagtatttgggattttattgatcccatcttgggggaattctattaatttgtttttgtggaagatcatattatatacgatgagcatccctaaggtcggtcaagagcattggagattcattgttgagaggaatcaaagagattgcattctatgaggagctctgcatgcaaaattttggaggatttttttactacctatagagataaataagagggtatttttattatttttttgaagatttttattttcaaggaattcgtaaaagagattacggttccaataaagtatgtatatgtggaagagaatcggaggagatggtggaaagttgtatgggaattttattggttcaacacttccttcacagtgtgcctaccttaatatataattattgataggatatgataatttctgtttggttgttcgagtttcagaggttatatatagttatattttgtttatctctgagaatatttacacatatctctattaagttttagtaatataggaatcatcaatgtagaaactatggagagaaacacgttttcaaaaagtgttcatcactggatgcataattgttgtcgttgagaagattatttacattattcgagctgggtattctcacaccaacacttcatattcaagtttacaattttttgtatcgatcatccttcaaagtgtttggacatgattttgtccgaatcctagctttctttgactaaaaagagttctccgtttctgtatttcccttgtcctgtgatttcttgtttactatggtgtttattggaagttgacaagaaaaaatcaattttattttttgtttatgattatatttcgaatcttttaacagtattatacaaaatttaaattaaaaataatcccatatctgactgggttatacatgaatatttcaatattaataattaatttaatttataataattatatatacaaaacacaacaaaatagattattatattttcatttgttatatgaaatcacaacacttttctatatcttggttacgtaataatttaagtgcacaaatatgggtatggtgattcatatactagatagagattgacataaacttttctagaaccgattattttggtaatcaaatcatacaatgttgtttatgaaagatcaccagacaatgtggaataaagcttagttttattgttttcctctatatcttggtattattgaaatctggcaaagtagtaccaaaccgaatccaaaaaaaacaaaatcgagaaacaaagagagttactacgtacacaaaagaaaacattcaaccacaacaacacaacgatgagagaaaaaagatcgctaaacaaagaaaaagaaaaagatacaagatgtccattagagttttaagaatatattattctcttatatttttcccttaaaagtattgttgtttcagttttttgtataaaacaattataaacaattctcagtttagagtctcaatgtaataacaagaaaacatctgaagtaaaaaaaacaatttataaataaagaattcaagagtcaacttttatgtatacatatggtaatacatatatatatatatttaattcatactatgtaaatatgaaaatgatacttacactgaagaaaatgtatagtcaacatttagtttccaaaataattatctaacactatgaattaatatgattcacaacaatgaaaataatgttagtcaatataatcattagcattaaataatgacagaacaattaattaaatcatcaatttggtatattgactaggacctaaatttggacagaaattcagttatttcaattttctgtaatagtacaattaaccacataaagattttaacatgttaatggtttgatttggattttagtttttgtttactagtattgtttttaaagaataatcaatgtaaaaccaaatccaatatagtttggtaaatttttaattagctttgaattcagttcttaaacttttacttttttagcaaaataagtttcatttttagtcaattttctatggtatttatgatatttgaaaataactttataaccaaaacataggaaaattctagtttttgagttgatattttcaacttggtttagatctaaaaggtttggtttaactaaaacattaccatagacattcaatattttttagtaagtagcaattaattttacatcttttgactagtatcattttccaaaatctcatcttttcaacactatttaaacggattcccgcgctaatcttcattcatatgctcaacaacatttaaaattttaaaagagagaaataaaaatcgaagagtgatcatgacaagaaagaaagtaaaacttgtatggatcgagaatgacaagtcaagagcaacaagtttgcaaaaaatg

SEQ ID NO: 6150 - DNA, 3000 bp, Unknown
  misc_feature (1)..( 3000): cDNA_ID_1840930_gDNA_ID_1620849_Annot_ID_50980 3000 nt of promoter + ATG
gcagtcgtcgctgttgttgatttcacatccgccgttggttcaatcgaaatttcaattgtacccttaatcttagtaattcttacgaataagccgcataaattatttttgtatatcatttgcaatttgaagcctgaatgttatcaactatgggccttctcaaatctcaaacggcccatttaaaaaccgaaccagagtatggttcaatttagtttcttcagatgaaccggatttattgaatttattcagagatttatgtagaaattctttcgtccaattgtttaatcatgtgtttctattcgattttcagaaaatacaatttcttgtagattatggatgttaattttttattttatctgaaagcttatatacatatttatgttttaatttggaatttcggttataaaaaaaaacattatcctatacatcaaataatttggtttattcataaatgaaagtatcatatacacaacacatcgttattattttgatggctcgtcaaatcaattcagacaatgttgaggaaccattttaccgctcatagaaccatcaacattttcgcaaactgcaatggaagaactattttcaagtccattactttttatgttaatgtcaattagctcaatattcttgcacggaaagcttttgctacattgaagattcattgccactttgttctttgacgttccatatatgttttttaacttaagatcttggatttgaacgtgagactctccctgaagaaaaataaacacaagttgtcttttatatttttgttcttattcttttgatgaaataagagaatgatgaagcttgttttttgaatagaatgttaaccttttgctcatgttcacaaggaggatgaggacaatacttctgatcgatgttgattggttttccaacgtcaatcatctgaatattctcgtacacaaagttcgaaacgaggatttttgaagctgaagattcccaagtcttgatccgaataccatcacttgtaccgttgaaaatgacgtctcttactgttaagtttttcacgtctttctcgtctttgttcttccctaaacttccaacactgatcccatgtccgggaccacatttaacattagagatatcgaggttagtggttccagagagaatggcaatacaatcgtctccggtaccgatgtttgtgttggagatgtgcatgttgctacatgaacccatcttgataccgtcggtgttaggactatcaccggaagctgttatagtgacgccggtaatattaaagtgatggacggagaagaagttgaaatgtcccattttgctgttgagtgatgttatgtctttgatatttgagttgttcacgaatgcaaatcccatagtctataaaaaaattcaagtttattataagacttgttaatttctcaaatgaaaaagaccaaaaattctaataaagttgtgtataaatatcacatgtacgttttgtaatacgctttaaatgtaaataagtgaaaaagtttaagatatgttaccatagctagtttaggacaattgagatttttgtggcagtcattgagtggccaagattgttttccttggccgtcaagtgtaccggaaccggagatagaaagattgttgatgtacctaaagttgatccatgtatcttgcttaatatcactaggatttgcaggagccaataaagttccatcaatgacgaattcaataggatttttgcatggacccacaaactctacaccaccgaggtaaaatattccttttggtacatagattttactacttccactttttcttttgcatgcacgactccatatacttgtgaatacctgattttgtatgtgttaagaatgatatatatatgttaaaatacaataaattaaaaatatatatttatctttttggtttgtatatttgtcatatatgtttatagttgtgctaatgtgcatagattttcatctcataactaattaatggtaaaaaaaaaattagaaaaattctcgtttacatacattggcattatcagtttttccgtccggcttagaaccatgacgttggacgttaaacgtttttggtcggatagtaggacgacttgcaacaaatatgaacaagaaagatacacataaaaccttaaacacaaaagcaatgcttgccatcttattattgagtttaaggtgtatggaaaaaaaaaattgttgtttatcaatacttgttctaagagatgatgagaagtgttagcctacattatcagcttatatagagttagcatctctcaatgaacaggtagaagaactggattatggttactaattaacaactaaaattgtgttttttttttagtggtaatgattttgattggttaataatatcttgttatgaagatttttgagtgtatatgttttttttttgttctctcctctaaaacagaatcttcaatttgaggaatgtgccaatcatatttaccaattacttgttgtttttgtttgttttaatttaaattgcataaaaccaaattgttttccttatgcactctttcttatttgttccaattttaagggatatttaattttagtattttagttgttctgttaacttttttattcactaatcacaaattacaagagattttctattaaataaatgattatttacttaattaagtaattagtgaaagagattttgaagctgcaatttcaattttcatcacataaaacaaaattatacagcttcaaaacaaataagtcacggataaacaaaattccagcaacgacaaaaagaaaaagaaaaaaaattccagcaacgcagttgaaccacaagcttgccacgcgccatgacccatcccacgatctcgtacgtacacgtgtctctcatccgcagcctcatcatcaacacatcacaatctcacttttacatatatctccctcgcctcacgaaaaatccattcgtcttctccaattttctcgcgaagaaaactttcctactttgtttcaatccaaacgagtcaaaatg

SEQ ID NO: 6151 - DNA, 3000 bp, Unknown; identical to SEQ ID NO: 6145
  misc_feature (1)..( 3000): cDNA_ID_1812409_gDNA_ID_1620849_Annot_ID_50981 3000 nt of promoter + ATG

SEQ ID NO: 6152 - DNA, 3000 bp, Unknown; identical to SEQ ID NO: 6144
  misc_feature (1)..( 3000): cDNA_ID_1830150_gDNA_ID_1620849_Annot_ID_50984 3000 nt of promoter + ATG

SEQ ID NO: 6153 - DNA, 3000 bp, Unknown
  misc_feature (1)..( 3000): cDNA_ID_2169314_gDNA_ID_1620850_Annot_ID_170314 3000 nt of promoter + ATG
acgctttcaaagaaatacagacgaacataaataataacataaagaatcaaatcacatgcgtacccaagatgacgtggacagaacagagaaatcacacttctatgtctcaatcaattctcaaaaatatctcaacattataccaaaaaaagaaattctcaaaaatatttcaacctttgactatatttaccaaaccccactttctggaacctcctaacttttaacttatgtattgtaatgatacacctttatacttttgcaagtagactaatctcatggcatctattgcttgctaatggtcggtctaagggaaatgatatatacagcattatacttctgatattagacaatattaggagttcagaaagaagttgttaccctcgtttacgaaaaaaatgtttatattcaattatgaaaccaactcttctgaaattctgtgatagttttattgttcctcaatggtccacttattccccaccttgatatttttgcaaatgaggcttttgtcttactcataaagaagatccattcgaagacatatttttgtttctttccgttttttcaaaaacaataaaaaagtttttgttcacattttagaagagaagcaattcaccaattaatttcgtaaggtaacatgaaccaaagaagcaaaacaaaacatcattataaatatatttatactgacaccactgaaaggtaacttgaaccaaagaagaaaacacaacataaatatgattctgtgacattatcaaaaggatttaagactatcccaaccaagaagtaaacaaagactaattatgataggataataaaatgattaaataacgaaggccagtgtaattccctactggctatttattttttccttactagtagtatagatttttcttatctatctctattcagtaataaaacatttttttggagatccaacgtagcaatggaaaaccttgaaatcgcagttcggagctgctatagtgtctaaaatcatcttcgccgtgcgctcttgactcaccctcgcgttattcttttccacaagcaccgcttctacgatcttattgaaccctttccctcggctacgagccacgaaatcaaccagagcagcttgtaccggtcccaaacttgggctatacgccactgattcaatgtaccatccacggtaccacttcccttcgtcatcctgcagcgccactcccgacggagactcagtgtacggagagaacgaattgtttgccgcggctagagccttgcacttcaaatgggaacaatctgatgagcatatctcttcggtagaacccgaaagggtgaggcagttatcgcgcttctcgagaaggagaggggaaccctttgggaggacgtcgtcaggggtgaatctgtacggaaggaggagcttaaggctcgagaatgatccttctgcttcatgctttgatttgagcaggattttgatgtcaagctcgttgctggtctccataagaaactggcggcagtttccgcacggcgcgccgaattcgatgcagtcactagagatggcgactgctaactgacggagacctttctcggagtttagtgcgaggttggtgacgaggaattgctcggggtggatggagtggtgaagaggaagacctgggaattcgacattgacgcctaaatagacccgacccgatgatgcgcgtccaacggctccgactttgtatttggagattggaccccgagccagagacatcgcctttctgatcagctttggaagtctgatgggttcggtgacaccttccgatgctgcttctttggcagtgaaaacgaacttgtacttatcttgtgccgccattgccctgttttgagattctacacgagattttggaaatgagttaacaagttaggacgttgggccatttaggatcgtgtttcgagtttttttttggttgagagatatgaaatgagatgagaagtggtattgagtctttgcctatttatataggtgtgtcgtgtctgtttgcatattgtgaaaggactttttaaaatcgtgtttaggtcattcgtatactcaaaacaatagttagtgtgtgaacttcaagattaaaaaaaggtgattgtgacgatcaacattcatgaactagcttttaaagcaaagtagtaattagggttaattttctagttagtataaagtaatgtactgtaatgaagagtatttattcgaggaagactaagtagttcttaattaacttttactgagtagtaacatttaatggtttgaatagtactaattaatataggtaaagaattacatggacaggcaagaatataaacgagattatgactgtatctccgtcatcaagactcatgctgactcatgaaccatttcttcaaaacaaaattgcttttaaaaagtaagtaaggttagtttttttttttttttttaaattctatactaaagaatgggttaaaaaaataaaattcaatagtccttgattagtcataaattcatgggtatgaaaattggggaatcttattcttaaaaagttataattaaattcattgagtttgtgtgagattgtgacaatataaaaatatcaaataatactctaagtccatgctatatatatattttctctttgtgtttaaaattgaatcttgttcagaaatgagcactttgggtagatcattttgaacttaaatgtatgatatatatttgttcgaaaaatatggattccagttaattttttgagtgaatatggattgaaacgttttaagaaggatgattgtgttactctaatttttgtaacaataaacgttattatatttttacagttactccccataactttgtaaaaagtaaagaaaagccccaaacagagagaaacgaccacgtaagagtggtttggatcactaaactcgaatcgtcatcttcattcgatatgcgccacatcatcttcatcgctatgttctgtcttgaaagttcaaacctttttacaaatcagacaaaacccaacaattaatgaaacaatg

SEQ ID NO: 6154 - DNA, 2012 bp, Unknown
  misc_feature (1)..( 2012): cDNA_ID_2992285_gDNA_ID_1620851_Annot_ID_170325 3000 nt of promoter + ATG
tcttcactttaaattagaacctcatgtttcccaaacaatatattccgttcatgaatctcgtctcgaattaaaactaaaatattacacattttagaatgtaagaaaaacacactcaaaattaagaatcttggaattgaaaacgagattttgaatgtgttcaaagatactctttagaaattataatggtagataatagcacttgcatgacaaattcgattctctcttctcatcatgcatttttgctttacattttgttcctttaaaccaagaatattttgactcacctaaaagataaaccaaacatatctgaaatctacaattgacaattaacttctctttttcttttctcttattcttactgaaataaaaatagtatgcaactggtctttataaatttcatttttatattttaaaaaaacatcttctataccaagtttaccaaattatggtagtccaatgattaaaaaataaatcattatggggttaggacttaggagatcgaattcgaatcatttcaaattttcaatgcgatttcaatcattgtttttcactgttaacactttgaaatatctaagtgtatctaaaaatttcaagccttagagattaatttggacttcgatccggaattctgcgacgactatcaaacaaattttgttttaaccgaaatatagattatttgcatctctgattatcaaaccattcattctttttattattattcagtttactataaagtatatgtccctccctttatgaaccgtatcaaatactatacatagtatgcatgttcgaagaaatttccaacatactaatttgaaatcaacgaacatatcaaattataatgcgttgatgcagaatatatgctttctatatatataacttaagtacaaaaacctaaattttccatatgccttcgtaatttagtatataaatattcattcattcttaatacagcctaggactcggtagcattttgaagtaggaacgaattttgttaattaagatacatgagtgattagatcgaatccaaaaggtatggaggcgtagaacaagaatttggttctctttcattttacgtatctttcactaaagaatagagagaaaacaataccatgcaaaaacctctcaaaaattatatattgaacgcttagacaaagagccaaatttattcgtttttgatgtttacatcagtatttgtttctagctagttcatattctttaaactccataatcatttgaaagacataaaatacagatgcttaagatctgtggatgtttatataggatcttcgaattcggataatgaaatcatttatacactattaagtattaactttgtagaggacttaagtattcgaaatcttgattcaggttgtcaatcaagaaccgtaatgtttgatctatagagccatgggattaatggatgctaaaagaataaaacactcgagaagaagagtacacgtaaaatcactcacacacaaagaatgagagatgggagaagaatactacaaagtgtttgttttttttaaatcggctcatatataaatttgggcgatactctactacccacattattcttttaaacaatgatataaatgtgtatggcctatgtagccgaactttttacatatctgacctgtatatatataataattatttatcaaagaaattagagaaagattcttccacttttgatggcttataaaagatgatgacccaaaacactcaaaatgcagcagcaactgctctctcaccacccatctcctcatttctcttttgcatttctttctttttttctgcattgcattcttttgaggggtttaattttctgcatagctttgtctaatctcttagagctcaataagagaaggtactataactgatctctccctctttcaagttttttttttgtttggtttatagaaaactataaccgccattatccgttagttttaaccgttttttgaaactagtgaatcctcataactttgatttctcactaaaaacagatg

SEQ ID NO: 6155 - DNA, 3000 bp, Unknown
  misc_feature (1)..( 3000): cDNA_ID_1830267_gDNA_ID_1620852_Annot_ID_50996 3000 nt of promoter + ATG
actagaaagaaagaaaaaaaaaacttttgggcaatttcaagaaatacaaagatttgtgtacctcctctgttccaagtagtgtttgcttcccatgttcaagtgatacaatcttaccatctttctcgtaatcaaacttgacataaacaacaccagagtcaccttgtccaacataaactttctttacattgtcataagcaccaccgtcgtcccaaacatctccaccacgaccaccttgagcttccaatttggtcagaccacctgataccggcggagtcagcggtgtagtcgacggaattatataaactccaacagaatggatcaaatcacttgaacttccatgaaatccaacgattttgccacctcctagctcagcttcttctccagaggttagtccaaaaggctgagaagttttccccttgaatgtcttaaagattagagccgttacgatctctatcggtgatccaaagagcttctcgtagtaaattttcactgatgttatgtaatcttctggatcaaccacaaactagcaaaaaaaaaaaaagacaaccaaaaatgatcagttaatgttgatgacaagagaactctcattgaaaacaaaatatttacctcctctgttccaagtagtgtctgcttcccatgttcgtgtgatacgatttttccatctttctcgtaatcaaacttgacgtaaacaacaccagaatcaccttgaccaacatacactttcttgacgttttcgtaagcaccaccatcgtcccattcttctcctccacgaccaccttgagcttccaactttttcgccatcttttcttcttaacctaaagttatagtacccatttcttagaaactgtaaacgcacaagagccatgaacagacactactcaagcactttcatgatgatgaaactaatctaatctgaggactataatacttccactaggacattactttaaacaatggtatcatattctcatagattcattatcatataaagaaattcaataattcaaataaaactagtaaaaatcaatataacgattttgtgaaagaaagaaaaaaggagtacattaaagggaaggaagaaacacctttgagtgtgagaaatggagatgaagatggaatatgaatgagttaatcttgggattttgtatatatactatatagtatatataaaacatttttgaatacgaacattaaattctcttttcatccaatactaaccactttttttttctgccaatactaaccactttttcttttctttttgagagactttatattcaaccaactcgtgcttcacgagggatggaagctttgattagttaggacttaggaacttgtattaatctaaatatctttttttttttaaaattgaatctaccttacaacataaaatttgtaaagagaattccaaaattccaaaaaaaatcacctaaaattttaaaatcgtgaaagcagcatcgtaaagatgttctcttctgttttttttttttttttttaactctcttttgaatattggattagagattttcacagtgtcgtagattcttcgtagagtctgttatgagttgacatttaccataggaattgcattatcgtgagaaggttaaatgataaattgacatttataaattctcaaaatgtaggttatgagttgtcaaagaaatgtaggctatgaaaaaaaaaacttacgtctaaaaaaatgcaaagttaagaaagaaatactcaaagttcgtggcatttgaccatctctcagctacacctcaaattatagctcatgagaatggcccatgaatatgattgtggctccgttaatcacgtggtattaaaactcacacacgaccatttctcatctgcctccaattatagcgaaaccgttacaactcgttgttcacgtgagcatcaaaatgtgcattactcctttcaagttcggcaaatcctaattatccattttaatggactgcagagactttaattagagcttatagaactttaaacattttggtttaaatcttaaaatagaaatttaaccaatctcaaatgatttttttttcttttcttttggcataagtttcataactcgatgatgaatgctacgataatatagacatacagtatgatgattagatgaaaacagataaagaagaaaaagtgtatcgtacgccccactcggtgataatgattaatgagactatatatgagagtacccaaatatgattttttccactcatgaatcgtattgcactatttctgcattattaagatagacccacatttaacattagaccaaaaaaaaaaaaagatagacccacaccacctgttatagtatttagtatttttacacatccactaaacgacgacaattgacaaaatcacacaaacctttctcctttattcatttttgtttaattcgggtcccttgctttttagcattcggctctcattcttatcttcccatggatggatagtcatagttatataatacagttcaattgaagttatgcagtatatatatgcaccacacacgagtcttctatatatgtggatactacgtttcaaaataattctattaacttagagaagataaactttcttagtacttttttcgtttcactttacacacacctcaaaaaaattcttgtttcatttgtgactgcatgtaaatgtcgttaccttacttgaatttttacacaatggtacgtgaaaaagaaaagaaaaaaaatataattgagagaaaatataataggatcacaccactacaatacatgggctttaaattcatcttttctatatgttataatttgggccaagactattatatcatatgggcctatcaatgtaattagaagcaattgcccgatccaataaccttaattaggaaaaaaaatcgttcccttctctcgtttcttttcagctctgactcggcctctatctctctcccgtcgtcagccacattcaccggtactcatctgaccaagctagggtttcgcagtcatcatcatg

SEQ ID NO: 6156 - DNA, 3000 bp, Unknown
  misc_feature (1)..( 3000): cDNA_ID_3100659_gDNA_ID_1620852_Annot_ID_50997 3000 nt of promoter + ATG
tacctccaatagcctctatttcccttacaaggcgaaaatggcttctgttcaatgtactcttgaatgccatcctttcaagcaagtgcgtcgctccacggaattgaggagtctcataaatagaaccacagtcaacgtataaaccaatggaagctgctggattctgaacaaaatttcactcaaaatcactttccagtagtttttaacaggaagttgatgttgggattactaaaagaagctctcaccggagacatctcagtggctatagtcagaccatttggaagagtagtggtcttaagtttgctaggctcaacatggtcagagagtggtggtggaagagagacaccagccaagggaatgttcatagaaggaagtgaactagagtagcctccacttagccagctggaggaagaagagctcgttgcaacagcactagaacttgcataacgagaagctcgaaaattgtggtttagaatgccctataaacacacacacacacacacacatcctaagcatcattaatctcttgattcaattaacattgtaaaaataagaactttcgaaacagagacatttcataaacctgcaaaaagcatgaataatggcaccagctactataaagcgataaaattgaatcaagatctataagaatctaagagaccctttaatccaaatccaaaaacaatgaatcatacaaattgttcaatactaagcattctcctaaaaaaaccagaatctcaatggaaacaagtgaagtaggacattgaccttaagggccttggctcgagaagctgccgtacggtacatgatgatgactgcgaaaccctagcttggtcagatgagtaccggtgaatgtggctgacgacgggagagagatagaggccgagtcagagctgaaaagaaacgagagaagggaacgattttttttcctaattaaggttattggatcgggcaattgcttctaattacattgataggcccatatgatataatagtcttggcccaaattataacatatagaaaagatgaatttaaagcccatgtattgtagtggtgtgatcctattatattttctctcaattatattttttttcttttctttttcacgtaccattgtgtaaaaattcaagtaaggtaacgacatttacatgcagtcacaaatgaaacaagaatttttttgaggtgtgtgtaaagtgaaacgaaaaaagtactaagaaagtttatcttctctaagttaatagaattattttgaaacgtagtatccacatatatagaagactcgtgtgtggtgcatatatatactgcataacttcaattgaactgtattatataactatgactatccatccatgggaagataagaatgagagccgaatgctaaaaagcaagggacccgaattaaacaaaaatgaataaaggagaaaggtttgtgtgattttgtcaattgtcgtcgtttagtggatgtgtaaaaatactaaatactataacaggtggtgtgggtctatctttttttttttttggtctaatgttaaatgtgggtctatcttaataatgcagaaatagtgcaatacgattcatgagtggaaaaaatcatatttgggtactctcatatatagtctcattaatcattatcaccgagtggggcgtacgatacactttttcttctttatctgttttcatctaatcatcatactgtatgtctatattatcgtagcattcatcatcgagttatgaaacttatgccaaaagaaaagaaaaaaaaatcatttgagattggttaaatttctattttaagatttaaaccaaaatgtttaaagttctataagctctaattaaagtctctgcagtccattaaaatggataattaggatttgccgaacttgaaaggagtaatgcacattttgatgctcacgtgaacaacgagttgtaacggtttcgctataattggaggcagatgagaaatggtcgtgtgtgagttttaataccacgtgattaacggagccacaatcatattcatgggccattctcatgagctataatttgaggtgtagctgagagatggtcaaatgccacgaactttgagtatttctttcttaactttgcatttttttagacgtaagttttttttttcatagcctacatttctttgacaactcataacctacattttgagaatttataaatgtcaatttatcatttaaccttctcacgataatgcaattcctatggtaaatgtcaactcataacagactctacgaagaatctacgacactgtgaaaatctctaatccaatattcaaaagagagttaaaaaaaaaaaaaaaaaacagaagagaacatctttacgatgctgctttcacgattttaaaattttaggtgattttttttggaattttggaattctctttacaaattttatgttgtaaggtagattcaattttaaaaaaaaaaagatatttagattaatacaagttcctaagtcctaactaatcaaagcttccatccctcgtgaagcacgagttggttgaatataaagtctctcaaaaagaaaagaaaaagtggttagtattggcagaaaaaaaaagtggttagtattggatgaaaagagaatttaatgttcgtattcaaaaatgttttatatatactatatagtatatatacaaaatcccaagattaactcattcatattccatcttcatctccatttctcacactcaaaggtgtttcttccttccctttaatgtactccttttttctttctttcacaaaatcgttatattgatttttactagttttatttgaattattgaatttctttatatgataatgaatctatgagaatatgataccattgtttaaagtaatgtcctagtggaagtattatagtcctcagattagattagtttcatcatcatgaaagtgcttgagtagtgtctgttcatggctcttgtgcgtttacagtttctaagaaatgggtactataactttaggttaagaagaaaag

SEQ ID NO: 6157 - DNA, 3000 bp, Unknown
  misc_feature (1)..( 3000): cDNA_ID_1830264_gDNA_ID_1620852_Annot_ID_50998 3000 nt of promoter + ATG
taagttactgcaagtgtgtttagcgtattcagattaacattttactgaattaattttgttttaggtaaagacccgcgaatatatgtttaatatgtttaaatgaagtccaattattacatggggactatagatcatataatcatagattaaagttcattattgtttaggtataaataaaagttttttgaaaatagtattaggttttgtaagtaaaaattggttaattgggtggtcatgatcatactgataaaaaaatgaaagtatatgaaaaaaggattgttggaatgtattaatttggctcggctttggcaaacctgggatagattgcgtcctaacttttagtgatttggcatttaggccttaccaatcaactgatccagcccatgtaatgctaatcttggaattttccctttttgaaattcagtttgcaatatattaatcttggatttttccatctttctaattgatttacaatatttttatattggatcagccgcgtaaggaggagatctgatctgatctgatccacacacgtctcacgagtgtagtaggctcgacgtgctcaaactcaaagtgtgataacgtattttttaagcttaaaagaagtcatcattattgttatctgtctcaatagaaataaacgccacgagatccacgagtcgcattttttttattttgccaaaagtcaaaaatatgtttccatatatatcttcggaaattaagaagaattagattttaatctgcggtataccgcggggacaatttatctttttaaagttagtataatttttttttgcaaattatatctatttataatatatttttattttatagtttacaattattattaagtaacgtactgccaaacccgtcccgccaaacccatcccgtaaaaaaaccatttatttatattactgttgatcttatttatgatatatttataaatcattgtctatatatttttgtcgatgcgggacgttgaacccacacattttttgccaattggttaatatatgttcatttttaaaattttgaatcataaaatatgatggaaaaaattaagatttttttaaactctatatattatataatgatgttaaaaattatgatatatcaaactttttataagtttaaatattaataatgttttataaattttaaatatataaataataatatttaaaaaattaatatgtttgtttataaagtaatgacataataactctaaaagcaaggatttagaagatttaaatctttaattaaatattttcattaataaataattaatgtcagtgacatgacattgtaaataagttcaaatacaaaatttatttatttaaacaaaaaacgtttagtaagaataatatttatttaacaaaaaactttgttttaaaatattgttaacaaatatgtttatgctaattttaagggattgatttgaagtttgttaggattaaatttgattgataatgtgattgacaatttaaataaaaagtttaaagtaaaattaattattttggaaaaaaaaattaatgctaatgacattagatcgtaaataagttcaggatttatttgctaaaatagctacaaaaatgtatatatagatttcaaaatatacttttttaatcactattttttcgtggagtagctgtctacgaatgttctatccaatacattcgaacacgtgattgttcgttaattttcttgattctgtaagagaaacaaaaaatatagatgtccaactttttttttcgggtgggaatatagacgtccagcttagctacgtactgaataattcaaagttccaaactagtatatattaatacaattgacgataaggtcataaggatcgatggattccaacgattcgatacaagtattaatgaaataagataacacgattgtgacagcaaactctatattgatatttctattttttaattagccatgcgttgcacgatcaatttacaaaataataaaagaaaatgatcgatcaaagagcattccattgaaatttaattccatcctgtaatcacataattttgggcccaatcctatttttcaaatgtaacatgctattacatagtcacatagaacatcctaaaatagggttaaaatgtacttttatctatttgcaattttgatattttcctttctgaaaaagattagtatatggcaaattatcttttagataaaagatcttttgttctgactatacattaatttattttaaaaaaaaaacttaacagatatatttgcaaatacaaaatgatgaaaaataaaagggataccataatctaaaatctgacaaagaaaatatacaaaaagtcaattacgatacttagaaaaagaactatatatttttgggtagggaagttcaaaaacaaattaccgatttgctgactatatgagcaattattacatacttttatttatttgtacaacaattattacacatacttgtgtggaccaacatgattaattttatattggccatatggtgcgtagtaaatgttataataacttgaaattaaataataactaagctcgactcgatatatagatccaaccagtagcctctcttattcacacctaatcttcatcttcatcttcgcattcatagtctctacgatcaggtaatccccctctctctatctatctttcatatatgtgtgtatgtgtaaactatctatattctgaaaatagatcaatcaattgatcttttcctatctcaattgttttcacaaccatcagtttgacttttgatcgtttaaggctcgagagaattatcattcactgtagtaaagatagtttataccaacaaacccatttggtgttgaccagctttcaacataagtatgagttagagctagaaccggattagtattaatgttacttgtacctgttcatagtactaaccaaaaatgatccaaaaaaatgaaaataacaaataaaccatttatggttatcacagatagataaaagaagtcaacaacgatg

SEQ ID NO: 6158 - DNA, 3000 bp, Unknown
  misc_feature (1)..( 3000): cDNA_ID_3079731_gDNA_ID_1620852_Annot_ID_50999 3000 nt of promoter + ATG
aaccaaatttgactaccatccgtttgcaattagaattcaattttcctttcatgttactatttcaaacagaaacatgccaaaaatggaacttacctcattatgtccgataactaaccgttatgctactccttaagaaacgtgtgctactatcatatcattaatacacaaattcaactcatttgcttcatattcacaacaatttaatagtttcacgtatcgtggatatatcgcgagattatacaatatcttctattaattaattgctggcatgattgtaaaaaaaaaaaaaaaactgctggcatgtattcaaaaaaatcaatatatacccccatgcagttcttcgtagatggatcactcgactctttctatctatctcttatcaggtcaaatcttattctctcatatctgatagtatttttgtaaatattggttattaaaaaattgtgttcgtaattacaggtaattcgaaagacatcaaaagcaagcaaaagatggctcaaaaggtggaagcacaaggaggtattggaggagatgtatgggatgatggtgctcacgacggcgttagaaaggtgcatgtagggcaaggccttgatggtgtttcgtttatcaatgtcgtgtacgagaatggttcacaggaagttgtaggaggtgaacatggaaagaagtcactaattggaatcgaaacggtacgtaaaaatgttttgcttcgaatccactaatcttgtctttattttgcttaagtttatattatatgttcttaaaactactaaactctcaatactagggatataacgttatgataggataatagctcgcggaccatccaattagccatgtttagaatttaggtcgtatcagttctaatgattaattatagttctaaagccaaacctaaatattaaaaataagaaccaataattaccagaccaattgacgccttatacgtataattatggttctaacaagccaaacctaaaccttaaactattactcaatatatctttctatttttgcagtttgaggttgatgcagacgactacatcgtagcagtgcaggtgacctatgacaaaatatttggctatgactccgacatcatcacatccataaccttctctacattcaagggaaaaacctcgccaccctacggattagataccgaaaataagtttgtactcaaggaaaagaacggtggcaaacttgttgggttccatggacgcgctggcgaaattctatatgctcttggagcgtattttactacaaccacaactcctttgactcctgccaagaaactaccggctgttggtggtgacgaaggaactgcctgggatgatggtgctttcgatggtgttaagaaagtgtatatagggcaagcccaagatggtatatcggccgtgaagtttgtgtacgataagggcgccgaggatattgtaggagatgaacatggaaatgatactctactcggatttgaagaggtataatacttcttgctttcttctcttgtggttgaatgtgaaatgtttttacaaaatgatatgaatatcttacacaaaaatatgcttgggtaagggaatccacataaactttcgtggataaaatcatgcatattttatattagctagtgttgaatatctccatttttgatataaaatattttaactaactcaattgttttatttggtttccatcaattgcagttccaacttgactatccaagtgaatatattactgcagttgaaggcacatatgacaaaatatttggttttgagactgaagtcataaatatgcttaggttcaaaactaataagaaaacgtctcctccctttggaattgaagctggcacagccttcgaactcaaagaagaaggttgcaagatcgtcgggtttcatggaaaagtaagtgcggtgcttcatcagtttggagtccatatccttcctgtcaccaactgatcatcacatatatatatatatatatatgtctcttctataccaccaagtttgtcacgtgtgatatcttcattaagttttaagttttctaatttttcttgttctgtttatctatgttttaagtgtctttaagtatggtgttttgtgaagttgttatgcctgtaatattatatgtgattggctttaataaaagtgggtgattattatacatatcagttgcacattaggagaaaagcttatattcatactcagtatctcggcatctagtgtatgatggaaacaattatctttaagactttagcattatttaaagtgagaaacaagaaaacttcgccataattggagaattggtcattttgatcaaaatccaacaccagactacgcgcagtccgtttcgaaggaggtacactccacttagtatctagatttaatttattatacagtatgtttaattttttttttttttcaaacacatatttttcttcttaagaatatatatggaaatataatatgttaattatgtaatgatcaaataatattaaaacacacatatatatatatatataaaccatatgagcaattggataacgggtaaaatctaaccaggtttcaaaaattgtaactattgttgatttttttttttttttgatcaacaactattgttgagaaaaacatgtattatgtgagcaaaggaaaaaaagggaaaaaaaactacagatcagtaatatcaactactccaattcaacttatttgcttcatattcacaacattctaatattttaatgactcgtggatcacgagattatattaacatttctatagattaattagtggcctacattcaatgatatcaataattacacattttatccagaaataaaaataatcaataaatacgcatgaaggtcattgtaatgcatatcaataactcgttccctctctcctcaggtaaattctcagtctctcgtctgataatagttttgtagagtttggttaataaaactaatcgtgtacgctactaatacgtacaggtaactaattaatattcaaaaagatg

SEQ ID NO: 6159 - DNA, 3000 bp, Unknown
  misc_feature (1)..( 3000): cDNA_ID_1380963_gDNA_ID_1620852_Annot_ID_51001 3000 nt of promoter + ATG
ttggagtattctttatggctagatccatatgatccggttcttgtatctagattttttttacggaatattgtatgatatatctagtctcctctttggttctaaacttctaattaatcttcggtgatttgaattaaacgttactgtttttaaattatgattaaggctttaaaacatgttcatacaataattaccaaatcttaaccaattagactcttaataaggagaacgtatatatatgttgcaacttgcaactttagccctttacaaataattaatcgtacataatctaattgataaacgattctttaaattttaaaacaatgaattagcttgctgccatcgtttaatgggccaacgccaatataaagacgattagttgagaagttgtgcaagtagaagtatatgaatattttcattatctaaaaaaaaaaatgtatatgaacatgcgtttttcccagtaatgctttttatataaatatgcctcgtggatcacgaaagaataaattattatttcccttattatttcatctagtacgatcaatatcaagaagtcaatataaataaacatacaattcactttaattgatcatagcaccgataacaatctactctctttaaaaggtcttatctctattcttctctattatgtaaaaattggttaatagtagatattaacaatttatttttgcaactacagaaattcgtaagtactatcaagaagcagaagatggcccaaaaggtggaagcacaaggagggaaaggagccaacctatgggacgatggatcgacacatgacgccgtgaccaagattcagctcgcagcaggcatagacggaattcaatatgttcagtttgattatgtcaagaacggacaacccgaacaagctcctcttcgtggtaccaaaggccgtgttctcccagctgatccggttcctatattttccttgcccattaatcttcttctttctatatgtatactgttatattttgaagttttgacattttcatcttgatctatttctacagtttgtgattaaccatccagacgaacatctagtttctgtagaaggttggtatagccctgaaggtatcattcaaggaattaagttcatctccaacaagaagacttctgatgtcattggatccgatgagggtactcacttcactctacaagttaaagacaagaagatcattggctttcatgggtctgccgggggcaatcttaattctcttggggcttactttgctccgttgactactacaactccgttgactcctgccaagcagctaacggcatttggtagtgatgacggaactgtatgggatgatggtgcttacgttggggttaagaaggtgtacgttggacaagcccaagatggaatctcagctgttaagtttgtgtacgacaaaagccctgaggaggtcacaggagaagaacatggaaagagtactctactcggattcgaagaggtataatactttctttgctctttttgttgaatgtaaaaattatacatcagagaattcaaattctcttccggtttccatcataatgtattcaattgttttatttggtttccaataactgcagttcgtacttgactatccaagtgaatacatcaccgcagtcgatggcacttatgataaaatctttgggagtgatggctcagtcataactatgctcaggttcaagactaataagcaaacgtctcctccctttggacttgaagctggcacagtcttcgaactcaaagaggaaggccacaagatcgttggtttccatggaagagccgatgttctgctccacaaaattggagtccatgttcgtcctttatccaactgatgatggagctctttatccttgattccatgcatctaataagttatcaaatctatcttctaaatttctcatatgaggtctcttcatgcctctggtgaatggtgatctttgataagtgttttacgcgttgtctcttgcgatgttgttttttctttgttcttcttgtgctctattttaataaaggaagtttgttccaatctgatctttagtttccctatatgttctataatacttacttttgccattatttggttctgatactaattttacttgctataattcaaactaaaatctcaacgtatgaattgtacaatttaaaatgcaaatgttaacttttttggatcaaatatatagttgttcgtattttctcagtaaaaaaatcctgcacaaagtttttatctagaatgtgtgaccatattgaagtttttggccttctccaaacataaaaagttattagttaaaagtatatgagttggccaaaaaatacgaaccggttcttgtttctagattgagcgttacagaaaattgtattatatatatactcttggttctaatttctcttaggtgatttcaattatacttttactgtttgaaataatgtacaatgctgtggaaacatgttcttacaagacttatcaaatcgtcaaccaattagagtcctaaaaagggggtcactaattgtagaattctgacttatataaattgcaacttgcaccctttacaagtaataacgtatataataaaattgacgactctgtgaattttaaaagaactaattagcttgctgccatcgtttcattggccaacaccaatataaagacgattagttgagaagctgtggaagtaaaaaaggagtatatgaatatttgaacatgtatttcttccggtaatgttttaaatatgcctcgtggatcacgaaataatagattattatttctgctagtacgatcaatgatcctatatgcggatatatggttatatgcaagaagtcaatataaacacctatgattcacttaaatcgatcacaatctactcacttttgaaggtcatctctcttttcctctctattagtacaaaattggttaataattgaaaattcacaatttgtttttttttccaattatagtaactatagtaagattgatcagcaagcaaaatatg

SEQ ID NO: 6160 - DNA, 3000 bp, Unknown
  misc_feature (1)..( 3000): cDNA_ID_3070205_gDNA_ID_1620852_Annot_ID_51002 3000 nt of promoter + ATG
atgatggtttctatgaagatgtgaggaaggtatatgtaggacaaggtgactccggtgtgtcttttgttaagtttgagtatgctaatcgcaaggagcttgtagctggagttggccatgggaagatgtcaattcttggaacagaggaggtttttgtgctctgttctcgtattgacctaataatgttttcttgagatccaagtttcactggtctttgtattttgtggcagtttgtgctcgattctccaaatgaatacattgtatcggtggagggaagttacgataaattatttggagtggaaggcgagttggtgacgatgcttaggttcaagacaaacaagcgtacctctccaccgtttgggctcgatgcaggcacaacgtttgcgttggagatgaaagatcataagatcgttggattccatggcaaagctggagattttgttcatcaagttggtatccacgtcacccaaatcaccaagtcttaaagctttgtgagctttctcttctattcctagaataaaattaaaaagccatgtctgtttgttactcctcagcttctagttactctcttttaactatgtcttgcttcgtttgtttgttatgtgttatgaagtggtctgcttctttgaataaagcatcgttttgttggaatgtgataaactgataattgtgttatgctatacttggatgcatgaggataaatgaaaactaactattcaactaaaccctaaaacctatacgatcaaaattatagtaaatagtaacacttaatgagactttaaagttgagatgtgtaactagtcaccactcactcatgttagtgattcatgtgtgtgtcagtgtgtgtgtgtgtgtttttatcaaggtcttctcttaagattcataagtgtgaatctggtgggacttaattggtctggtggagtagaacctatgcgggcaatgaggaaggttaaggtaggctaaccgagcccactctctaagtgtttaatttgtaaccttaattcgtaaataaaagctgtttaatttgtaacctttattagataaaattttgtctttttttttgtcaaaagataaaatgttgtcaatcattttaaaaacaaagaaaaaaacttttttggcaagaatttatatatttgcttgtcataaattttccattttgtagtattttgaaaaaaatattttaacgaatggaagcaataactcgacaaaaagagtcaaactaaagtaccttcacatgcaaaacaaaacgtaaatttggtatttttttcccattaaaaaaaatatatatatattcttggccttgtgtgcgaagacgatcgagaacgagaagaacgataagctcaatacgcacgaacgtagatcgaagactggaaaggtatatcttcatcaaaatattcatgattatggttgagtttaattttgtttacgtatttgttttaatttttcaaaagtccactgttggctggctgttgctatcttggaatgattttcatatctcaataactattgtttactctaagttaaattattggggtgctatttatgatgactgatgaagtgatgggaacatgattgcaatattaaaatctcttttttatttatattaattataagtttgtacccacttcattttaaatagataatgccaagacgtaggtatattattactgaatttattttttaataataagtaaatatgcaggtttcaactagaaaggtaacacatcaacaagaaataccaaaaaccactagcttacatattttgatcatataagtattgaataatatagttatagatgatcaaatagttattattaattacttagctagtgtaatttctatcgattgtttcacattcgcaacagataattatataaataaatacatactacatgttaacctttgtttttgttaaataggatgttttcttgattgatgatctagatcaacttttaataatttatacgtaccagctttcattcgatcgtgcgacttcttggaatatcccatggtacatttgcagtcgagctagaaagcttttttgataatttatgaatcatattaagcgtctctcaattagattaatatttagtaccagtgtaaatgatacaattataaatctttttaccaacgaatacagaatttgttttagaaatattcttcgcaaaattttataatatttcataaatcagttataaaaaaaaaaaaagcagttttgaattcagaggaattcgtaaatttccctaagagttattaaaactagttgtgatattttggagtattctttatggctagatccatatgatccggttcttgtatctagattttttttacggaatattgtatgatatatctagtctcctctttggttctaaacttctaattaatcttcggtgatttgaattaaacgttactgtttttaaattatgattaaggctttaaaacatgttcatacaataattaccaaatcttaaccaattagactcttaataaggagaacgtatatatatgttgcaacttgcaactttagccctttacaaataattaatcgtacataatctaattgataaacgattctttaaattttaaaacaatgaattagcttgctgccatcgtttaatgggccaacgccaatataaagacgattagttgagaagttgtgcaagtagaagtatatgaatattttcattatctaaaaaaaaaaatgtatatgaacatgcgtttttcccagtaatgctttttatataaatatgcctcgtggatcacgaaagaataaattattatttcccttattatttcatctagtacgatcaatatcaagaagtcaatataaataaacatacaattcactttaattgatcatagcaccgataacaatctactctctttaaaaggtcttatctctattcttctctattatgtaaaaattggttaatagtagatattaacaatttatttttgcaactacagaaattcgtaagtactatcaagaagcagaagatg

SEQ ID NO: 6161 - DNA, 3000 bp, Unknown
  misc_feature (1)..( 3000): cDNA_ID_1830258_gDNA_ID_1620852_Annot_ID_51003 3000 nt of promoter + ATG
ccggaggagcacttagtttctgtagaaggtcggtataaccctgaaggacttattctagggctaacgttcaaatccaacaagaagacttctgatctcattggatatgaagatggtacaccgttcactctccaagttcaagacaagaagatcgttggattttatggcttcgctggaaacaatctccattctcttggagcgtactttgctccgttgactaatgtaacccccttgaatgccaaaaagctagaagcaaagggtggtgacacgggagatatatgggatgatggtgtttacgataatgttagaaaggtatatgtagggcaagcccaatatggtatagccttcgtcaagtttgagtatgtcaatggttctcaagtggttgttggagatgaacatggaaagaagacagagctaggagttgaagaggtacaaaaatagataattctatgttgtgattcgtcaaaaggatatatatatatatatatttatatgggtaacctcactcaaaattatttggtttctttgcagtttgagattgatgcggatgactacatcgtatacgtggaaggataccgtgagaaagttaatggtatgacctcagagatgatcacttttctttcattcaagacttataaaggcaaaacctctcagcctatcgaacaaagacctggtattaagtttgtgctacaaggtggaaaaattgttgggtttcacggacgttcgaccgacgttctagactccctcggggcttatatttcattgtcgcccactccaaacttgcatggaaagtggacaaaggtagtaatcttttatatatcaccatgggagctagttcactaagcagactctatattataaaaaatcctaactaacaagtattattaattaattataaggtggatgaaaatggagatggtccagggctaagatgctcgcatgacatagcacaggtaggaaacaagatttactcttttggtggtgagttcacaccaaatcagcccatcgacaaacacctttacgtctttgacatcgagagccggacttggtccatttctccagccacgggagacattccaaccctctcttgcctaggtgtctgtatggtgtcaataggatcgaccctctatgtctttggaggccgagacgcttcacgtcaatacaacggtttctactcgtttgacacgaccacaaacgagtggaaactgctaactccggtcgaagaaggacccactcctcgtagtttccactcaatggcagccgatgaggaaaacgtttacgttttcggtggagtgagtgctacggcacgactcaatacactagactcttacaacatcgttgataagaagtggtttcattgttcgactccaggagattcccttaccgcaagaggaggagcagggctcgaagtggtgcaagggaaggtatgggttgtgtatgggtttaacggatgtgaagtagatgatgttcattactacgatcctgttcaagacaagtggacacaagtggaaacattcggtgtgaggccttccgaaagaagtgtattcgctagtgcggctcttgggaaacacattgtgatttttggaggtgaaattgcgatggacccgctagctcacgtgggtccaggtcaattgaccgatggaacttttgcattggacacagagacgttgcaatgggagaggctggataagtttggtggagaggaagagactccgagtagcagaggatggaccgcgtccacaactgcgaccattggtggcaagaaaggacttgtgatgcatggtggtaaagctccaaccaatgaccggtttgatgatctcttcttttacggaattgactctgcctaattaaggcagatttggtgatgaacgtttgtgatgcaataagggaagggtcttgataccaccatattatcattcgtcagcttgtccattttgttgatgttttttttttcctaaacgttttctatatgtttaattgttttatgtttcgtggtttatccaataaattgtttattttcttaaaataaatccccagataaaaaaatgcgaactagaagggagagtcatagcttaatattaaataaataacgatggatgtgttgtatacgcgtttacaactaatcccatgcaggattcatattgtaattgtttaactagtctagtggtcaaagtcatcttcccacatggagaggtgcagagttcgaaactttgaatctccaacctccttttcattgttcttcaattaaaaaaaaaaaaacattttcaaataataggccgtaattgtttttttgcttctgaccttcaaataattgaggagggctctggttgttgctcctctgcttctagccactctctttaaactatgtgttgtgtgttctctaatgagaataactatgctaatgtgatttctctttacaatggtgaatggtgatctttcttttaattataactgtgtataaaacattatctctattaaagagaatcacatatccaagatgtattgatgcttcaactttcttttcaacgttcactatttaaacccatgcataatgcattcctttgttcgcacttcgtattttaattgaaatatttaggtaagtcatgcctgtctcttttctttttttctttttcttataaccaagtcctgcctttcttggtttgtcactttctcataatcttatccgtgagtattgatctctctacgaaaatttcaattgaccatctcaaagaacttgtaaaatgctcttccttattatcatcctttttttccctaaaatttagtatttgtctttagcatattttgttttagttgaaaacgattgataaattagtgttacatccaaatgctggaattttataataaaataaagaagttagtagggttcatgttagatgtgtaaaatacttttttcactaagacattagatttctgtttcgatagattattataaattcttcagtttgttgatgtcattactattgactctttcagttaaaaatg

SEQ ID NO: 6162 - DNA, 3000 bp, Unknown
  misc_feature (1)..( 3000): cDNA_ID_1830254_gDNA_ID_1620852_Annot_ID_51004 3000 nt of promoter + ATG
actataatcatatacagaaagaaaaaaaacaagtgttacatcacgcttagcttaaaagtttcgactttttgcaccgtcatatttcacgtgtaagcaagaaatacaaatgtaaatagattataattaatgaattctctcgactctctcaacatagtatataaaaggaaatctacacatgaaccgtatctttctcacttttgaaatattttgatgttttaaagaaattttttcaaaattttatataaattataaattaatttaatattttttgattatttatatttttcatcagtcttgttcataattggttgaattgttttaaagtaaatatttctttagctaaaacatcttatacaattaaaagaaaaaagtgtaatcaaataaccaaatataaattagtatttcaaattatacttattgcagggtgataaaccttttgtcccaagtgaagttaaacctataaatatataccccatttagagggtcctatataactaaagtaccacatatttggtggtttatatcattcaatttttttgtaactaacttaatatttgatatgtaaaatcatgttaaaataggatcagcagatagaatatataaaaaataagtcatgtacaaacgtaacgttcttcatatcttaggtaacgtatctaacaattttgttaaatattattattttaaaaaattgaacatattatttggaaacttttcttttgataattttgaaatggcactttgtaattaagagtttaataaagaacacgtcacacacaaaaacgaagaaagagattatagaaattaagttgtgttttcaatcttcgtgtatacaaaacaaaaataaaaattagaaatgatatttcatacgatgttgttaaataatataattatgaaaattagttgtgctttatattattatttttgttggaagctctagaaacgatcgacctaatagtatatttttgtcactaaaaagtgtgattaaaatatatatatatatatatatatatatatatatatatataatattgtaattttcaaccaattctcggtttaggtggtttattattatattgttttttgaaaaaattaaaaaatatatccttattagttcattcttttctggtcattcgttcacactttacaacttggttaatggccacttctcaagttatcgttctttcatttgttctacagtcgcaagaaattatcgttctttcatttgtcattatgcataatgatttctcttttctttttagtgcataatgatctcactacataaaaaaatctatcttacgattcaactatatttagtcccatgcactcgctgcataacacattactttcttcgatttagagtgattttcacaaccttgtttctgtattgtatatttagttagtgtttgtgattaccaaaaaaaaaaattgtttcttcttggcttagtctttttatctttttttttttttttgcttcatctatttttcctcccatgacagatgaagacggcaagagatgcagcaaatctcatttatgatctatctgaagaatcagcgtcatcgatttggagactcgaaccataacaaaaagagcatcacagtttcaatttaattgctcctggcgcttcctatttcagcaacaaacattaaataattaatccaatagagatgatatatatggaaatttcaaaaccaaaaaaagaaactttcaaaaccaaaattgcgaagccatagaaatcgtggatcatggaattgcgaagaccaatgttgacatatgggaatttggtgtcccaatgagcagagatcactaagattggttttcgggaggaactttttgagttcatgatttgaagaattgtctcgcctataagctatcgtccatagtttgagattcatgcgacaagaagaaggtttgattcactttctccatttaattgaatcatcttcatagatatattttcatacttaatcaatgtttttaccaaaaaaataatgttattttattattttggttttatgtggtttgggattggtgtagattataaaccgattaaaccaatgtttttgtgttctgagatttcaaacttttgaactaaataaatatacgttttggggaatatccaatatcaatatgtatcatagtttggactctatctattccagtatgataattcccgtggaaaaatatatcatcgtctctattttatacatgcacttgcaacacaaaccagccataaagtgggtctattcttataatttatgacaacatggaacactatcattgggccacgatgcaaggagcgaaggacgatgcgagaaggtgctttactgatttgatgaacgtggaggtgattctgaatgatacgagatctctaagctgaatatataatagtatagtttttcgtaatttttttttgttaaattttttatcgctgctaaagattaaatggcgagtaaaactatactattatactttcaaagatcacccgagaaaatgatgactgcacatactttcaatatcccatagatgacatatctgttttatttccatcaagctattcatcgaaacaaaagcacatgacgattatgggagagaaacactactctaaaatcccgtaataagctgcaccacctaattttttgtgccttgaccaaaaaaaattcaatgttgcagttcaacgaaccttcttacggaggatctttaaacaaaatttatttggtacatagagaaaaatattttaatatatactaatttaatgcctcgcgatcaacgagtagagaaaaaatatgtcgcgtgtatcttcttccattggtcaataaataccaatgcaatgtttactacacaaatcattacttcagtctcactctcaggtcagctctctccacatctctctcatatgattgtactatgtataagatttggtaatatttgtaattacaagtaaaattcgtaaatacagataatattcgtaagaggttgatcaaacgaaagcaaaagagatg

SEQ ID NO: 6163 - DNA, 3000 bp, Unknown
  misc_feature (1)..( 3000): cDNA_ID_2992185_gDNA_ID_1620852_Annot_ID_51005 3000 nt of promoter + ATG
gcccatcgataaacacctttacgtctttgacctcgagacccggacttggtccattgctccagccaccggagacgttccacacctctcttgcttaggtgtccgtatggtgtcagtaggatcgaccctctatacctttggaggccgagacttttcacgccaatacaacggtttctactcgtttgacacgacaacaaacgagtggaaactgctaactccggtggaagaaggacccactcctcgtagtttccattcgatggcagcggatgaggaaaacgtttacgttttcggtggagtgggtgctatggatcgaatcaagacactagactcttacaatatcgttgacaagacgtggtttcattgttcgaatccaggagattcctttagcataagaggaggagcagggctcgaagtggtgcaagggaaagtatggattgtgtatggatttaacggatgtgaagtagatgatgttcatttctacgatcctgctgaagacaaatggacacaagtggaaacattcggtgtgaagcctaacgaaaggagtgttttcgctagtgcggctattgggaaacacattgtgatatttggaggtgagattgcgatggatccacgagctcacgtaggtccgggtcaattaatcgatgggactttcgcgttggatacagagacgttgcaatgggagaggttagataagtttgaggggactccgagtagcagaggatggaccgcgtccacgactggaaccattgatggtaagaaaggacttgtgatgcatggtggtaaagctccaaccaatgaccggtttgatgacctcttcttttacggaattgactctgtctgattaagcgcgatttgatcatgaccgtttgtgttttatttgtttgtgtgtctgtgtgtctgtgtgatgcaataagggagggatcgtgatacctctatatgatccttcgtcagcttatccattttattttttattttctaaatgtatctttttgttttttgttttctgttttgtatgtttaatgtttcgtggcttgttcaataagatgtttattttccgaattttttttgggtatgttacgttatactacaaacaaaaatattatgattttgattttctctaaagatgaaatgaatagaacaagaagtcagcagatagggtggtttcatctacttttgtggttggtaaatgtggttagaaaaatttgcattgaattgtaagtttctatccataaaagaaacaaaaaattaatgtaatcaagagtggaaagttaccaatggattataaaaatcttgcaattctaataaatcctcatgtcaacggtacagataagataagggtaaggggcaaacaatcttgttggttcaaatggcaagtaaacaagggcaattatatccacctaatccattgcgttttctttctctaatcttagaatctactttaattgtatgtttttctctttcatctactttccaaaactatataacctcatttctatactttttatgcatttattttgaaacccctttatcaaaaaaaaaaaaggggccaatttttcttcaaaaatggttactttaagattctcatatacagtgtgccaaaaaaaaaaaaggtacctaaaatatttattatttcagatattggtcaacatattatctgtaacagaaaaatgttcacgtgatatttgcgaatcacatttttctaggggcaaaagtgatatatgagaatcttaaagtaaccttttctagaataattgcccttgtttacttgccactgtagtcatttatttaatttatgttcaaaaacagattacctacctaattcaccgaaacgaaaaattttgttgccagtttttgttttttttaattttttttttcctctttttagtttaccttctcttttttctgttcaacattaaactagaaggtagagtaataaataacgatggatggatgtgttgaaaacgcgctttatgcatgattcatacgagagcagctgaggaggagacaaaaaacgggtctacactatatcagacttttttttgtttttttggtgtaaaactatatcagatggaaaaatatcaaccaaataatgtagaaactatatcaaacttttaacaaaactatcaacccaatattttatattttattaaaaaacaatactaataatttttccttttcctcgtttttttttttctgatcaaccattcacacgttgtttttcgtaattatgattctgcataatgctttctctaaatcaaaaactccacgccacggttcaactgatgtagtgcctccaccgttgtcgtttgactcgttgcagaggacaccattatgcacttcgattcattttcaaaatcgtctttctctactgaattgttactccatttaattttttggtccatagataacatagaccattatactagtatgttaaatgtatacttatcagttaccgcacaacattaattcttaaagagggttcattttcgagaattgagtacaacactaccattaggccaaaatgcgagaggcaaaaaaagatatagcatatacttatcatgaataatgaaaatcttttccatccaaataaaaatctttcttctcataaaagaaagaagagaaaaaacaatgagtttgcatatctttatcctgtagaatgataatcttccccatcaactactgtagatcgtcaacgtgtactcacttccattatcgatcgaatcatcaatttaatgcctcgtgaatcacgagatcatataatatgacaagaaattcgtcccgtttatctactgctggtcaataaatactcatgcaattcccaccaatagatcactcaaccaatttcttctcaggttctctcttcacacctctccccttctctatgattatagatagtatatgatttggttaaattatctatatttcttttttgataaaggatttggttaaatttttaattgcaggtaatactcgtaagatttatcaacacaagcaaaaaagatg

SEQ ID NO: 6164 - DNA, 3000 bp, Unknown
  misc_feature (1)..( 3000): cDNA_ID_1830250_gDNA_ID_1620852_Annot_ID_51006 3000 nt of promoter + ATG
ctttagctgaaactatttgcccatagcatccaaagatttctcgcagtcttgtttcattcattgattcactcaagttcttcacgtacagattggaccatctcatgttaggctttgcaataaagttgtcactgaatttctgtttcagcatctccctcctttcatctttcttgagtgccttaccaacaaacaatttcttcgatcctgcagattgtcaaaggaatgtttttaaatcaggaactatggtctaatgacaagatactaaataataggttcagacaaagaagttgaattaccaagttgtagtccacagagagattccatagctttcttagcattttctggattgcagaagttaacaaatccgaaacctctagatcttcccataccatccctcataaccacaacactagagacagttccatattgagaaaacagtgtatgtagacaatcatctgtaacagtttcgatcagattcttcacataaacgtttgtagagtcttgatttcctgccatagctgctctttcatccttgttgatgaacttggcaacaaacctaaagtcaaaaatagaccaagtaaataaacaaccatttcatcatcattaccttcggttactaagaatcatacaagcttacagtttcttgccataaaccatagagccgtggagagcagaacgagcagatacagcagattgctctgtatcaaactgaacaaagccaaaacctttactttggccattctcttcaacgactttgcaagaaagtatggaaccaaaggggcaaaacattcgctctaagcaactgctagtaatcgagctatccagattctttacgtatagatttgcaaaaccagtacgagtacgacgacggtacgcaagatccctctgagaccacattattcgcatagcctttcccttcaaatcactatggtttaagcgagtcatagcattcgatgctaatccacagaatcaacaataaagaaacaaagatctgtcagaattagtgacctaaatcggttaatcgcaagacaatcttagagaaaaacaacgaaatttccagggttttaacaagaattgaaagagtccaaaatcaaaaaccgtaaacgttgaaaccaaaatcggagactggaaacgaagaaacgagtaaaaaagtcgaaagtcttgtttaccgctgaaaggtgaatcgaagttgatgtaagcgtaacacatggattttccggtgacagagttacggcaaagatgaacggacactaccggaacattcaaagagaacttatcaatgagatctttctccgtcacgtctgggctaagatcaccgacgtaaagcgaaccaaaccttgaagaatgctggtggtttcctaacgcctgcgtttccgttttcacgagcgccattgttgttctctcacaaatccttatctctctctcgttctgtagaaatgtagaatcaatgagaaagaacaatttctttttccgaaaaactctgcagagaaaaaagagtaaatggagaagacgagagaaagcagagaggtcttattttgtcttggagtgtgtatatatagatgtatgtatcgttctgttataaccgtaatcatagcgcgcacagagacggcggtacgatatttcgtacggaactccacgcgccgcgagtatggcttagtggttaaactcgcgttaatttgctcatacccgaaattttaaatttatccaaatatggaagtgagcccattccaaataattttgggcttatttgagttttagattaataaggctagtattctatttttgggtttgtttagtatgtagtttttataaggcccatcatgtaattgcataggttatgctgtattttgattttgcatttaccatgtcaatgccaactcacacactattgatttgtttaatatattttcccattgtgtattctagaaattatattttaatctaatttgttcatatgatgtatgagaatcttaaagtagcatattcttttgacaaataacaaagtagtatattttaaatgaatttctcttgtttacttgccattatagtcatttatttaaattatgttcaaaatcagattaccttacctactaattcaccctaacgaaattttcatgtctttaatttgaaacaatcgaagatttgacaacttattttacaatttttctataataataatcttttcgacgagttaaaaaagaaaagttatattttattttcctgctcaaaattattgtattcttgtccggaaaacttaactgtcaaccaaatatttataaattgtattctgtaaaaaaaattctaaagggtaagaattccccttgtttacgtttcctttgtttacgtcccactatattcatttatttaatttgtttttggtcgacagcttatgttactggataggttcaaatgaattaaaccgaataaacgttgtttctatatgaaatagaatgtgcgtgaacacgttccatcagctttagaattagttagtatagttaaatatacatgatcttacttcaatcaattaatcaaccacacatgatacaactattaattcttaaagtggtttcccttttgagaattgagggcaacactaccaatccattaagccaaaaatgcaaggggagattatacttatttgaagaacgtggccaagatacagatctttattacgtatagtgagaatctttcttctcataaaagaaataagaaagagaagaaaaaaacgagttgccatatcatgtaaactaaaagtcttccctatcgaccatcatccatatcttccccaggtcaataaataccatgaaatttccctaacatagatcactgcaccaattaaccattacttacttctcaggtaatctctctaccttttctcatatgattatagttagtatagtatttggttacattatatatgataatctttttgaaactatttggttacgtttctaatcgcaggtaataaatcgtaagatttatcaaacgcaagcaaaagagatg

SEQ ID NO: 6165 - DNA, 3000 bp, Unknown
  misc_feature (1)..( 3000): cDNA_ID_1830246_gDNA_ID_1620852_Annot_ID_51007 3000 nt of promoter + ATG
gaaatgaacatcatctacttcacatccgttaaatccatacacaatccatactttcccttgcaccacttcgagccctgctcctcctcttatgctaaaggaatctcctggattcgaacaatgaaaccacgtcttgtcaacgatattgtaagagtctagtgtcttgattcgatccatagcacccactccaccgaaaacgtaaacgttttcctcatccgctgccatcgaatggaaactacgaggagtgggtccttcttccaccggagttagcagtttccactcgtttgttgtcgtgtcaaacgagtagaaaccgttgtattggcgtgaaaagtctcggcctccaaaggtatagagggtcgatcctactgacaccatacggacacctaagcaagagaggtgtggaacgtctccggtggctggagcaatggaccaagtccgggtctcgaggtcaaagacgtaaaggtgtttatcgatgggctgatttggtatgagctcaccaccaaaagagtaaatcttgttgcctacttgagctatgccatgtgagcatcttagccctgggccttctccattttgctccaccttataattaattagtaatatttgttagctatttttaaaaggatttatattctgattagtaaatttccataattgtaaaataaaattaatcaaattataaattgcaaaactgtcattaattatctaaattccaatttttccctctctttttttttctttcgcgtccgtggtttagtatttttggtgctaacaaacaaaaccttcaatatacatagttgtgggagatctttgtatgttggtctaagtgattactaccttaatccagtttccaagcaatttgggagtggacggcaaagaaacataggcccctagggaatgtagaacgtcggtcgaacgtccatgaaacccaacgatttttccaccatgtagcacaaacttaaccccaggttttttaacgataggctgagaggttttgcctttagaagtcttgaatgaaagaaacgtgatcatttctgaggtcatatcgctaactttctcacggtaaccttccacgtagacgatgtagtcatccgaatcaatctcaaactacaaagaaaccatataattttcaatgcggaaagctaagcaacaaagaaaagagacactcttgaccaatcacaacatagcaatcttttttagtacctcttcaactcctagctcagtcttctctccatgttcatctccaacaaccacttcagaaccattggcatactcaaacttgacgaaggctataccatactggccttgccctacatatacctttgtaacattgtcgtaaacaccatcatcccatacatctcccgtctcaccaccctgtgcaactagcttttgggccatctcttttgcttgcgtttgataaatcttacgatttattacctgcgattagaaacgtaaccaaatagtttcaaaaagattatcatatataatgtaaccaaatactatactaactataatcatatgagaaaaggtagagagattacctgagaagtaagtaatggttaattggtgcagtgatctatgttagggaaatttcatggtatttattgacctggggaagatatggatgatggtcgatagggaagacttttagtttacatgatatggcaactcgtttttttcttctctttcttatttcttttatgagaagaaagattctcactatacgtaataaagatctgtatcttggccacgttcttcaaataagtataatctccccttgcatttttggcttaatggattggtagtgttgccctcaattctcaaaagggaaaccactttaagaattaatagttgtatcatgtgtggttgattaattgattgaagtaagatcatgtatatttaactatactaactaattctaaagctgatggaacgtgttcacgcacattctatttcatatagaaacaacgtttattcggtttaattcatttgaacctatccagtaacataagctgtcgaccaaaaacaaattaaataaatgaatatagtgggacgtaaacaaaggaaacgtaaacaaggggaattcttaccctttagaattttttttacagaatacaatttataaatatttggttgacagttaagttttccggacaagaatacaataattttgagcaggaaaataaaatataacttttcttttttaactcgtcgaaaagattattattatagaaaaattgtaaaataagttgtcaaatcttcgattgtttcaaattaaagacatgaaaatttcgttagggtgaattagtaggtaaggtaatctgattttgaacataatttaaataaatgactataatggcaagtaaacaagagaaattcatttaaaatatactactttgttatttgtcaaaagaatatgctactttaagattctcatacatcatatgaacaaattagattaaaatataatttctagaatacacaatgggaaaatatattaaacaaatcaatagtgtgtgagttggcattgacatggtaaatgcaaaatcaaaatacagcataacctatgcaattacatgatgggccttataaaaactacatactaaacaaacccaaaaatagaatactagccttattaatctaaaactcaaataagcccaaaattatttggaatgggctcacttccatatttggataaatttaaaatttcgggtatgagcaaattaacgcgagtttaaccactaagccatactcgcggcgcgtggagttccgtacgaaatatcgtaccgccgtctctgtgcgcgctatgattacggttataacagaacgatacatacatctatatatacacactccaagacaaaataagacctctctgctttctctcgtcttctccatttactcttttttctctgcagagtttttcggaaaaagaaattgttctttctcattgattctacatttctacagaacgagagagagataaggatttgtgagagaacaaca

SEQ ID NO: 6166 - DNA, 3000 bp, Unknown
  misc_feature (1)..( 3000): cDNA_ID_3439543_gDNA_ID_1620852_Annot_ID_51008 3000 nt of promoter + ATG
aaaattatactgagtatacatctatgtgtcatcgaaataagctgataataacgaatacacgttttctttttatgtctggagtagaatacagcattcatgcccttacgttgcaggttcccatcattttacaaatattctcttctcttttctactttctcttttttgatgtaatacgatctatttatttattctatatttcactatatatatctcagatgtccaacgtttcagtattgcattgccactcgaattacctaagataaaaacgaattatcactttgatttttcgcacttatagttaaatctattctcaaaatttaaacaaacatgcagaggcaagtggcactcatcaagcagtccctctttgatcaggttttggtcgtttgtttcttcgtattttcgtaatataacttcgtacgtcgtaccacttatatatgaatttcttcatataatttagaaaatgactaatataggaaaatgcatgcagggatatctcgacgaacaattcatggagttagaagagctccaagatgatgcaaaccctaattttgttgaagaagtttccgcattatacttcaaagattcagctcggttaatcaataacattgaccaagctttgtgagtattattttgttttctattatatatatattttttttttttcagttttctaatcatttttacaatgcagggaaagaggatcatttgatttcaatcggctggatagttacatgcatcagtttaagggaagcagcacgaggtaatttccccccttagtttttgactattctaattacgccttcaagaaataattttacttaaagaaatgcgaatacttaaatgtttataagataaaagaatgtaacgcaaaagtacattaaaattacttccattctcattcaggattcaatgacagaatctactttaaccagaaataattagattttatgatcgttagttatactgacaaatgttgcatttcttttttttgtagcattggggcaagtaaagtgaaagctgaatgcactacgtttagggaatactgcagagctggaaatgcggaagggtactttcgtctttatacttatataccttcatgcttctcgtttttaacagaaaactaagtaacggggtcaaaatgaaaataagtatagtttagatggctaaaattgctgcaattaatccgctgaaccttgaacttttactttacttcattttcgaccccctaattagttttcttcgctttttcttacttgcagatgcttgaggactttccagcaactgaagaaagaacactcaacgttgagaaagaagcttgaacattatttccaggcgagccaataatcaattatgcttaataatttacataattagaatgtgattagaagttatcatcaatcacttttgatatagtatttgctgaagtgaaattttttgtaatgaacagttggcaaggcaggcggggcctaaggagacagcacgtaggcccaagtaagagagaaagagagagagacagagataaatgaggaatcgtcgtcgaattttgtagcaaaactatataataaatagttcctctttatttttatatatttcgatgtacgttataaagaaggttttggacttttatattatgtccgttaataaacggtccaaatgtctctatgtttttccccttatatcgccaaattttcccttgggagttttatagctacgattacctcgtaacatatggcttcctctaataacggaatacagaaaagagtggaccaaaaaaatgcattttttcgattctatgatgaatgcattaccttgtttacaaaaggaaaaaaaaaagaaactaagctttacattattcggtttgtttccaggaaccgtgtccaaatcctaaatattcttacctatttttatatcattatgttaatatttgtctctactagtactgattaataaatatttaaaaaagaaaaaaaaaaccaaaatattcttaggtaaaagtctaaaataacattatcattatgttactatttgtctctactaaaactaattattaaaaaaaaaagaatgccatggcttagatgcaaactattcttagctaaaagtctaaaataataacattatcataaacaattaatattacacttttccatctaatttctcttacatgccctatttttcaaacgatgtcgtttaagaatatcacatagaccttctatttcatgaaaaaactaactcaccaatgcaaataaataaatcaaatgtttgtttgtggataaagtaaaacgttttctttcaatggcccagcatttactaaaatttatttcaagttcttccacgtaaagtctacactacatacactcatacaggcagtgtaacgctgattcgtagagctggagagtatcacaacaataaatttctcttccgaaagaaaacagcctaatattagggagatatttacatactctataagatgttctttaatctcttatatatattacatatgaaagaattaattgtttaattattatccaaagcgacgtgaaaccactctcatttattagccctagctatatctcacaacctccatcttccttactttaaaaacacagaccagatcctatttatagcatccatgtgcgccattgaaaggtaaatttatttaataaagtttacctataatatcaaattatgcaaaacacaggctggttcagttttttccacgaatcaaaaatggttggagaaatattgaataagagagagagagagagagagagagatagagtttcagagttgacacaacattgaagtaaactaaactcctaacctctttatctatgtgtatatataaaactcaaaagtacatataatcttcaccattcacacatagtcacataccaaagcaaaaacatggatcgttgcacgtcgtcgtttttgcttctcacattggtctctaccttgtccattctccaaatctcctttgctcaacttgttccagcaatcatg

SEQ ID NO: 6167 - DNA, 3000 bp, Unknown
  misc_feature (1)..( 3000): cDNA_ID_2125292_gDNA_ID_1620852_Annot_ID_170361 3000 nt of promoter + ATG
ttgaatttataactatggaaattcatctataatgtatcttaaacgcaattgcttgttgtaaaatcgttgggtaacaaacgcgacaattttttcaatattcccataacgatcttttatgtgaccgttaaataacaaacgcgataattttttcacaccctaaacgactttttgtataaccgttagataaaaaaacgcggcaattttctcttaaacctttcaaaacgatcttttgtattaaaacgatgacgtattctaacttgagtatttcttcttattttagaaaagtatttgtgaaaacatactcaaaatctctttaaattaagttaaggataagatgagagatattgcattaatgctaatagaattctcacattttaaggatactaattggtaagtatatgctagatatttatgtattgttgaccaaaaaaataataacacaaattagcttacaagttacaaccatttaattttacaccatgttggattgagaattttgatggttattcctttatatgttgaagaaaccttctgggccaacaactttccaaataggcccaattcaaacccattgtacaaatgcaaggctactttcgtcatttttcgtaaggcgcttgaattttgcgttttcagaatcttggtttctagggtttcacttaccttccctccgcgcccttgagctctctacctgagcttctccgggattcctaaagctgaaattcaaacacctccattttcatcctcaaggtttgctctctctctctccctctccatcgatccattagatagtgtgattactcctatttgtgtactgtcttcgatgattggcgtcaatcttactaccttctcgtttaaaacccagtaacttgcgattttgttgaactttttcctcaattttctttcgattaatcctctagaaacccgtagctaagcttagattagtgatttcaatcgcaagattcaatattgatcttgcccaagtgaattaaagtcgcaaaattgatttgtttttgtttttttagctttcttatgtaattttgctcaaagctatatgattttttgtctttgcagggagataaataaaactctattgagtagaaaatgagtgctgcagcacacaggactcctaaatcagggaggcaatctctgctatttcaagatttagcttctcctgtttcagcacgtagagggaaattctcgagtccgggacaggcagctgcggtatctgcactatggcgtgagaatttcggaggatctgatcttccaccacctccaatgtatactttggatgaccggtccgatttctctcctgagtctggtattgcagactactctgcgtctccagatgctaagtctgacagaagaacaccattccagagttctggaaagaatattgtaactcctggtaaaggaaagttggaagcaagcccttctttttctctactgaatgcacaacagagtcagcaagtttcagggagtccgagttggtggtcgcagtcaaaggcaggtagtagtaccgagcaggatgataaagggaagggatctcctgtagaaggggtggttcagccaggtgcattggtcactcttccgccgccaagagaagttgctaggccagaggttcagaggcagattatacctacaggaaaccttgatgaggaagagtgggtcactgtctatgggtaaggccatttaagctttattgctctcgtttttctcactttactgttgcaaatgttcttgatttgtcaacattctcgtgtctctgaaattctaggtacatggatgataacagttatattggtactgggtagtgttattaagtgccttaacttgtgtctgtctcccatgtttcaatcttagagaactgttcataataaatgctgttctttaccatcatgatgctcaaatatcagcctttgattgtgattttatgttttgatcattgtgaattctgactctttacatggataataactggtagtgttattaagtgccttatcttgtgtttatctcccatcttttcaatcttaagaactgatcataataactgccttcagattttctccaggtgatacaaatttagtactacgggagtttgaaaaatgtggtatggtcttgaaacatgttcctggtccaagaaatgccaactggatgcacatcctctaccaggttactgttcttcccttcaaacctgtttgatgcatgttgataagcattcatagttcttctagacgagtcatcatacatgatagtctaatcaaatcttttatataaaggaaacaacgaactgacaatggtctgtgtatttgatacagaaccggtctgatgcacataaggcgctgaacaaagcagggatgatgataaacggagttgtaatagtaggagtgaagccagtagacccaatacagaagcaagcgttaaacgagagactcaacaaccaaggattcatgcctttacctccaccatcatccactagaaacactgctcgacccctgtctcgtcctcagtacttgcaaaacggcagcgctttctctcctcaaccaagtggtggcgctatggcctctccgtcaaagtcaatggtctcaaagttctttgacttgatgttcggtgtttaaaagctacttcaatggcatttcccgaatgattcttctttacacatagtttgaagtttttgagagcagagtggctaagtaaatcttagagcgtggtcaaaattaaaaattgtaagaggtgtttcaaattgtcttttgtattgacgacggctaaaaatttggtataaatctgattattaaaatctcctcttttagccgtttcattgttgtttgtatttgagcagactagtcatgcctcgtgaatgattgaaagaaagacactgattccatggaagcctcacgggcagtgttttagaaactccattaggaactagccacgtatctagcctgttgtgtttatatatcccctctcgcatgtaaattacattacaaaactcagtaactcaca

SEQ ID NO: 6168 - DNA, 3000 bp, Unknown
  misc_feature (1)..( 3000): cDNA_ID_1830234_gDNA_ID_1620852_Annot_ID_170356 3000 nt of promoter + ATG
agtgattgttaaaaatcgttatttacttacttatttaaatgtcacatagagagaaaagagatttgcatacttgtaataatataatcgtgcttgtataagaaaaaaaaaactttatgagacaagaaaaaaaaactcgggtgtacgtacgtcgtaagtaaaagggccaatgcaagcaagctgtttggctctttccttaaagcaaaataaaagaaaaagttatctttttctccttttatttcaacttttttctttaattttcttttccattttttatgcttaatttttcaactccgagatatgaaactctctactttgtgtttagtttgaactcttttagtcataaaacaacaaactctgccgcaatcaacaaaaagcgaaggagtcaaataaaaacttctttttacgagtgaaagtgactattttacttcaatctcttttgattttcaaaactaagaaaaaaaagaatggaaatcaaagttgtgcatgttcttcccttagtcgatatgtaaaagtgatttgatagacattattgtatgtaaaagtaatacaactctgaaaaattttaagaaaaattgctagtatcagctaatccaacaattagttatatgttttggagaatgtgtaacatgaccgattataaagctaacatcactttatttattgaatttataagtaatgcaattatttaaataggtcttctcgaagaacatctagatggtatacgcttttgtgaggtgagctcccttttatgtttgatttaatagaagaaatgtaatgtgtaatgacttgcttcaaatgatttgtatgttcctattggataagggcatcttgattttatttttattttttgtatctataatgtgcagtaaactttttacttttcattttagtatgatagctggagtttggttgtttcaaagataggcaagtattgtgtttaacaactaaaaataaaacaacacatatttttcaatagaattatttacaaattataaatctaaacacagggaaaatgttagatacaaaaacaaaaaaagtatcaaagacaagcagtgtatcagacatatataatatcatattttcaattcattagaaatacaacttgccatatcgcaaattagtccataatcaccaaggtagggaacgattgtctatcgataagttatgattgaaagaaaaggatttcatgaagaaaaaaaaacttaatttttcttccagaatcgtgacttagaatttttgttaacaccgacgaatttagataacaaaagctactccctcattgactaagccaagaaagttgagtagttgactaacaatgggactaatattttagcaaaatcaatacaattttggtaattattttggttcatgaaaatgttcaatttttttggtctgaattgtggaattcacgatttatttagcctttttgcggtatatataaaattaagatatttttatgtaacactttgttttataaaggataagcttgtatagtttatatataacggctagtcatgctcaaagcctttatcatctgtgggcttcacaatcttatttcttcgacccatttgcttcaagcctcaaaccaaaacttggctgagttcttcgaaagctcattatttcttatatagtaattcttttacatagtgttggaaaatgaagtaaaagaatatcgaaacttgaacgcttagatgacgaatctgtgacattatgatttcaagtatcgacgtgttttatcaaagtgaaaagttgttaatgttggtgttgggtccgtgaaagctcgaagccatggagattaatttcaaacacttttgacctttgagccttgcaagtttggtttatttgttcaacgccagacacgtttgcacagatatgagttggtgagtgcaaatcccatcataccaactaatataaagttataccatcaatgatattctatcgtgaaaaaatatgtaaagtctaatatcattaagtatcatttattaaaagaatgaattgaagggaaaaaaaaaaaaaaagataggcaatccactagtgttcataatgaaagatgatggtcgatgtaatatgtatactaatattatatctctagctttgatcctcaatagtcaatatctatagtgtttatagtgttttaacagcttttgtataatgttaactgtgcaaaatacatgacataaaataaatgattttttttggcttttatgttataagtactattagttggttatctgttttaaaggtttttccttgaattagaggatcagatttacatgcccataacagaaccaagctggtcaccaaatccatcttatgtagtggcataacagaaccaatcttggtcaccgaatacagtagtttcacctttctctttctccaaatataataaaaaacttttttattttgtgcaaaataaactttagtgagatatattgagcaaatatgtatatatatataaagatttcttgagacgatatctctttgcctctttgggtcattgttaattccatgtatcgatttttagggttgaagagacttgtttgtaactttgaccaattgtctactctttttagaccacaatgttagtaagtatgtaggtaggacttgtttcgaatgtgatgatttatttaggcccagacaaattatttactagacccattgttgttctattatttactgtttgaaagaagttgtttttgtcgttgattgtttactagtatttcaaagaaaagggtatgcatagtttaaacttcaaggaaatcccttatatatagtaaaattaaaagaaattccacaattagatttcgtaatacaattttctataacaaaacctagttaattagtccacatgtcctagctcttacccactcagcccgcatattcctcacgctttctttttattttccgaaattttttaaacggctaccaaatcaaaatgcataaataaacaaacccttctcttctttaccaattcccaaatccaccaaaaaaaaaaaaatg

SEQ ID NO: 6169 - DNA, 3000 bp, Unknown
  misc_feature (1)..( 3000): cDNA_ID_2153571_gDNA_ID_1620852_Annot_ID_170354 3000 nt of promoter + ATG
tcgggtctatatttttattttacttttatgattatgattagtcgttatcggccgatttatttgttatttaacaatttgtttaggattatagctttttcggattgggaggaatcatgttcataatatcgcggaggtgtaattattcacgaaagtgatagaggataaaaataaatttgtttagcatatactttatttaacgggtgatagatgattgaagttacatctttcaaataattggatattattgaatttatattaatagttgagaagaatgtttttaattgagtaatcaacacaattaaaagaattaaaaatctgtttgtgtgtcgacatttgaacttttaaggagtcatcttcaatcacgaaccagtcaacattgtgccctttatacgaaatacttagttcaattaggtgctaatagctacttctaataactttagtagcacaaattctggcatcatgtatatccaacaaaaaatctcaagataactttccgaagaatatctatcatttaaaaataaactttctctaaacatgtattaatcttccaatcataggaattaatagtggaacaagctagccttctaaagtattacaagactgattttgtcttgaatatgaatataagttatattacaaactagcctatagtctagcaatttcctaataatatatgaaaactaaatctctacatattttctcccttcgaattaattagtcatttgtaccagaggcagagatgatagttacgagttcataataattaagagttaagactatatatagccttaaagcttagaaatatacaaaagatcataagaacaaaaaataattttcttttataaaattaagatcacatatatatataaaggaataattggattgtgtaacacatatacaacaaaatttagataaatgtcatgaattttgtcctcttttattagaattttatcttgtataatactaaaaggtaaacataataacatttgatttaaatacaaaattggggtttatcatgtaaaaccaacctcacaagttttggaatgaattgttttgtttcttctaattttgtggtattacatatttgttattagaggggaggtcggaattaaggagaataatcgagatgagacagcaagcaataataaaacttagattctaaacccacttccaccgaaaatatgtagtagacaagtcctttatgtgagattggtttggtgggcggaggaataaataaagctgatttttttttgtatatgatcaatctctctctcttctgtaattcgatctcacgatgcttgtctgagagagaaagagatatagaaaggaacaaattatgctgtaatgataaaaagatcttttatgtctttgtgtcaatcatttagatcacacttgttatgtgctcttcagtttttcctttttagatacttgttccttgtttccaataacagaaatttatggtttattttttactcgttggatatatgtataccttattctctctctctctctttttggtttcctacttctttctttttttgttacaatatagaagtaggaaacacacgcatccgcacaagtactagcctttccttggcacacaacaccctctcacctccacacattaatggaagaaacttggaaaagatttgcatctaatttttcaatgtttgttgcagcggtcaaagagaaagaaaacacatcaaacagaaaaccccaatagaaatctatttatttctggtcttgatcatgatactaaccttgactatgtttttaatataaaaatgtcgtttaatgtttatcacaagatataatccttacttagtaattgaattccggaccccaaactaaaatacttcgaattagtattgctttctgttgttgaaacaaaagataagcaataatagtgtttgctagtgtgctagattccaacaattttttcttccaaaagtacaacttttttttgcccatttcgtaaattcatatgtacatatatagttgaatgttgtgggtgtacgtaattggtaccattaaaatcaggaaatcacaaccttaaaaataacaaaaaaaaaaagaaaaaagaaaagacaatgatattatagaaaactttgtgaaaacatgaattaaattcagtaattaatcaagacggaaatggtctgttcagaatatttttcttgaactgtatactttttcaatctataactttctttttcactttcaggaaaattcgtgtccacatacattttactagtatatatttgcctcatttccaaaggtgtgtttcgtatagtatcaacgtttagcttttaggttctatattcgaaattttacatgtttctatgatgtacgtatatatataatattagtcgtattcccattcgtgagatcctttgattacttattaattaagatgcatttcagttatatttttgggcaatagatcaatcatccacagtagtttaagtttcataatggaccatactattaattaaacaatcaacattgaggaattctctaattgaaatctcttattcaaaactttaacataaacactatcttatatatataaaagattactatacattcaaacttatatatcaacacacatatatgatcatttgataacacctaccatttgtgttatacatatattttatagagaagttatagaaaattatactgagtatacatctatgtgtcatcgaaataagctgataataacgaatacacgttttctttttatgtctggagtagaatacagcattcatgcccttacgttgcaggttcccatcattttacaaatattctcttctcttttctactttctcttttttgatgtaatacgatctatttatttattctatatttcactatatatatctcagatgtccaacgtttcagtattgcattgccactcgaattacctaagataaaaacgaattatcactttgatttttcgcacttatagttaaatctattctcaaaatttaaacaaacatg

SEQ ID NO: 6170 - DNA, 3000 bp, Unknown
  misc_feature (1)..( 3000): cDNA_ID_3079737_gDNA_ID_1620852_Annot_ID_170353 3000 nt of promoter + ATG
tatacattcaaacttatatatcaacacacatatatgatcatttgataacacctaccatttgtgttatacatatattttatagagaagttatagaaaattatactgagtatacatctatgtgtcatcgaaataagctgataataacgaatacacgttttctttttatgtctggagtagaatacagcattcatgcccttacgttgcaggttcccatcattttacaaatattctcttctcttttctactttctcttttttgatgtaatacgatctatttatttattctatatttcactatatatatctcagatgtccaacgtttcagtattgcattgccactcgaattacctaagataaaaacgaattatcactttgatttttcgcacttatagttaaatctattctcaaaatttaaacaaacatgcagaggcaagtggcactcatcaagcagtccctctttgatcaggttttggtcgtttgtttcttcgtattttcgtaatataacttcgtacgtcgtaccacttatatatgaatttcttcatataatttagaaaatgactaatataggaaaatgcatgcagggatatctcgacgaacaattcatggagttagaagagctccaagatgatgcaaaccctaattttgttgaagaagtttccgcattatacttcaaagattcagctcggttaatcaataacattgaccaagctttgtgagtattattttgttttctattatatatatattttttttttttcagttttctaatcatttttacaatgcagggaaagaggatcatttgatttcaatcggctggatagttacatgcatcagtttaagggaagcagcacgaggtaatttccccccttagtttttgactattctaattacgccttcaagaaataattttacttaaagaaatgcgaatacttaaatgtttataagataaaagaatgtaacgcaaaagtacattaaaattacttccattctcattcaggattcaatgacagaatctactttaaccagaaataattagattttatgatcgttagttatactgacaaatgttgcatttcttttttttgtagcattggggcaagtaaagtgaaagctgaatgcactacgtttagggaatactgcagagctggaaatgcggaagggtactttcgtctttatacttatataccttcatgcttctcgtttttaacagaaaactaagtaacggggtcaaaatgaaaataagtatagtttagatggctaaaattgctgcaattaatccgctgaaccttgaacttttactttacttcattttcgaccccctaattagttttcttcgctttttcttacttgcagatgcttgaggactttccagcaactgaagaaagaacactcaacgttgagaaagaagcttgaacattatttccaggcgagccaataatcaattatgcttaataatttacataattagaatgtgattagaagttatcatcaatcacttttgatatagtatttgctgaagtgaaattttttgtaatgaacagttggcaaggcaggcggggcctaaggagacagcacgtaggcccaagtaagagagaaagagagagagacagagataaatgaggaatcgtcgtcgaattttgtagcaaaactatataataaatagttcctctttatttttatatatttcgatgtacgttataaagaaggttttggacttttatattatgtccgttaataaacggtccaaatgtctctatgtttttccccttatatcgccaaattttcccttgggagttttatagctacgattacctcgtaacatatggcttcctctaataacggaatacagaaaagagtggaccaaaaaaatgcattttttcgattctatgatgaatgcattaccttgtttacaaaaggaaaaaaaaaagaaactaagctttacattattcggtttgtttccaggaaccgtgtccaaatcctaaatattcttacctatttttatatcattatgttaatatttgtctctactagtactgattaataaatatttaaaaaagaaaaaaaaaaccaaaatattcttaggtaaaagtctaaaataacattatcattatgttactatttgtctctactaaaactaattattaaaaaaaaaagaatgccatggcttagatgcaaactattcttagctaaaagtctaaaataataacattatcataaacaattaatattacacttttccatctaatttctcttacatgccctatttttcaaacgatgtcgtttaagaatatcacatagaccttctatttcatgaaaaaactaactcaccaatgcaaataaataaatcaaatgtttgtttgtggataaagtaaaacgttttctttcaatggcccagcatttactaaaatttatttcaagttcttccacgtaaagtctacactacatacactcatacaggcagtgtaacgctgattcgtagagctggagagtatcacaacaataaatttctcttccgaaagaaaacagcctaatattagggagatatttacatactctataagatgttctttaatctcttatatatattacatatgaaagaattaattgtttaattattatccaaagcgacgtgaaaccactctcatttattagccctagctatatctcacaacctccatcttccttactttaaaaacacagaccagatcctatttatagcatccatgtgcgccattgaaaggtaaatttatttaataaagtttacctataatatcaaattatgcaaaacacaggctggttcagttttttccacgaatcaaaaatggttggagaaatattgaataagagagagagagagagagagagagatagagtttcagagttgacacaacattgaagtaaactaaactcctaacctctttatctatgtgtatatataaaactcaaaagtacatataatcttcaccattcacacatagtcacataccaaagcaaaaacatg

SEQ ID NO: 6171 - DNA, 3000 bp, Unknown; identical to SEQ ID NO: 6165
  misc_feature (1)..( 3000): cDNA_ID_1830246_gDNA_ID_1620852_Annot_ID_170352 3000 nt of

SEQ ID NO: 6172 - DNA, 3000 bp, Unknown; identical to SEQ ID NO: 6164
  misc_feature (1)..( 3000): cDNA_ID_1830250_gDNA_ID_1620852_Annot_ID_170351 3000 nt of promoter + ATG

SEQ ID NO: 6173 - DNA, 3000 bp, Unknown; identical to SEQ ID NO: 6163
  misc_feature (1)..( 3000): cDNA_ID_2992185_gDNA_ID_1620852_Annot_ID_170349 3000 nt of promoter + ATG

SEQ ID NO: 6174 - DNA, 3000 bp, Unknown; identical to SEQ ID NO: 6162
  misc_feature (1)..( 3000): cDNA_ID_1830254_gDNA_ID_1620852_Annot_ID_170348 3000 nt of promoter + ATG

SEQ ID NO: 6175 - DNA, 3000 bp, Unknown; identical to SEQ ID NO: 6160
  misc_feature (1)..( 3000): cDNA_ID_3070205_gDNA_ID_1620852_Annot_ID_170346 3000 nt of promoter + ATG

SEQ ID NO: 6176 - DNA, 3000 bp, Unknown; identical to SEQ ID NO: 6158
  misc_feature (1)..( 3000): cDNA_ID_3079746_gDNA_ID_1620852_Annot_ID_170344 3000 nt of promoter + ATG

SEQ ID NO: 6177 - DNA, 3000 bp, Unknown
  misc_feature (1)..( 3000): cDNA_ID_3079748_gDNA_ID_1620852_Annot_ID_170343 3000 nt of promoter + ATG
aatcacacaaacagttaaattccattataaagtcaccctcatggcttaagaaaaagaggtggaacttttaagtgacctacccgagattccagattcatcagaatcgcagattttgttgctgctttggcgcgatcaagatgtttctgattaactgccaaagcatgtacaccagagtaaataatatgtctgtatgagttgataaatggttctaaaaaagaatggatgaaatatatagaaaaccttttccatcagcaacagcgttcatttcactagctactaattcaattccctgtgaagcaaattcaggactctgcaacgccaaaagaatgtaagcaaacccacattgcaaagtgctaaaaaccgttaataagcaacaactagaaatcggtgcaaactcaccgtgcaaccatagattccaaacaatccggtattgttaaagacgctagtgaatgcagtgcatgattgaaactgctgatgttggttcaaaaggcgaagatctgcatccagacaataaagaaaccaatctcatcatcatcatgaccaacaaataactaacttacattaaaacatgagtgttgaaaaaccgcaagtagaaagagaacacattcagagacttacagagccaagagtgcattccttttccagggcctcccgcagaaaatgagccacctcctcccataagcatctgataagaattggattttacacaattaagtctttgcgtttgaaagatcaagtaatgtatttgagtcaggcacctgaagaacagttgcaatgatagcttccttctcgttattccatcctggcacttcaaaagcaagcgcaaaatgtgtagcctgagaatggtgaaacaaaaaaagaaagatattaggaataataaaccttcttttactcaaagaagcccattgaaacgtcatatttgtacctctccacccgtatgttgacggaaatctccaccgacatattgagactttggctccgcaggtcggggtacattagggaggtcagatagtaatggctcaaccacttttagaagttcttcatgatcaactccactagctgctaggaccattcgtgaagcagtgtaattctcctgaaatttcagaacaaaatgagaaaaaagacacatctacgaaataacaaaccaaaagccagtgatactagttccagcgaatgcaataatctcttgtgttaacggtcttacaaaaacaaaattctccaagacctccccagtcaatccagtaattgcagattcaggtgcatacaatggatttgccaatgcgccagagtaaccagcagaatgaactgcctccaaaagaaaacccattggattcgttgcgaattctcctatctctactttcacctttcggagctgccaggagaaaaatgatgaaaacagtgtaaaaaaattgcttagctttaatgtttgtgagatacatgcaacatgacatgaagtacctcttcattcacttcccaatccaaaaaagcagggttcctcacactatcaataagcacttcaaccatttcgggaacataggttttgagagcatcaattgtgtaacccatctgctctcgggatgcagaagctgaagtattacctccaatagcctctatttcccttacaaggcgaaaatggcttctgttcaatgtactcttgaatgccatcctttcaagcaagtgcgtcgctccacggaattgaggagtctcataaatagaaccacagtcaacgtataaaccaatggaagctgctggattctgaacaaaatttcactcaaaatcactttccagtagtttttaacaggaagttgatgttgggattactaaaagaagctctcaccggagacatctcagtggctatagtcagaccatttggaagagtagtggtcttaagtttgctaggctcaacatggtcagagagtggtggtggaagagagacaccagccaagggaatgttcatagaaggaagtgaactagagtagcctccacttagccagctggaggaagaagagctcgttgcaacagcactagaacttgcataacgagaagctcgaaaattgtggtttagaatgccctataaacacacacacacacacacacatcctaagcatcattaatctcttgattcaattaacattgtaaaaataagaactttcgaaacagagacatttcataaacctgcaaaaagcatgaataatggcaccagctactataaagcgataaaattgaatcaagatctataagaatctaagagaccctttaatccaaatccaaaaacaatgaatcatacaaattgttcaatactaagcattctcctaaaaaaaccagaatctcaatggaaacaagtgaagtaggacattgaccttaagggccttggctcgagaagctgccgtacggtacatgatgatgactgcgaaaccctagcttggtcagatgagtaccggtgaatgtggctgacgacgggagagagatagaggccgagtcagagctgaaaagaaacgagagaagggaacgattttttttcctaattaaggttattggatcgggcaattgcttctaattacattgataggcccatatgatataatagtcttggcccaaattataacatatagaaaagatgaatttaaagcccatgtattgtagtggtgtgatcctattatattttctctcaattatattttttttcttttctttttcacgtaccattgtgtaaaaattcaagtaaggtaacgacatttacatgcagtcacaaatgaaacaagaatttttttgaggtgtgtgtaaagtgaaacgaaaaaagtactaagaaagtttatcttctctaagttaatagaattattttgaaacgtagtatccacatatatagaagactcgtgtgtggtgcatatatatactgcataacttcaattgaactgtattatataactatgactatccatccatgggaagataagaatgagagccgaatgctaaaaagcaagggacccgaattaaacaaaa

SEQ ID NO: 6178 - DNA, 3000 bp, Unknown; identical to SEQ ID NO: 6155
  misc_feature (1)..( 3000): cDNA_ID_1830267_gDNA_ID_1620852_Annot_ID_170342 3000 nt of promoter + ATG

SEQ ID NO: 6179 - DNA, 3000 bp, Unknown
  misc_feature (1)..( 3000): cDNA_ID_1830242_gDNA_ID_1620852_Annot_ID_51009 3000 nt of promoter + ATG
gtgtaattattcacgaaagtgatagaggataaaaataaatttgtttagcatatactttatttaacgggtgatagatgattgaagttacatctttcaaataattggatattattgaatttatattaatagttgagaagaatgtttttaattgagtaatcaacacaattaaaagaattaaaaatctgtttgtgtgtcgacatttgaacttttaaggagtcatcttcaatcacgaaccagtcaacattgtgccctttatacgaaatacttagttcaattaggtgctaatagctacttctaataactttagtagcacaaattctggcatcatgtatatccaacaaaaaatctcaagataactttccgaagaatatctatcatttaaaaataaactttctctaaacatgtattaatcttccaatcataggaattaatagtggaacaagctagccttctaaagtattacaagactgattttgtcttgaatatgaatataagttatattacaaactagcctatagtctagcaatttcctaataatatatgaaaactaaatctctacatattttctcccttcgaattaattagtcatttgtaccagaggcagagatgatagttacgagttcataataattaagagttaagactatatatagccttaaagcttagaaatatacaaaagatcataagaacaaaaaataattttcttttataaaattaagatcacatatatatataaaggaataattggattgtgtaacacatatacaacaaaatttagataaatgtcatgaattttgtcctcttttattagaattttatcttgtataatactaaaaggtaaacataataacatttgatttaaatacaaaattggggtttatcatgtaaaaccaacctcacaagttttggaatgaattgttttgtttcttctaattttgtggtattacatatttgttattagaggggaggtcggaattaaggagaataatcgagatgagacagcaagcaataataaaacttagattctaaacccacttccaccgaaaatatgtagtagacaagtcctttatgtgagattggtttggtgggcggaggaataaataaagctgatttttttttgtatatgatcaatctctctctcttctgtaattcgatctcacgatgcttgtctgagagagaaagagatatagaaaggaacaaattatgctgtaatgataaaaagatcttttatgtctttgtgtcaatcatttagatcacacttgttatgtgctcttcagtttttcctttttagatacttgttccttgtttccaataacagaaatttatggtttattttttactcgttggatatatgtataccttattctctctctctctctttttggtttcctacttctttctttttttgttacaatatagaagtaggaaacacacgcatccgcacaagtactagcctttccttggcacacaacaccctctcacctccacacattaatggaagaaacttggaaaagatttgcatctaatttttcaatgtttgttgcagcggtcaaagagaaagaaaacacatcaaacagaaaaccccaatagaaatctatttatttctggtcttgatcatgatactaaccttgactatgtttttaatataaaaatgtcgtttaatgtttatcacaagatataatccttacttagtaattgaattccggaccccaaactaaaatacttcgaattagtattgctttctgttgttgaaacaaaagataagcaataatagtgtttgctagtgtgctagattccaacaattttttcttccaaaagtacaacttttttttgcccatttcgtaaattcatatgtacatatatagttgaatgttgtgggtgtacgtaattggtaccattaaaatcaggaaatcacaaccttaaaaataacaaaaaaaaaaagaaaaaagaaaagacaatgatattatagaaaactttgtgaaaacatgaattaaattcagtaattaatcaagacggaaatggtctgttcagaatatttttcttgaactgtatactttttcaatctataactttctttttcactttcaggaaaattcgtgtccacatacattttactagtatatatttgcctcatttccaaaggtgtgtttcgtatagtatcaacgtttagcttttaggttctatattcgaaattttacatgtttctatgatgtacgtatatatataatattagtcgtattcccattcgtgagatcctttgattacttattaattaagatgcatttcagttatatttttgggcaatagatcaatcatccacagtagtttaagtttcataatggaccatactattaattaaacaatcaacattgaggaattctctaattgaaatctcttattcaaaactttaacataaacactatcttatatatataaaagattactatacattcaaacttatatatcaacacacatatatgatcatttgataacacctaccatttgtgttatacatatattttatagagaagttatagaaaattatactgagtatacatctatgtgtcatcgaaataagctgataataacgaatacacgttttctttttatgtctggagtagaatacagcattcatgcccttacgttgcaggttcccatcattttacaaatattctcttctcttttctactttctcttttttgatgtaatacgatctatttatttattctatatttcactatatatatctcagatgtccaacgtttcagtattgcattgccactcgaattacctaagataaaaacgaattatcactttgatttttcgcacttatagttaaatctattctcaaaatttaaacaaacatgcagaggcaagtggcactcatcaagcagtccctctttgatcaggttttggtcgtttgtttcttcgtattttcgtaatataacttcgtacgtcgtaccacttatatatgaatttcttcatataatttagaaaatg

SEQ ID NO: 6180 - DNA, 3000 bp, Unknown; identical to SEQ ID NO: 6168
  misc_feature (1)..( 3000): cDNA_ID_1830234_gDNA_ID_1620852_Annot_ID_51011 3000 nt of promoter + ATG

SEQ ID NO: 6181 - DNA, 3000 bp, Unknown; identical to SEQ ID NO: 2333
  misc_feature (1)..( 3000): cDNA_ID_1830226_gDNA_ID_1620852_Annot_ID_51013 3000 nt of promoter + ATG

SEQ ID NO: 6182 - DNA, 3000 bp, Unknown; identical to SEQ ID NO: 6167
  misc_feature (1)..( 3000): cDNA_ID_1830222_gDNA_ID_1620852_Annot_ID_51015 3000 nt of promoter + ATG

SEQ ID NO: 6183 - DNA, 601 bp, Unknown
  misc_feature (1)..( 601): cDNA_ID_1830214_gDNA_ID_1620852_Annot_ID_51017 3000 nt of promoter + ATG
ctttttcatcaattagtatatagattagaatgttctgttttgtcccctgtttttgactgtgttgtattgtctttagaaataatatcaatttaattgatttttcctgtgagtgtgacagaggaaataaatcagtttcatgtgcataatgtgaattgtgaaaaagaaattaaaaaaaatcggaactttgggaaataaggaaagacaccgaagaacacacaaccattcctctttattgaccgcttccttctttctctgtcacatacgaatcggtgagtttttttcttctcaatttctccgttctctgctgatttctccgaggttattgattcgattccgcttgacgcatgattgtgttgtctcaagggtctaattttacctccgcgttgattggtttataggggaaatttggatcccgatcgtgatctttagtttggtgaatttgagctggaattggagcttaaaggatcggttttttgactgatctaattgttttgaggatcggtctttcataaagttgttgtctttgaagcttttttgactggtgaggacgaaaaagttgtgattttgggaattagggttgttttgtttcgaattcgccatg

SEQ ID NO: 6184 - DNA, 3000 bp, Unknown
  misc_feature (1)..( 3000): cDNA_ID_1830914_gDNA_ID_1620863_Annot_ID_51281 3000 nt of promoter + ATG
ttgtagagagattggagaagaatgttaaagggggtgactttttttgaagatcggatggattttttttttctcagagatctcaacagggagagaaaaaagacaaggaagacggtcacttcatggttaaaaaagtttgttggaaaatgaactaaaaattctaaatttagcatcaaagacacgacgagaaagaaaagagacagggtcaaagattttgtttttttttttaaaaagaaatatagttcactaattaaatcatggttaattaccttcttatttgctaagaaaatttgagacagttaactaaaactcacttttcttcgtaagcattgtaggaattcggtactattcaaaaagagggaaaattccaaaacaaaaacacaattatttattaattagacgtttaatatgtaatactttatggttagaagaaaaatatgcatattaataaaaattgtgcaattttatcttcaaaaaactaattgatgttattttcatatcaataattttacaacaaaattttaattttaattttactcttactagttcaattaatcattaatatttaagtgatgcaacattaattttattttatttttaaatttactgtttattaatattttgtttctgtattcatcccaaaagattttgtttttctaaaatagattattttatttttaaaattcaagagaaaacaaattaaccatttttatgaatagataaattttgagaaatacaatgactttgggattgagattttgtcgaaaatacttttattggtgaagaatttaaattcaaatagagagtttctcacgacgaagaagaagttcatatcgatgttcgttgatatcatatccatcacaacgaaaaaaaatcgtgaacggctatcgaattcgatgttggaaaaagagggcaaaaggagattgtttaacggcgattcacatagcgattaatcgagaaaatctagaatcaaaaattgaatcctaagagaaaacgtctctttcattttctcctaattttttatgttgaattttaaaataaatgaatatataatagtaaatgaaattttaaaattaatgtacataaaattaatttctttatccaaaagtgtaaaattaatgccacgtcatcttaaaaactaataattaattgagatagtacgtgcataattatcatatttttttatgatatcgttattatgaaaataaccacatttaaatgtttaaatattaaactacacagtttattaatctttttcatccaaccaaaaactattagatattaaacgtccaaataaaaaatgagattttttcctttcaaaatatgtttacaaaattgggctttttttcttttgaattttgattttatacttctcaacctagcaaaaattcgatgtcggttataaaaataaatctctatcaaaaatttgttacgtagaggaatacgactaaaggaagagaagaaaatagggctatattaatttatatacccagaaaacataaaaataaaaaataaacttataattttttttataattagttctctttccacaacttctataagttggactaaaataccctttcgctcataataaactaattaacaacataagaaaattgttaccgacatcttttatatgattcagatgatattgtttatcaaatatataagtaagaatatattatgaattaactgataactgttatgttaacaagataacaaaatatatagcaataagtttataactatattgtgttaaaccatattgtatcgcgataagtttataaatatattatgttaaattatcttgtaccaataattttttgttgttcattatgttttgttatttgttaattattttaatatgatgtaattatattgatttgatatgatatacatattattttgatataaaatttaatacttatccattaaaataacgtgtgcataatcaaaatccggattattatgattaaatcctcttattattaaaagagaagtacaaattgaatttttgtctaatttgacctcaattttgatttcaattttggattttcttctttgctattcaaaatcattaagggtaatttggtcttaacaatctattaaactttatatgatccgattcaatctaaaccgttcaataaaattaattcccttcaatctaaaccgttcaacaaaaataagtaaataacaaaaaaaaatcccaattattatttagttatgtttgttttaaaaatttttatttataagtttaagatatcaaatttattcaaatatttagtataaaaaccaaataaaccgattgtccgcggtaaaccgcgggttaaatcctagtagatagttaaaatgtatagcaaaatagaatgcgtaagattaaaattttagtttttagaaatttactaaacaaaatacagaaaaggtgtgttgacaactatttaaaatttaaatataatcaataagatatagttaaagttattaagtgtatagcaaaataaaaattgtaagaataaaattggatttaaaatttttttagtaaattaaatattttaaaaatagggattatcatttactgtttagaattcaaatatcatcgataaaaatttatactattgttttataaatccgcttatctagacgggcctaacctagtaaatatataatacacatcttatcattcggtcaaaatattatgaaaacatcattaaaatttgatgattacattccataagtaatttgttaaagcattatgcattttcctgttctatggacattaatttgaaccatacgactccatctaattcacttgttctcggcagctagcattcgaatcctgacttttcaaatacaaattatcggtcaagatgggtgtgcgttacgttcatttacaaatcactaaaaatgagtggtgaataatcatttggacaatacggatacattcatcgaagttgactccattatcctaccgtcgtctcctaacaatcgaagcacaactttgcaatg

SEQ ID NO: 6185 - DNA, 3000 bp, Unknown
  misc_feature (1)..( 3000): cDNA_ID_3079771_gDNA_ID_1620863_Annot_ID_51283 3000 nt of promoter + ATG
aaaataaatatcacttaaataaactatatcaatattgtcacaatagatccagctttagtattgaaaaactatttaaattttttattaccggccatgtcttaattctagctccattatccgtcctaatgaaagtgcaattagttacttggacattctcaactatagattcttctccatctcttcctacacttcccacactgtattttaattttatagataaagaagaaaatgtaatatatatatatatatagaatatataaaattagtatatgtacaatgctattgatgaatcacacacatatataccttattccatgaccaggtccacaattcatccttgcgatattgatattcatacttccgctgttaatagctacacaatcatctcctggaaagttttataagaaattttaaaattaaataatcttaaaataccatttgagattactttttaattagtgagtgtgcaagagagatatctagctatatataccagttccaataactgtgtcgtatatatcgacatcacttgattctgagatattaattccatcagtgttaggactatcgtggggtgctacgagttttatcttcgttattttaactcttttgcattcgctaatcgatatatggttttttggactgttgaatgaggttattccagttatcatgagatcgttgcatctttgaaaatgcaattgctgtaagaaaaattgaaagaaaaaaagaattcatcatgaactttccaaaatattgacgacgatcaatgtatataaataaataaaatattttcattttagaattcagaatgaattttagtgagaaaaagataaactcacggtaggccgtttagaagcaggcagtccttgctggatatattgaatatgaaaaaaagaggaaatattaaattaacacttttgtttatatataattaaaaatcatatcttttattgtgtatataaatttctttcaagattgccaaaaaataaaattgtttcaccttccaaaaagacgagccacgtccatgaattgttcccgaaccattgactgttaaaccgattatttccttaaaactaacccatctaaataacttatagtccgaccaagctgctttatttataggtgcaacaatctttccgtcaaactgcataaatgaatacatatacacctttattaatcagataatttgcacataaaattgtaaaaagatttataaaaatatcgataattaccttaacttgtacggaaggagatttacaagggccttggaaagtaagaggttgtagtaaaaatgttttgtttgatggaataatgaatgtttttgaattcccaccactaccacacatagcgctccatgctttcacaaaagcctatttattttatcaaaaaatcaaatgtattagaattcttaataactcaaattttgtgacaaaacgtatgactacgttgtaggaaaatgaaaaacctaataatagttatgtatactcaaaggctgtatgatattatattggtttgaatttttttttgaaaacttacaaaattcagatattttcataatataaaacaagataaaattttgcaatataatacctttgaatcatcggtaataccatttccatcggcaccaaattcaagcacatcatagatttggccgtttacaagaatagaatgcagtaaagtcaacaagaacacaccacgtagtatgatttcctacaacatacaaaatcaatgttagaaagaaagaaaacatactaacttttataaaaaactttactaacttcttatcattgtgtgatgatgatcagatgtaactcttaccattgtgtgatgatgatcagatgtaatgtagtgtatatgtatgtgatgttgatcacttaaatatacacatacaaaatcatgggtatatcttattaaaacatgttcatggatatagttttaaactttacatattttatgcctaaaatcattagttattatggatattatttcgcatataagtgatataatctctcttttatataagatttagaaataaataaaatagaatttgaagaaatagtaaacaaatacaagttaaaatagaaatgaaaatacttgaatataagggggtactaagtaaaaaacattttggaaaactcaaaaatagaattaaatttggatattgtgatctcattgcattattaacttatatttaacaaatacgagtaatattctgtgtaactacacagccattgacattgaaaactaaaatgcttttctaattatttggtagtgtgatttgcaatatatatagacagtaacttgaactaaaatctgatatgatgaacttattaatataatgtattaatcggtttgatgtacgataaaatgttttaaattatccactagtagggttgcatacatggtacattcaatataaccctttcaacgacaagaacaagcactaggtttctgattttaagctctaaactatgtgatttaatttatttgtttgaaaaaaataaagtgtgctagaatatgggatcatgatcatttccattctgaaaattaacgatgtacatttttttttaaaagatagtgtatattaattagtttgttatagttttgaccaaaaaattaaaataaaattatcagttagttaaatttaaaatccaatctgaaaaagatatatatgtaacaaaatttgtttttttaaaaaacactctctgcgtctggaaaaaaaaaaaaagattaaaaaccaataaagaaagtttcggaactaattagggcttccttttgcttacatgaaatataccgtcgcaagtcatctagcactctgcttcgtaagtttcgtcttatctgttctagagaaaaggtcttaccattccagaagaagtttatgaagacaagatcagtaaattgtccgacgacttgcttgtgcagattctattgcttgtctccacaaaagatgcagtggccaccacggttttgtcaaaacgctggcgtttcatatggacaatg

SEQ ID NO: 6186 - DNA, 1333 bp, Unknown
  misc_feature (1)..( 1333): cDNA_ID_4256554_gDNA_ID_1620863_Annot_ID_170399 3000 nt of promoter + ATG
cttattggtgataaggttgcagaatggtatccatacgacatcaagaatgaggatcccaatgtcttggctagagaagaaaaagagtactttcctaaacctctcttttcttgtttactttccaattgattgctttgtttatcatagaaaactctttgagtgggattgagctggaacatgtttccacaagctttttagttcaattgctatttgggggttagtatccaaaatcctagacatgagaaagaaactagatgtagattgtatgagccttcttgtgatttgtggagcttacgcagagtcatgttctttggtttctggtgtaaaatgcaacatagtcacgaactaatcttatttggcaaggatagtactgtctttgaaattcacttacacttggttttatattcactgcttatgttatcattgttttctctctgttgagaggcattttaacttaagtttgggtgttgttgttgtaggcggatatcgaagcttgagatgttgaaacgtcgtgacaaaggaccaccaaagaagggtcatggaaaacgtgctgcgaagcgtaacaagtagaagtaataaccatagctacaaaaaattctctgcactcttagagtcaaactcttctggttgaatcagatagaacttataagtgaaaatttctcctacttaaaactgaattggtttccaatgatgttactatgttgagacatagttgaaagctatttgcttcccttttgactaaaaatgtcaatggcttttgtttctcttctcttactcttttagtctttagagttttttgagattaatattggtgagatgtttgtacttttttgatctagtttttcttatctcgtgatagatttcaaatcctctttgtcagtctttgatgttggattgaaagtgaatttatagatttttaccttttcgaatttaaatattaaggtgactaaatactgaagtggtaggtcggccattctaattctgagtactagttcaactattctgaggtggtaggtcgaccattctaatactgaaatggaacgtgtcacttgttacttgttcttattgagaattgattttttacagggatcctaattaccacggatttacttgaatgagtttagtccatcaaaaagttgaaaaagaaccaaatattaaaagatggttggtgtaacctgtctgcttatataatccacgtgtgaaaaatgcataaaactcaaacgacaacattttgaaaacgatggcaaattcttgaatgattcttctttttatgttccctttttactaaagctaaaaggattcattagcaagtgtttgtgaaagggagagagaaatg

SEQ ID NO: 6187 - DNA, 3000 bp, Unknown
  misc_feature (1)..( 3000): cDNA_ID_3409564_gDNA_ID_1620863_Annot_ID_170398 3000 nt of promoter + ATG
gaatcagctttccgaggaactaagcgagcgcctcggttctgacttggagcagaataagcggattgcaagcacccttacccttcatgctagcgctttcagagtacctacttctcttgttatatatcatttttctctgcgaagactacgacttaaaacatatttttcctgaaaaatattgcagtcaaaggattcagattctcataagaaatttccttcaaaatcatgtcctatgagatatggagtaaccaagatccaagaagatgcctttaacttgttccaagctgccttacgtgagtacatgggatccttcgggatcaaacctcaaggaaataagctagagacatggaggataacaggtctttctgtttcagcgagtaaaattgttgatataccatctgtaagttcttagagccattaaatgtcttctacttacttatctctttcaaacattggttggtttcttcactgatttggtaggagtgatatcttattactgtagggaacaagctcgatcatgagatattttcaaagtcaacctactgttccttctcgttcagcagatggttgtgttcaaggaaatgtagcgatgactgcttcaggtattctagagtatttctgtatattttcagaactttctacttctcttgattctggtacttaatgtcgtgatctaatctgcaactggtgcagctagcgaaggatgttcagaacagaggtcaacagaaactcaagcagcaatgcctgaagtagacaccggtgtaacttatactttgcctaattttgaaaaccaagataaagacattgatctagtctccgaaaaggtatcagctctcatttccctttactctaaagcatattttaggcctttcttagaggtgtgatctagcaaaaaggctaaacatatttaggctcaattacgttctcagtttcaactttcaaaggagcttctttagtaattataactggtaacgaagtgattggttaggccctgtagtgtttgaatgactcaagagcttatatatatgttcttaaattgtgtatccttgaagaaccaattccacacattccttgtcaggatgttgtctcttgtccatcaaacgaagcaacggatgtttctacccaatcagaatcaaacaaaggcacacagacaaagaaaattgggcggaagatgaacaactcgaaagaaaagaatcgggtacgcaatatattgctttgtttggtgcacgaaaagcttctacctttactgagatttgtttgcttgtttgttctcagggaatgccttcaattgtcgatatctttaagaattacaatgcaacacctccatcaaaacaagagactcaagaagattccacagtgtcatcagccagtaaaagagcaaagttaagtagcagcagccataatagtcaagtgaatcaagaggtagaagagagtagagaaacagattggggatataagactgatgaaatcgatcagtcagttttcgatgaattaccggttgagattcaacgagaactcaggagtttcctacgcaccaataagcagtttaacaccggtaaaagcaaaggtgatggttctacttcaagcattgctcattattttccaccattgaatagatagatctaagctcctttgtctctgttgttgactgtatatagtgtagtccttgtctaccttagatttggtcttgtatcttgagtactacagatatattatgcttaaatcctattaaaaatgtcatttttgagcaatagaaaaactaaatatatatatatcgtctttaaaatccatcgagacctcttgttttttatggtatgcacagtgatagaagggtttttttttttttttggtaaacatgtgaagaagtgatagaaggtttatcagaagtttgtatatctttgctcaaccacggaatctcatgaaatattcaaacatcctacctaattgctctagtttctctagtatgagttctttttggatcaattctatatcaaacgattacattttattttcaaaagtcaaatcaatcgaaatgttaattacaacttcgcctaaatatgacttttttcttaactaacttatttttcatcctactttctagaatagaattctctaatattaattgacctaacataagttttttttttggtaaggaggatttttttttttggtaaggttgaactaccataagtttgtttgctatcaaaacatttttacttcattttgagcgtaaaaacggtaaaaaagaaaacacaaaattcgaaaacctgaaaccgtttttggggttaggacaatactgcaggccactgtcatgccatccaatgggtttactttttattattgttcctcctgtgtgtaaaataccctaaataccctcgaacttgctctccaaaattgcaattaatttacctttaaaagcttaattaagagtgtccgatttctcaagaaatctatctaacaccaagattataatttctattagctgcctaaaatttgtctgtgtgcgcaataatccacacgtacacacgcatctactgtattcgatttcgtctctatatataaaaacacaaagacagtcttcttcgtgatctctcattttactgttgtcttaaagcaaacacaagataagaagaaacaaacaatggcgatttctttcatttagatattttcctcgattcttagcttctgggtacttcaaatctctctctctccttcacgggttcttccaaatttccatactttttaccttgtttcctgcgaaaaaaagctatcttttttttatttgtgaccctacattgatatatgactcaactgctgaaaaattgatactttgcctagattccatcatttattgtttcttgggttaatcaatcaccactttttagcaaaaaccctgaaatcgaatcagttttttctctgtaaatttcatttcttttctgcagaaattagcctatttgagctcagtttcgtgtatttgtgcagattttggtgaaaggatttgaa

SEQ ID NO: 6188 - DNA, 3000 bp, Unknown
  misc_feature (1)..( 3000): cDNA_ID_2141421_gDNA_ID_1620863_Annot_ID_170396 3000 nt of promoter + ATG
caatttcatgctaagatagctattgtgctgcgggaaaatgcagaatcgaagaattggccacggctttcttttatttcctttacttttagaaagcagaagataaataaaatagcctagattgaggaaattaccaaatcaatgtggataatggttgacttcttggccatttcagctgtattctggcctgaatctgcccatttaagtccattggaagagccatgaaatcttttacggtacctgttcctccatgttccaataaaatgcagccttgaattctgcagaacaaaaaaaatacatatagagaaagcatcttcagaatcttcattggaacaatactatccatccaattatttgtagttatataaactggcaatgagactcttactttcagctgaaaggacttttaatacaggcgtactatctcaggcagagatcattgtttatttttcagaagaaaccagcagataatgaatctattgtaagttgtaccttaaagtagttttctacaaaattagggtcctcgagagttgaatgacgccttgtagaagatccagcagcagttgcaattgatttgccaccattcttcccatttgcatgaacggacttgttgtctgaagtggaatgaagattagtagtggattgaagttcactactaacttctttttcttctatgtcataattaccaagtccttctgcattcatttcagaagatttcagatcaccagttcctgtttgttctgtcagttctggagtagtgttctcgatataaacgccatcaatttcatcatcgatgtggtcccttgcttcctctgaatcatctgctctaattgaacttccttcttcagcttcactgtatccagtatcaggctgaaaagatgtaaccggcgaagccatctgaggggtcaaatggcttctgggtgcaaaaaaggcagacaactttggctgggtatcatttagttgatctagctggtaaggaacccctgtgatgcgatggcattgaatcagatgattaaatagattgtgtgcaagataaatgaatgcatacgaagttgacagtagacaatgatcaaatccaaacatttatacttatgtctacatgatttaactgaaactaaatcatcttgtatagacttacagcccagaagtctgttggcagagatagagtccactatccatgtaggtttcacaacaggtaatcctctgctgaatgtcctgattggaaacaaaaatccattataagacacgaacttgcaagaaattagcgaagaattttaaagaaacaactaacctaagattcttgactttactatctggaaggttgctgcaaatgatatgtgtaacagaacgcctagaaaagtagttctcaaatcttccaccatacttcatcatgtatcctttcaactcctacacagatctagacactgttaaatcacatataacccaccagcaaaactgcactacaacaaattctaaggtttattcacctgcaacagtttgtacgatataagagttaagccatttcaaatcaggaaagaactagaaaccaacaaaattgaaaatgggtagaaaccaaagcaatagagcttaaacctgatgagaaggaatagtgaacccatccacaaagattgaaaccccttggaaaataagtttctcagaacccgaaacaccacgagaagcagcagaagcctcagtctcaaattggttctgaagtttcctatttttcacttccatgtaactaacatcaaaaacataaaaaaaataatcaacaaccacgatagtataacaatgcttaacgcatcttacttcattctaacttcataaaatttccaaaattcaatctttctcagaacatcacttttcagagggaaagtttcaacttttacatgggaatttcaaaatctaaccactacccaacactaaaatggcagagaatgatagaaagaccttccgaaatcggagaaaggagaagaccggaaagaagaacgagaagaagcagcgccccatgccgcgcctagggttttctgattgctcggattattattcttcttagacttcttgttacttccactgccactattgtttgaagaatttgaacccaagctacgcttcattgttgttgttggggaggaatctcaacgagacggagaagaagaagcattcaacgaaattttccaatttgtaaagtcacaacctgtgagtggtttatatactaaaacacaaacattttcagattagtacttaaacttgtatatacttccaaaaatccccataagttttaatttttacagttataatttaatacctaatttttttattttatttttgtaatcataaacataattgagagaaaattgtttttcttgaatccaaatctttagttagtgaagattatctagccaaatttaatgagcaataaaaatcgacatttcacaataatagtgaaattaataatagtagtgaacaaatagtaatggatgaaaaaaacatgacccatattatttttatgattgttttatataaataaaaataaactcaataaaaattttatgtaatgaataaatattaaatattttatctatactttttgtttatctaccgaacgatcaaccataattcgaaagatgcagcttgatgtccataattttgttaccacactaaatctctaaaaacaacaatgtcaatcttcaacctatttttacaaataatttgacacggcaaatttggagaaatatttagggtttgagatcattacaatgaatttcatgttttgttgtcaaattacttgtgttctaaacgggttattttgcaaagtttagtttctttgagggttcgttttgaaactttctcattttattaatctgtctcgctttttctcctaattattattttcgcgcgctattcatcagtcatcatccccaagaaacccctctttcggtggtaaaaactctctctctctctctctctctccctctgatttctgcggagatttctgaaatagaa

SEQ ID NO: 6189 - DNA, 3000 bp, Unknown
  misc_feature (1)..( 3000): cDNA_ID_3079760_gDNA_ID_1620863_Annot_ID_170395 3000 nt of promoter + ATG
tagagcaactgatagcaaagggaaaagaagtgcattgttgagattctactcttacagttgagagtgacttcaaagcacgaggtccgggaaatgtctttccagaaccatgacttttggggagaaggcgaccttgcacttcttctccactgatccctcttgctatattccataaccaagtactacaagtcgggggaaaaatcagaaaaacgtattaatagacaaacaagcacgagttgcatgtctttaaatttctattatcaagcaaataagcaactattgggaatttagtatgctagaaggtactaatcaaataatgaacaatctacaatagcctacgagtccaggacaacaaaaattctatcttttccaaagctattacccagtatttactccgtaatgttcttgtagcttcgtttcagaaaattgcagcaagtcccctactgtgtcaactcccaagtcagtttgcaagctagtgcccagctttcctcccagttgtttcctgcacgttatgtctaattagagctcaatgattaccagcactaactgaaaattttatgatcctgggacagcgataaaagatgcaatacacaactttggactgtcttacatcttataaaacacagctgtgttgatactgacgcaaatatttaagtgtattccgtagaatgtgacaaatactaaaagttctcctacgaaaatatgtgttgtgatcaatacactattgaaacttacttacattttctttattggcaaggaacttagtaattcctgtacagctgcatatggtacaactgtctgctgcgcaggtttgttcattccactagcaagtttggctagcatctgcttgttgaagttatatgttattactcgccatacaagcgataaaaggaaaacaaaataaaatagcttcttgccttgttatgggctatgccagcagaacaagtaaactcagtctccttaagcacctgtttccggagttctgcaacaatgataattccacaacttaataacttatcacgtcgatcagcatcttctcgacaaatccaattgcggacactctccttgaaatcatctccatcctgaaagtaaaataaataaattcagatcataatattgactatcgactatacttttgttggagactaaaagacaccaaaacagacctctctgttcattccaagaatatgggatttaagaacttcctcatctatcaattccaaactctctggaggtgcatcagcaagcatgctttctgctgcatcagtgaggtcaagatacacttcatcaatcgaagccctctcacattttccgctttttgctagaatcgaaaccacctgcagcgacaacacatagaatgagatgaatttagcaaatgtcattgtttagacaaacacaaacagtataataataacttccacttccatcaacctcagaaccggcactgcgatataaattaaggtcagctttaccacgagccacaggaacttgaaccaattgaatctgaggacaagcagctttagcctcatcacctctcatcgacctgaacattaacccaaaacacaatttttccctatcctcaaaagattgatacaattgggggaaagaagcatttctgtaattacacactaaccgctttacgccacatttacgtgcttcgtaactaacagcaatcaaaccaccaccttgccattcattgtactgtacaactgcactaggcagtcctcgcaactccggttgcttcctctgctccactaatcactcactcataaaaaaatcccttaaccaggtaagtaaaggagacattttgataaaatagaaacaaaaaagcacactttttggtatttggtaatttcccaaatccctaaaacaaacgccaacgagaaaaaaaaagaaaagaaaccgttattaaaattcgattgaaacccaaaattccaacaaagctaaaaagttcaaaaaaagtgttaaaaagctttgctttctctcactaaagcgtctagtggctgaatacaattcgggttagagagagaaggaccttgaacgtagaagcaatccatgtcgacatgagcgataactctagcatccgatgcttccggtctcgctaccggcatttctatttcagaaatctccgcagaaatcagagggagagagagagagagagagagagtttttaccaccgaaagaggggtttcttggggatgatgactgatgaatagcgcgcgaaaataataattaggagaaaaagcgagacagattaataaaatgagaaagtttcaaaacgaaccctcaaagaaactaaactttgcaaaataacccgtttagaacacaagtaatttgacaacaaaacatgaaattcattgtaatgatctcaaaccctaaatatttctccaaatttgccgtgtcaaattatttgtaaaaataggttgaagattgacattgttgtttttagagatttagtgtggtaacaaaattatggacatcaagctgcatctttcgaattatggttgatcgttcggtagataaacaaaaagtatagataaaatatttaatatttattcattacataaaatttttattgagtttatttttatttatataaaacaatcataaaaataatatgggtcatgtttttttcatccattactatttgttcactactattattaatttcactattattgtgaaatgtcgatttttattgctcattaaatttggctagataatcttcactaactaaagatttggattcaagaaaaacaattttctctcaattatgtttatgattacaaaaataaaataaaaaaattaggtattaaattataactgtaaaaattaaaacttatggggatttttggaagtatatacaagtttaagtactaatctgaaaatgtttgtgttttagtatataaaccactcacaggttgtgactttacaaattggaaaatttcgttgaatgcttcttcttctccgtctcgttgagattcctccccaacaacaacaatg

SEQ ID NO: 6190 - DNA, 3000 bp, Unknown
  misc_feature (1)..( 3000): cDNA_ID_2141433_gDNA_ID_1620863_Annot_ID_170390 3000 nt of promoter + ATG
aaggacacttttaaaggcttttcaggttttggatgcgatatacctaatacctaatttctttgacatgattatactataacattaatttacatttgacttaatactattattgtatgtttttgtaaattaaactcaatttttagatatgaaagatgcacacgagattataaaggcaatttgaattgaataatattagtttggtaggtggttcatgtaccaaacaaagcttttgatgcgtgttttgtaatttttggcgtataaaaaatctcttgttaattcttaaaagaaaaaaagaaaaaaaaagaaaaaagaagaaagaattattttgttagtagattactttttcttatttcattatcctacgaaaacgtacaaaaactatatatgtgaggtttgctttcagaaaaaaggaaaagtgtacaaaacgaaatatgacaatcttatataattattttaaaaagattgcataattgatgtctttggttactcaatttctaatgttattttttttttcgtttttttttttatttttttttatttttaaatgtactacacaatttgtgattactccattgggaagctatatgtactacatatattttaccgtcactcttttgaaagctatatgtactatacaaattatgttttaaggaaccatgaattgtttttaagattacttgaagtctacgttttaggtcttgacaacaaacaaagaaaaaaagaaaggaaaaagactaatagtctaatacatttaggtcaaagcttatctcttgatctttcttaagtggaaggttcatattgttatctttgcctttgtttttcttgttttttatttgttcgtagaaagcataatgaatgattcagacagagagaaagtatatttggtgtattagcttttgataagtggagtggaagtcacattccaacgaaagaaaaagtaaactaactattccaatgtttcagaatttggttctctgtaatagttccgagtttatatcataccaaaaaaagaagaagaagagttatagataaactcattagatatgcgattttggaaatacaatagatataaaatgaagaaaaccaaaaccaaaaccatagctatatttttttaagaatatccaatggcaatagctagtatcagaattcttagattaacgcacatattattagcttcacattgcatgatatcattcgttacaattactatttgattaatctaagaatataattaatatctaatggcaagagctaagaattagaattcttagattaacgcctatattatttagcttcacattgcttgttatcacatggtacattagattaattgacgccatggtatactcgtttccagtactattagactaacttctatcatagtttttattttgacttttgtctttgttagttttttttttgtaattgttttatgcaattattttaccaatcaatgtttttttttaccaactctagtctactactatgtttagtagtctatattagtcagtaaagaaataaactatacatattaatttttcaatgttttttgtatgcatttttattgggtaaaaaaatagttcaattggtaaattttgtatgcatttttttcaacaaactaaaaatagtatcattggattttcttaaagatatctaaatgatactattttgatacaatatttttttaacatcatcttgaatttgaataatactaatctgctactaaaaaattagtaaaatattggcaaatcatatatttgttctaaaagtcatttataattgaaaagattcttataatttgatttaaaattactgacaagttacaacatgctatcaaaaactagaaaatttatcgaaattagatttcaaacatatattattgcatttttttcctcattttcaacgtttaagtataaattaattataaacaatgggtgcatttatttgactactactactatttaaaaatataaataggtctcacgagtctaccactcctcgggatcagactaggctacatccattgaaccatagtaaaattaccgtggaaaaaacagtacagctgtaacttcctatataaacacaaagatccatgtgcccataaacatttactactagtctactactatcgtattttttttccttcgtctatgactacactaggttgtttaattttggaatcaaattaattagtagacgacgacttcaaacaataattatttaacatacacgttttgaacaactgtatgcaataattaaaaaatcaacaagaccaatcaaaatcattaacaaatgctgtaaaaaaaaccattaacaaatgtcatttaacatgtttctaagaatatttaatgaaaaaagtatagatcaaagctctagtgctctagatttttcattaaaaatctattaatattttcagttttttttttaaatgttttcagatattttaaaactctattaatatttccagattttttgttaactcttgaacaagtactattaatatttcctttaattacatacgtacatagtaataatagatttctcctataaaatgcttttctttttttacttcagctcctatataaaatactcggataaatagatcctaatcaataaataaatagattcagtttttcttttgatttagtcgtgtacaatgacgatcacaacaaaaaagcccataaatataatttactcaaagtgattaagggtaaaattgtcattatctgatacgtgttttagttgaaaaattgctatcttccaccttcttctatctctctacgaaaataatatttttgagttttgtttttactttttgtttttttttttaaaatttttttttcttcaaaaattcctccattgttattacataaaggaaaaaagaaaggtctctgagattttcaaatcaccatcatcatcatcgttgaagaagacgaagaagataccttcctctttatcttctccgatttctcaaccttcccgtctgcttgtcgtaaagaa

SEQ ID NO: 6191 - DNA, 3000 bp, Unknown
  misc_feature (1)..( 3000): cDNA_ID_1830899_gDNA_ID_1620863_Annot_ID_170389 3000 nt of promoter + ATG
taaaagtaggcaagatttaaacaaagtgattcatcaataatgatatgatatgtgtcattcatttacaaattatgtaacacataatagatattttgtaccctaaaattttgaaatttattgtacataaattttagaaaatctgttggactgtgactagttcttcaacttatagagagttgagtgtgtttataatcacatactgcctctttaaaaaacgttaaccaagtcgaaactcgaatatggtactaccacacatgacaaaatagaaaaaacacttgaatgtttaccaagtagtacttggtccattggcccaaaaaaaatgagaatttgtgctcctttgaaaggagttttcaactgctagacccaacccaaaagaatgtacgattaggcacattttccataattgatgtaatgtaaagaaacacttgaattttaagttttacatataatatttacatttaattcatcttcctcatgaatatgttgttcaattatcaaagaacctacaaagatacagtattataactataagatcaccaaagaagaaaacaatcatttgaataacaaaaacagtaaaacaccatataataaaaccgtgttctagatacaaatgtaaaccatagtatctcaccttgcttatcgattcatctttgtaaaaaaaacaaaaacaaatgtgttcaacttggtttgcaaaaaacaaataacacaagtacacaaccatccatccaataacacaatcacaatatttgtttcccaacatttatgcaaccttatttttagtggacactaaccatagaagaacaaatttcagttgtagtgttacaaagtccattaaaattacgcgttatcaattacaaaaccacatctgttttttttttttttaaacactttaaattttgtgtcagataaaatgaatatatgttatgacagcaatcactttcaaaaggcctatcaaatgggtcccaaatgtataatcctaatgtcaatcacaagtaacctaagttcggcccaaatacctgatggtccactttacaatttttcattaaataaatattaagtaaataaaataacagtaaaaaaaaagagttattcagtctgaagaacattaaattaaggttattaacgtcaaagaaaagataatcattttctctggtggcggcgttttaaaaacatagatttgaaatttttaactttattctataaaactaaaaagctctctgtctagtagtatctaaacgaatttaactaaaaccagctaaaaacaagaagcataaaaataatatcaaagtagaaactaaaggatctaataagtaagacaaaattcgaaattaagatccatggcggatttttgtctcttctctcattggatcgcacttgacacaaatgatggttcgagacataacagcagagaagggtccggtccgaaccgaaacggaggaagaaagcaaaaaggcaagacctttgttgttgggttgttgataaagagagagagagggggacacgtgtagtgaaaagagaggaagagaggtcactctccgttcccggttctgtctcgtgcggtgcgattgttgggtgccatgtcagagtccgttcccctatgagcccggcgaatccgaatcatatgcctttcttttcgctatctctctctctctctctctccctttaacccaaacccatctctcaaagacttgacctttctctctctctatctctaatttatttatcgtttcgcgtgtcgccttctctctttctctcattctctctctctctttcccttcgtatctctctctcgtgaggccgtgccctagaagaagaagaagaagaagcccctttctccgggacttcaatccctaacttccgtcgccggatttctcgtccttgattatcggaggactctttaacaactttattccgatttcagattcccagatttgtaagctgctttctcctttctgggtatttcctctttttgtatttgcttatgtaatttcgatgatttatcttacttggtgaggggttttgatgcttgtgtaatgttaatgctgtttaattaaggactgatttagtgtgattcggtttaattgagtttctttgggggggaattgggtttatctccaatgaagctttatgtttagtgccaatgtgtgttgtttagctcttttctctattgatttgtgtgtgaaattatgtttgtttgagtttcattaccaatggctgtctttacttgaatctcagtgattcatgaattctaccatctgtcgttgattatttcagttatataggatcattgatctatgttttagaactagtgtattattgccttagagaacacctgattttgaagtagaggaatgtagtttgcagtagaggaatgtaattaagtatgaatttaatggaagtattcgtaaggagtgagggaacgaatcgtttattataaaagctgtgttaagattagattacttactaggtttgtgtctcatctttaattaagacttttgattacggatggtgaggcttctaacgttataccaccatttttaggggtgacatcatttagtttcttagcttctatagcttatatgcttggatgacgctgtttgatttcatatcggtttaaaagtgaatgaaattgtggttatggccttatggtttggtacactgtgctttgtccgatgctgcatcattgatttgagttatacttcatttaatcttatcaatttttctgttcagtatttctgagcatgtgtacaatttaagtatttaactacctcactgttgtttcagtgtctcttgatcttagattatggtttacattactcgttttttgtttacaattttagtgtagagacagagttttttgaaggccagtattctttagttacttcggtagctgtgatttacacatgaaggtctatccggttctctatcaagcatatggtatggaaacagaagtagaaaatgaaagattcaggcagtgaaatgattaaaagagattgggtc

SEQ ID NO: 6192 - DNA, 3000 bp, Unknown
  misc_feature (1)..( 3000): cDNA_ID_3079771_gDNA_ID_1620863_Annot_ID_170386 3000 nt of promoter + ATG
tttttgagtatatcgaataatctaatatttcaaaattattttatttgatcatgcgtaaaaataatttatcatattcttacataacattattagctatataaaattataactatttctcatattttctatgaaaatggatactatgttttgaaacaaccattggcctcgttagcattgatagactttccatatacgttactgcattcaacgattggcttatttccatcgaccgtagcaatatcgattttatcaagaacaatgtctttgcaatatgtgactttgctgcaatctatctttataatctcatcgagttttgatgttcctcggagatctgtaaatgtcacgttactgattgccactgctgattcctaaacaaaaaatatataaatttgtttgcaatctagttattcttttataattttaatatttttatttaatagaagaaaatatattaagatgatttacctccacgtctaggcgacccttatcaacataattttggtcgattattatcggatttttggtttctctaaatgtaagactcttaaaaagtatattttttgcgtatccctttccattctaaacaaaaataaataaaaataaatatcacttaaataaactatatcaatattgtcacaatagatccagctttagtattgaaaaactatttaaattttttattaccggccatgtcttaattctagctccattatccgtcctaatgaaagtgcaattagttacttggacattctcaactatagattcttctccatctcttcctacacttcccacactgtattttaattttatagataaagaagaaaatgtaatatatatatatatatagaatatataaaattagtatatgtacaatgctattgatgaatcacacacatatataccttattccatgaccaggtccacaattcatccttgcgatattgatattcatacttccgctgttaatagctacacaatcatctcctggaaagttttataagaaattttaaaattaaataatcttaaaataccatttgagattactttttaattagtgagtgtgcaagagagatatctagctatatataccagttccaataactgtgtcgtatatatcgacatcacttgattctgagatattaattccatcagtgttaggactatcgtggggtgctacgagttttatcttcgttattttaactcttttgcattcgctaatcgatatatggttttttggactgttgaatgaggttattccagttatcatgagatcgttgcatctttgaaaatgcaattgctgtaagaaaaattgaaagaaaaaaagaattcatcatgaactttccaaaatattgacgacgatcaatgtatataaataaataaaatattttcattttagaattcagaatgaattttagtgagaaaaagataaactcacggtaggccgtttagaagcaggcagtccttgctggatatattgaatatgaaaaaaagaggaaatattaaattaacacttttgtttatatataattaaaaatcatatcttttattgtgtatataaatttctttcaagattgccaaaaaataaaattgtttcaccttccaaaaagacgagccacgtccatgaattgttcccgaaccattgactgttaaaccgattatttccttaaaactaacccatctaaataacttatagtccgaccaagctgctttatttataggtgcaacaatctttccgtcaaactgcataaatgaatacatatacacctttattaatcagataatttgcacataaaattgtaaaaagatttataaaaatatcgataattaccttaacttgtacggaaggagatttacaagggccttggaaagtaagaggttgtagtaaaaatgttttgtttgatggaataatgaatgtttttgaattcccaccactaccacacatagcgctccatgctttcacaaaagcctatttattttatcaaaaaatcaaatgtattagaattcttaataactcaaattttgtgacaaaacgtatgactacgttgtaggaaaatgaaaaacctaataatagttatgtatactcaaaggctgtatgatattatattggtttgaatttttttttgaaaacttacaaaattcagatattttcataatataaaacaagataaaattttgcaatataatacctttgaatcatcggtaataccatttccatcggcaccaaattcaagcacatcatagatttggccgtttacaagaatagaatgcagtaaagtcaacaagaacacaccacgtagtatgatttcctacaacatacaaaatcaatgttagaaagaaagaaaacatactaacttttataaaaaactttactaacttcttatcattgtgtgatgatgatcagatgtaactcttaccattgtgtgatgatgatcagatgtaatgtagtgtatatgtatgtgatgttgatcacttaaatatacacatacaaaatcatgggtatatcttattaaaacatgttcatggatatagttttaaactttacatattttatgcctaaaatcattagttattatggatattatttcgcatataagtgatataatctctcttttatataagatttagaaataaataaaatagaatttgaagaaatagtaaacaaatacaagttaaaatagaaatgaaaatacttgaatataagggggtactaagtaaaaaacattttggaaaactcaaaaatagaattaaatttggatattgtgatctcattgcattattaacttatatttaacaaatacgagtaatattctgtgtaactacacagccattgacattgaaaactaaaatgcttttctaattatttggtagtgtgatttgcaatatatatagacagtaacttgaactaaaatctgatatgatgaacttattaatataatgtattaatcggtttgatgtacgataaaatgttttaaattatccactagtagggttgcatacatg

SEQ ID NO: 6193 - DNA, 3000 bp, Unknown; identical to SEQ ID NO: 6184
  misc_feature (1)..( 3000): cDNA_ID_1830914_gDNA_ID_1620863_Annot_ID_170381 3000 nt of promoter + ATG

SEQ ID NO: 6194 - DNA, 3000 bp, Unknown
  misc_feature (1)..( 3000): cDNA_ID_1830903_gDNA_ID_1620863_Annot_ID_51285 3000 nt of promoter + ATG
tatagtttatttaagtgatatttatttttatttatttttgtttagaatggaaagggatacgcaaaaaatatactttttaagagtcttacatttagagaaaccaaaaatccgataataatcgaccaaaattatgttgataagggtcgcctagacgtggaggtaaatcatcttaatatattttcttctattaaataaaaatattaaaattataaaagaataactagattgcaaacaaatttatatattttttgtttaggaatcagcagtggcaatcagtaacgtgacatttacagatctccgaggaacatcaaaactcgatgagattataaagatagattgcagcaaagtcacatattgcaaagacattgttcttgataaaatcgatattgctacggtcgatggaaataagccaatcgttgaatgcagtaacgtatatggaaagtctatcaatgctaacgaggccaatggttgtttcaaaacatagtatccattttcatagaaaatatgagaaatagttataattttatatagctaataatgttatgtaagaatatgataaattatttttacgcatgatcaaataaaataattttgaaatattagattattcgatatactcaaaaatgctaataattaatgagatcatttgaataaccttggtttgattttcatttagtttacatcagttgtttctaatttatgcaaatcaataagaacttgcaatgaattgtttcttcttgtgtttaatcaaattgtatgaattattacttttaggttacatctgctccattacctcgtccatttcttttgttccagacatgatatatagttgcttgaaaaacataccaattagtatactgaagagttgtaccgatagtagtttgaattgtttagtagagcccaatcaatagagtaaacattggcaaagaaccaacccatgagagaatgccaaactgcagctgagtaacgacatgagaagaaaagatgactataagtttgaatacgatctctgttgaaagacgattgttgatagctaaccatgtgaagaatgagtatttgggagttgcataaggaccagacccccttatatatacaattctttccgtggatgtgttgttcgaataatttctaaacttttatcgtatatcaaaccaatctttcaattttataatcatcgatacattattaataaattcatgatatcatattttattttaaattactgtctaaatatttcaaatttactgtttttctttttttctatttatatttttcgtttaggtaattccacggcatattgtttagctagtttttctagtttattgttttctgaggttaattttgtaaactcttcttctccaaattgggaaaccaattatcgagttacctttaatatatgtgtggttaataaaaataatgacactacctaataatcagaaaaacatttacagtagaaaccctataaattaatactcgataaattaataaacacgataaattaataaaatttgttggtcccaagtcgggccaatgtaaaaattaaccaaaatcgataagataataagataataatttttttgaaatccctatgtaaaattatagtcccaataatattataaattaataatcatagatcttaagtatatattttaagactcatttttatatgaaatttttgttcaagttacaattacaactttaaaaaaaatacaactagtatgatctttgttgtactcgcataactatttgcatatttgatccgtcatagttgattttgtaaaatcttttatttgagaaagcattgctaagatttgggtaaagagaaattggattaagcttcatgtttacgttcacgttaatgtcgtagatatacagacacaatatcttgccgaaaaataaatttaaaaagtcaaagaaaaataaaaatctaacataagtatatatgcaaacaacaaaacatatagaaaattaaattaataacatttttaaaaaaatatagtattgtatttacgtaaatatacctataaattaatttttattaacttatacgataaattaataaatattaatttataggataaattaatatcactataaattaataaaattgcatggtcccaacattattaatttatagagtttctactgtagttggctatttagttacacatgatattattactcgtatttgttaaatataagttaataatgcaatgagatcacaatatgcatccaaatttgattctgtctttgatccaaaatggtttttatttatttccccttactcaagaattttcatttctcttttaacttatattttttaattatattttatctatttgactagataaaatccacttaaataggcgggcgtaagaaataaataaaaaatttcttataatatttgaattctaatagtaatccaaacttttttcattttatctaaatattcttaaaccaaattttaatcttatccattccattttgcagtaaaatttaattatttacgtcatgacaacaaactgaattttaattctatatattttatcttaatggataagagcctcaaaaaaattaattctacatattccatcttcttgtttttattttttatgatatttaaattctaaatagtaacccacacagtttttcaatatttagtgttctaatgtttatctcaatttatctattctctctaaatataaataattaatttatataataagatgctatgattcatttctaaatctgatataataagaaagataatatcacttatatgcaaaataatatccattatattaactaatgattttaggcacaaaatatgtagagtttaaaactatatccatgaacctgtttaaaacacatatacctatgattttgtatgtgtatatttaagtgatcaaaatcacatacatatacactacattacatttcgacaaaaaaatacaaaaaaatacactacattacatctgatcatttgatcatcagcaccca

SEQ ID NO: 6195 - DNA, 3000 bp, Unknown; identical to SEQ ID NO: 6191
  misc_feature (1)..( 3000): cDNA_ID_1830899_gDNA_ID_1620863_Annot_ID_51287 3000 nt of promoter + ATG

SEQ ID NO: 6196 - DNA, 3000 bp, Unknown; identical to SEQ ID NO: 6190
  misc_feature (1)..( 3000): cDNA_ID_1830895_gDNA_ID_1620863_Annot_ID_51288 3000 nt of promoter + ATG

SEQ ID NO: 6197 - DNA, 3000 bp, Unknown; identical to SEQ ID NO: 6189
  misc_feature (1)..( 3000): cDNA_ID_1830925_gDNA_ID_1620863_Annot_ID_51293 3000 nt of promoter + ATG

SEQ ID NO: 6198 - DNA, 3000 bp, Unknown; identical to SEQ ID NO: 6187
  misc_feature (1)..( 3000): cDNA_ID_3409564_gDNA_ID_1620863_Annot_ID_51295 3000 nt of promoter + ATG

SEQ ID NO: 6199 - DNA, 1333 bp, Unknown; identical to SEQ ID NO: 6186
  misc_feature (1)..( 1333): cDNA_ID_4256554_gDNA_ID_1620863_Annot_ID_51296 3000 nt of promoter + ATG

SEQ ID NO: 6200 - DNA, 3000 bp, Unknown
  misc_feature (1)..( 3000): cDNA_ID_1830977_gDNA_ID_1620864_Annot_ID_51299 3000 nt of promoter + ATG
agccctgtttctgggtcattgtttcttagaggacgaaatgtaaaaggagagttttttaggttctatattagggatacgctgcttattagctcttttgggatgattactcttcaggacgccttatgtacaagagcaagtcagtattggttcaggaccaccaggttctaaaatcaggtggtttaggtctacgagcaatgagtcacgttacatcaacactgttacatttgatgccaaggagggagctcctacactcgtcatggttcatggttatggtgcttctcaagggtttttcttccgtaattttgatgctcttgccagtcgatttagagtgatcgctattgatcaacttgggtaagcaactttggtatcattcaacttgtcttcctcaactgtattagtcacaatatggccttttggttgcttcaagtgttaaagatttcatgctgttgccatcacttgattttaatgtcttaaaaatcgaagacaggatattgctgcccattttaaactacttgtatacattgtgaatgtataataaggtagttctctctttttcttcgtaggtggggtggttcaagtaggcctgattttacatgtagaagcacagaaggtatttattccctctactgttaatgaatcgtggctaaactttcattggtaccctctcagtctcttaatggcttgtatatgagttgatataccagtaatgaaactgcattgttccttctttaattgtgcagaaactgaggcatggtttatcgactcctttgaggaatggcgtaaagcccagaatctcagtaactttattctattaggacattcttttggaggctatgttgctgctaaatacgcgcttaaggtgaattctcatatttggtataactaaattagtaagtggtgacagtttttgattattatgatatctgacttttcattgggcatatctctggatctttcagcatcctgaacatgttcaacacttaattctggtgggatctgctgggttctcagcagaagcagatgccaaatcagaatggctcactaaatttagagcaacatggaaaggtgcagtcctaaatcatttatgggagtcaaatttcactcctcagaagctggttaggtatgctcatataatcatttcccattcaccaataggttgattagatagatactcatttcgttgatacaaatttatggcactcaattgagcatgggaacacttattcgatgaaattagttggcaggagtaatatattcactatatttctgtaaatgtgctttgtgtgcagaggattaggtccttggggtccaggtcttgtaaatcggtatacaactgcaagatttggtgcacattcggagggaactgggctaacagaagaggaagccaaattgctaaccggtaagtaattgtttctttaagttccatagaagttatggagagtgataatgcaatcgctgatagtgatggttcgttttgcaatgtagattatgtgtaccatactttggctgcaaaggctagtggagagttatgcttgaaatacatcttctcatttggagcatttgctaggaagcccctcttacaaaggtatgtccaccaaaaacattgctgataaagtttctgcatactcacactcgatgactcctcttttgtgtgcagtgcatcagagtggaaagtgccaacaacgtttatctatggaatgaatgattggatgaactatcaaggtgcggtggaagcgaggaaatccatgaaggtcccttgcgaaatcattcgggttccacaggtaaatctctaaacacattcatttgttttctcatttaagaggtgaatatagagaagaagatgacgcttacaagagattttgtttgatcgcagggtggtcattttgtgttcatagacaacccaattggttttcattctgcagtgctttatgcttgccgcaagtttatatctcaagactcctctcatgatcaacaactcctagatggtctacgattggtttagtcatagtatcttgttccttttaccttccaaatttattctatatgtgtatacaagtatatatgaaaaagaacataaaaaagaattactttctttatttgaatattcggttgtgtattggagtttcaagtcctctttccatgtctaaaagttctatttgtaacgttcttgatttcactctaaaacctcttaaagtgtttcaaatgtgatctcattatcgacatccaagttgtaatctttcacaatccacaataatcttttatctcattttttacattttacatatgaaacaaaattatatgtgcttgaaatggggaccactaggtctggtaaattcttattgttttagacttttagtcatcaacataaggttaactttccttgtacagcaaggaaatagtgtatttaccgtagcgggaagggtaaagagaggttacaatttggcatcattcttattttagtagagagacctggacttggtggtcgaaacatttccaatggccatgccgacatgttctctctcagacagctcaatcagctgaaaacttgaggaagaagaaactagagagggttttttgacctgattatttattttggctgactcattcttctcacatcccaacaaattttcgttgatatctgtctctgtcttcatttccgacatggaatttgttcaacatcaattcttttctttagctttatgatccctcacaaataaataatgtccctctctcaatttgcagcaaaccgctgacgatcaaaaggtgagccaagtcttttacatgtcgataattaggtttggtcaatgaaatgtttgaatgtttcattcttggtttctgatacgatgagaagaagtttggtttcaacacatttttttgttgttgttgtgatatctaaattctgatcatttcaatttgatcaaatgatcatcaactgatttaagcatccttaaatgggtttggatttgcacaatagagaaatatagaaagcaaggaaagatg

SEQ ID NO: 6201 - DNA, 3000 bp, Unknown
  misc_feature (1)..( 3000): cDNA_ID_1830973_gDNA_ID_1620864_Annot_ID_51300 3000 nt of promoter + ATG
  misc_feature (320)..(320): n is a, c, g, or t
  misc_feature (338)..(357): n is a, c, g, or t
tttatcctcatcttcatggtacgatgtagtttgagaatgagacaaaaagagaagacgttacctaaggtcgaagtaaaagcttttgaagaggcggtgtaatggagagagtgttaacggcgttagtgtaggaaacgacaacgtgggatgctgctgtctgtgtcagggagaagagagagagagagttaatgaagatttttgtctgtattctgaaacaaggtcgaatgttggagactaaggaaacaaaaataaagctttttgatggcttatgagtctttgaaatagctacaccgctcctctcaccttagtctttaacctaatangggggggggggggggggnnnnnnnnnnnnnnnnnnnncccccccccccccccccttgtctttaacccaataacccccccccccccccccccccccccccaattttctctccctatcctctcatttttgtagtgcgcactgagagagacaaaaaaacaaaaaaagatggagcctttgtttttaaggttttctttatgttgaggacattaggctaagacaaaaagctctgttttctttctttgttggatttttgggtgttgcttgtttgaagaaataaagctttgagtatctccaaggtttccattacagagacaaaaggggtatttgagcttagtttctctgtttatgtgtttgttgtgcttttaaatcggggtttaaggtttatagaagtggtgtttctggtaacagttgagactttttgaggggatattacagagttcaggaaataaaaaatatagaaatttgtgttttgtgtttaatgggaacaagagcagaacgcaaggaagattttgttggtgggtttggatttggtgttgtagaaaattcgcataaagacgttatggtgctacctcatcatcactattatccatcatattcatcaccttcctcttcttctttgtgttactgttctgctggtgttagcgatcccatgttctctgtttctagcaatcaggcttacacttcttctcacagtggtatgttcacacccgccggttctggttctgctgctgtgactgtagcagatccttttttctccttgagctcttcaggtttcaagttctcacctttttgttgacttctgagctatgaaaaaattgaattttgttgttatgtgttggttttgatgtgattttggtggataaaatccaggggaaatgagaagaagtatgaacgaagatgctggtgcagctttcagcgaagctcaatggcatgagcttgagaggcagaggaatatatacaagtacatgatggcttctgttcctgttcctccagagcttctcacaccctttcccaagaaccaccaatcaaacactaacccggatggtaagatctccctagcctctcacttaaacgtttcccatttttgtcaatttgtcttggtttcatgtgttcttgatctcttgttatcatgtttgatgcaactaaaagccattatgatggtattagaatgtcaagttttttaccagtgttacctcttagtggatacatataggagtggaatgtttagtatttatgctgattacaagaatctgccgttgtctatgtggatgacagtaactgtggcagtggcgacaggaggctcattgcagctggggattgcttcaagcgcaagcaataacacggctgatctggagccatggaggtgcaagagaacagatgggaagaaatggaggtgctctagaaacgtgattcctgatcagaaatactgtgagagacacacacacaagagccgtcctcgttcaagaaagcatgtggaatcatctcaccaatcatctcaccacaatgacattcgtacggctaagaatgatactagccagcttgtgagaacttatcctcagttttacggacaacctataagccagatccctgtgctttctactcttccgtctgcctcctctccatatgatcaccacaggtgcttttacttacattcttgtagtcaaagtattcaaatccttcccctttgaaatcatttgaaagactgaaacttagtggttgatatgtgaagaggactgaggtggtttacgaaagaagatgatgccattggaaccttaaacccggagactcaagaagctgtccagctgaaagttggatcaagcagagagctcaaacggggattcgattatgatctgaatttcaggcagaaagagccaatagtagaccagagctttggagcattgcagggtctattaagtctaaaccagacaccacaacataaccaagaaacaagacagtttgttgtagaaggaaagcaagatgaagcgatgggaagctctctgacactctcaatggctggaggaggcatggaggaaacagagggaacaaaccagcatcagtgggttagccatgaaggtccatcatggctctattcaacaacaccaggtggaccattggctgaagcactgtgtctcggtgtctccaacaacccaagttctagtactactactagtagctgcagcagaagctcaagctaaacaaatggcgctcgagttccggtttagtgattagaaaccatcgttgttagtgttttgtttgaaaaactgagaccttttagctttctgttggtgttttacggttggattttgcagtagactgctcttatgaatggaaaattgtttgagacaacgctttactttcactgctggattagtgaaaagtcagaataatcacttttgctaaacatttgactaattatttcaagagttgaccagaccgacaggtccaagtattgccaacgggaagcttctgtgattttgcaggatacgtgacgtcggcaatgacgcgtgcgaagaacaaattaaaaagcatatatccccttaaagcgacttcgcagcaaaacctcttgtctcgtttatctatataaagaaaatttagtagcaaacttctcgattccttgattcgtgggaaaaagaaagtctagatttttgtggattttgattttgtgattccgtgattgtatg

SEQ ID NO: 6202 - DNA, 38 bp, Unknown
  misc_feature (1)..( 38): cDNA_ID_1830941_gDNA_ID_1620864_Annot_ID_170439 3000 nt of promoter + ATG
cttctttttcttctgtacatggttatcgtcgtaaaatg

SEQ ID NO: 6203 - DNA, 3000 bp, Unknown
  misc_feature (1)..( 3000): cDNA_ID_2123373_gDNA_ID_1620864_Annot_ID_170435 3000 nt of promoter + ATG
tagagtgtataccatagtttattaaatatttccactcgttaataaatgaattgtgtgacgaccaaaaaaataatgaattgtgtataggatatataggccatgaaacattcaaatggttggtctccacatgggtgcgcaaactctatctttgtccagccaatcatagtactatatatcttttgctattttctctctttattcttttttttttttttgtaaaattagtacgtattaaattttaagatcttcattcaaaaattgttttccatgttcagttaacgtgtccagaaaaacaatggagttaaatctagatatagttagagtgttgttgttcacacgtatagatacttatttaattattgtttataggtcttattcatgttttattttacgcatcttagaatcctcatttactaaattactaaacatttcacggcaagatgacttgttcaactacattatcagtatcatatactactattaagtaccattttaattatttaataatttccaaatgtgacccttgactcttaagagggggttaagggactctttgattagaaatataagttaaataaacacacacacgagcatatacatagtataaagtatagtccattatgttaacagacaggtgtcaagcaataaagctatttatacaaaactctatttccatccatttcaataatgagcagtgtaaagataatcattcacacaaatccttacattgattggaagtttctctcctttttgtaccattttatgatttataatagaactctaaaagccaagttataaatgtttaaaccctaattatctttcccactatcgacctctgtgggttttatgtgtagatgtacgtaaaagcctacttatcattccttttccgtagccacttataggacatttataacccatttcttagatttcgaactatacaaagattttccgagatttttgaatgataataataataacaaaactcgttgctaaataatgtggtttgaagtaaatttttggatatataagaagataaatcacgaaaaaactcgtggacatgttggcaacagaaacgcatttggagaaactcgcaacgtctcgtatttatttgaaacacacgttccacaaaaacattaccattaactcttgtatcatatatatacatatatattgtcctctctgtgtgtataaaacatgtgtatatatatatatatatatatattaattatagcttgtgatatatacctagcttaaatcaaagccaggatttgatagtatagacctaaaaaatgttgtttactgatcactaatcctcgatatgtaaaatagtaaattcaagaatcaagaatatcgaacacatgacctaacaaactaaagcaaatttaagatgaaagtttttttctgaacatatcatattttttttttttaaatgaacatattcattgcttctagatttttgctgtcaaatatgagtaactttctgtgacgtatgtttttatacagaggtgaaaacagggaatacgccatcaagaagcagggaatcagtaacctactattttaatagaagattcattaccttgttaatcacgaaattaccttcttgctcatgaatcaccaagtcaatgtcaatgtttttagagaaaaaaacacacatacataatcatcaagtcaatgttcttgcaatagttatacctttagtttcccccaaaaaaatattagccaattaaatcaaacaagaaagaagatattacttaaaaatctctacaaaacacatgactacatgagcgagtgaattcgataagggcttgaagaagtggtatgccgattgactattgggttaaaaatagatgaacaattgagattcttagaattagtaccactaaattgactaaaaatcagtaaatgattgaactcatttgagaccaaacatgtgggagatatatatgggaatgaatgctttctaagtggacacgaaaattctatattacagttgagattcgtttgaacaagctctggggaatatacgggggacaagataccaatttattactaaaataaatacgattaaaatagtctaaattgagaaagagaagatccggagatggtggtggtgggttttaaggcatcttgcttatttatatccttaaagggaacagaaattgtcaaaaatacgtcatacgtgacgttttctgtcataattagtaatatactaaacataattaattagaactaaacgataaagtaattagttaattggtatataaatatatggactatggagtataggctttttcatctttatattttgcttattatttattaaaaagtttggcattattcattgccaaatgactacagcaaatatacgattttgatgcagaaatttaaatttattgatcatctaaagatcgcacttagtttactatacgaaaatccatgcactacactactagtgatggtacaaatgtttaggaaataaaattattatgttaaattttgtattgaaataaatatttgggagttataatcttatcatataaaaaaactaaaataaataactaacccaacatatatgtatatctacattataaggatttgaatttatatggtaaacataactatactaacaaaaattattatattacatatcttggttaaattagtaaaatagatttatttagtgtttttcgtttgtcgcttgtcatactttttgagttccttcaatttgagtatcataagatttttaggaaacttaatcttgatgttataagtgatattaatcgcttatttataacatctacttatttatccatcatcgatcattttttaacggttcaaaagatttcacgtatattaatgttcaaaattctaaaaaaaaaacatttaatcaaaacatttttttctaagtatttaagtaatttttccggataatatttgtttggcaacgatcaacatatatcatgactcaaataaattttgatgtttctaattagtaaaatg

SEQ ID NO: 6204 - DNA, 3000 bp, Unknown
  misc_feature (1)..( 3000): cDNA_ID_1830949_gDNA_ID_1620864_Annot_ID_170433 3000 nt of promoter + ATG
ttgaaccgtttgtaaattcagaaaacgttcccaaatcagttatgctgaagaacaaaaggccccgtcaagttagtgaagtatctgcacttggtgaggcacaatctaaccgccactgatttgctagtacatagcttaagtttccttgctaaatctcacatgctgtgtttagatgtaggcataacagcttcaaacctttggagctctgttttgacgcaaccccatgagtttgcacaatcgtgcatcacctcacagtggagttctcctcagcaatgtcatcgtgatgcaaatgaggatgctaagaaatctgactggctaaataactcttactctgtgtcaaatgtagcaaaagactcaacactgaacgaccaaatggtttccccagtcgagcagaagaagcctgagacaaccgctaattatagattatttggaattgatctgatgagttcctccctagcggttcctgaggagaaaactgcacccatgcgaccaatcaacatatccaaaccgactatggacagccactcagacccaaaatcagagatttcaaaagtatcagaagagaaaaagcaggaacctgcggagggatcaccaaaagaggtccaaagcaagcaaagcagttctacaagaagccgtaccaaggtatatatatgcctacatggctaccgtgaagtgtatatacattgtgtaatctgtgagttgcaaaacagatacacattatgtataatgtttgcgggactgaacaggatcctgaattctttatcgctgaacaggtgcagatgcaaggcgtacctgtgggcagggctgtggatttaaatgcgctaaaggggtacaacgagctcatagatgacattgagaagctgtttgacataaaaggggaactgcggagtcgcaatcaatgggaaatagtgttcacagacgatgagggagatatgatgcttgtcggtgatgacccatggccgtaagtaacttactctttatctcttagtcaatagaatcactacacaaaactcatatctgttgacttaatttggtggtgcagtgagttctgcaacatggtgaagagaatattcatatggtcgaaagaggaagtgaagaaaatgacgcctgggaaccaactccggatgctgttaagggaagttgaaacaacactaacaacaacttccaaaacagataatcattccaactaatttttattctattctctatcagtcttcgtctccttcttatttgctttgtctttcggaattatcttgtttgtgtctgtgttttgttgcgcatggcttaaacaagaaactacatcccctgaggcaaaaaaaatggctcgtttttttggagcctcttatggagaaagggggtttatggggagagggttttctacttttaaaataggcttttggaagtttctttttcttctaggaacttgtgtgtaagagaaacaaatatgtaacgaacagaaagaaaaaaaaaaaaaaaaaaaaaaaaagagaatgagatttgtgaataacttgatgaaggacttttgggactctgggattataagagattaaagagggattatacctcatggctctcgtgttttctgattctttttcgtagttgtgttttctttgattttgtttttcatctaagttttaatgtatatataaaatttcaaacatggctttcttgtatttgtcaaatccccaaaggtacatatattatcaatatttaaaatgttaaataaacaaaactctagacctaaaactatttcaggttttcccactaaccttaacaatgattcaagattattgatgttttgtctgtgaggacatgtatgtggccgctcttgccaccatattcacaaacgtaattgtatgaagtatggaccaccttttcgctactacttctggatccccttatgtttgtaaagtgtatcattcccttatatcactattcactcacatgcattaaaatatcgaatgctgcaaaggaaaaaagagttatttttctctttagatatcatttgggttatgcatattacttggattagtccaatatgtcgtgtacaaccattctcgctgcaaaacaactacaatatgtcaacatagtataacacatgctgatctggtgagattataaattgtgaagtttgtctttataatatgtacatatagtatttctttgattatgacaagtgtgtagaaaatgttaggatattattctaaatcccacatacgaaagattagataatgattatccaacatataagttcaatctaattttaattagtgtatcatttggggaaaaaaaatcgtgcatatctggttgcttggtccaaatatctatattttctgacggtccaatatttatatacgtaccacataaatacacctatacgaatctctttactaatacgtcgataccgttcatagttaatgacgttatttactgccgagataatgaagtgatgatgtaggttatttattgccgagatttgtgaaggcagtggatctcacaatccctatcttttcctcttcttttttttctttttttctttccatatatagagaagtttaaatttaattgtaccattaaaagctcaccaaataccaacttatacatacagtcagtatctatatcaggaatttatatgtatgtgtgtataccgaataatagtaaactcattttactaataaataactttgttttattatatatttgataaacaacttgttataaattattttaatatgttaaatttgaacttattaaattttaagtaatattctagtgacggaagtatacattgtatttaaattgcatagatgtaattacttattttaaaaacttatagcactattcagtgatttacttttccaacctaaaatcgaggtgtagaatgtctactctggaaaaaaaaatcgcctataaaatatcaatatcaatggtgagttttgttctatgtaccaagtttctctaaaacaatttgtctttctattaaaaataaagagtaccacgatg

SEQ ID NO: 6205 - DNA, 3000 bp, Unknown
  misc_feature (1)..( 3000): cDNA_ID_3079790_gDNA_ID_1620864_Annot_ID_170432 3000 nt of promoter + ATG
cctaactaatatatataagtgacatacacaaatccactaacgatagggtttttttttggtaaaacactaacgataggttatcgatagaaaatccataaaagttaatatggtaccagtgatatagaagtgacatgatctagatccgctcatttttaattgattttgagttgaaagtttatgaacctcaaaaccaaacaagtttcattctaggttaacttattagaattagtttttttttgttcgttccatgtaagtgaactaagaacaattagtttctctaatcttagataattatagctaatttttagaaacaaacttgatttcttgattgatacgaaacatagaaaatatcttctttcataattgatagtctaaagtaagatcattggttgtaaatcataatatatttgtttcctagtttgttataccgtataacttcattttatcattcaaaactatgcagattggattcagatatgggtctttagtagaagactactacacagggtataggctccattgtgaaggatggagatcagttttttgcagacccaaaagagcagcattttgcggagattccccaaaaagtctaattgatgtagtgagccaacaaaagagatgggccattgggcttcttgaagttgccatctcaaggtatagccccattacctatggtgtcaaatcaatgggtctagtaacgggagtaggctattgtcaatacgcatgttgggccttttggtcacttcctcttatcgtctatggattcttgccccaacttgctctcctttatcaatctagcgtctttcccaagtcatcagatccatggttttggctttacatcgttttgttcctcggtgcatatgggcaagatctactcgactttgtattagaaggaggaacttatggcggatggtggaacgatcaaagaatgtggtcgataagaggattctcttcacacctatttggcttcatagagttcactcttaaaaccctaaacctctccacgcatggattcaacgtcacaagcaaagccaacgatgacgaagaacaaagcaagaggtatgagaaagagatttttgagttcggcccctcttcgtccatgttcttgcccttgactacggttgccatcgttaacctccttgcttttgtctgggggctttatggtcttttcgcttggggagaaggactcgtccttgagctgatgctggcgagtttcgcggtggtgaactgcttgccgatctatgaggctatggtgttgaggatagacgatggaaaattaccaaaaagggtttgtttcgtagctggaatcctcacatttgtgctgattgtgtcaggttacgtcttcctcaagtaactggacccattatggttggttctgtcgtttcagttaaactaatattacatctgtattgtggtaattaggagagaataatgtgatgaatccatttctcacctcattttagaacatacatttcggtatattgcgtctgtattgtagtaattaggagagaataatgtgttgaatccatttctcacctcattttagaacatacatttcggtttattgtataagcttaaattagtaattgaaaacgacatacactatctattgatattttcactgattaatacgactgtattttttatatttcttaatggatgttttgagcacaatttagtaaatatgggccgtagagatatgctacttcgtcaaaatgttaaaacgtctttgagatattttgagatataatagacgataagacaacatttatcttgcttacttcgatctattgtatttatttgtatttataattgaagtttcaccgtacaaatactttatatttatcttaggtttataacaaattaattattccctaaagttttaaaataaaatatttccctagcgagctagtgggatattaattatcatactcaaagtagtcgattatagaaactaaatgattaaaattttacgtagtctggctctgtttttatctcaaatttctttgcaaataaaaacacaataaatcatatttacttgggagaaacttctatcacatattaatatttatcaagaaaacttcaatcatatttttcgtaaagtgttacttacctttatacaaatattccgtgtattcctcggtttacgattctttatgtctgattgtgtggaaaagtacaatcgatatttttgcaagaagttaagaagttggcacttggcagatgcgtgacgtgaatgaatcgtcaaggcagtgactctccaagccccagtcttcatccatttgacattttcgcatctttttcaagctagagaattttaacttaagttctccattgaaaatttcaaactatataaataaaactccacatatctcactaaaatctaacacgtgacaaaaatttaattacttaagtgtagtatatgttagtaattttctcaactcgcgagcaaacttcagttaacttgattttgataaaataaataacacatcaattatctgaattctttttaaaagaaacaaatatttcatagaattagtttttttttcattttagaattctaattgaatattacagaataaaaacttttacttactaccacacaataatagactttaaagttagttattgtaagtagaatgtattattttgaagttaaaatcgtgtatttatcgtgatgtaaaaatttaccgttctttcttataaactagtcaggctattctggtgttgaactacttcacttcacacgtgtcttttggagaagtagtttcattaataaacacttatctttaattttggcttcaacttttcaaaggcacataatgatcacactgtactgtatcatcttatctcataaatgagaaactcgaccataagaactgtctatagtgtgtatattcagaaaagttatcaatagttcaatactaagaaaccggcctatatatatatatttgtggtcactaatttctccaaaaaccagttgccttccgtaaaaagatg

SEQ ID NO: 6206 - DNA, 3000 bp, Unknown
  misc_feature (1)..( 3000): cDNA_ID_1395585_gDNA_ID_1620864_Annot_ID_170408 3000 nt of promoter + ATG
tgagaaacttagagaggagactctcagagacaggagtcatcttgaggaacttctttctatatgcgagagtacttgagcaaaacttatttcttctttctttcttcataatttagttattaccaacaactaggtatatattgaatttgtggatttttttgcagctcagaggaagattggagagacatctttaaatgagattagctccagatctcatcagattctccgactggtactcactttcatatcttttttttttccccctttttgcattcttgatgaaagtttttgttcatgcagacaattgaaagctcgagtcaacaattttctccagagagctcagcgactcttgcagcatcagtgtgctttgttgatctagctggaagtgaacgtgcttctcagacattatctgctggttcaagactcaaagaaggttgtcacattaatcggagtttacttactctcggtactgtcatccggaaactaaggtcacttttgcaccaatttagtaattctttgctaggtctcatatcacttcatctttgagctgatatgagtcttttattgaaattactacagcaaagggaaaaatggacatataccatatagagactcaaagctaactcgtatacttcagaactcattgggtggaaacgcaagaacggctatcatctgtacaatgagccctgcacgtagtcatctcgaacaatcaagaaacactcttctctttgcaacttgtgctaaagaggtgaccacaaatgctcaagtcaatttggttgtgtctgagaaagctttggtgaagcaactgcagcgggaactggcgagaatggagaatgagttgaagaatcttggacctgcttctgcttcttcaacctctgatttctacgcgttaatgctcaaacagaaagaagagttgattgcaaagatggaggaacaaatccatgaacttaaatggcaaagagatgtagctcaatctcgggtcgagaatttgcttaaatcaacagcggaagagcggtcatcttcaagttcaatggatagcagaagaagaagaataagctacgattcaacggattttgatgagcctcgaatgctaaataacttggggaagagtaacttgtactctcctgatgaggatggtttcctgctggatgatactacccctcaatttccggggcataacctacatgataaatgggaggagatggctcaaagcaccacccaagaaccagaagatgcttgcaaagaagttagatgcattgaagtaaacagtggagaagcagaaagagttcaaatccaagactcactagatgacattgttgaaaagaaggaatatgaacaaaactatgagtcccaaaaggatgatgctgattcatctataaaaaacatagatatggagttgagtttatatactaaacctgaagctgaagatggggtaagtgtaaagaaattaatagaagacgtccaagagactgagcaatctgtggagaaacaaaagcaatctccaaagaaagaagaaatggaacagtatttgtctagagatatgtcagagcaagtaacgaagtcactccctgaagaagagcaatgtgtacaagaatatggagcctatgataaacttgaagctcaagatgtgctaactataaacaagttagaagaatcccaacagactgagcaatctgtggagaaggaagacacaaaaaagaatttgtcttcaaagaaagaagacttaaaacagaatttatctatggatcagtcagagcaattatataaatcacctccagaggatgagaaatgtgtagaggtgtatgaagggtctgataaagacgataatacatatgaggctctgaagaaaaaggtcaaggaaatgcagaagacaattgagtactttatgagtattcaatcagcagaagagaaacaatctccttcgtttaatattatagatgatactttgagtccaggagagtatttcaagatgagaagaagccgaagttgcagagaaaatctcttgtttacaaaggcggcggctgctgctgctagtagaggtttcatattcgagaccactaacacatcctttgattcagatatcactgtctccatggacgcacagagcatcaaagattctgatacagagactagcagtagcagcttccatgaatttatggcaggacttagagaaagaacaatgcagcaccattccacgcatagcgacgatactgatacaaagacgatgaagccagaaaacacagatgatggcggcgagaaaacagagtttgagagacaacaaagccaaataattgagctttggcaagtatgtaatgtacctttggttcacagaacatactttttcttgctcttcaaaggcgatccatccgactttgtttacatggaagtcgaactccgaagactatcttttctaaaagactcgaccgagacatcgaggaaacaaactgccaaagcagtaacacgcgagagggaatggttagctaagcaaataccaaacaagtttggaaagaaggaaaaagaagaagtttacaagaaatggggtgttgaattgagctcaaaacggagaagcctgcaagtaacacacaaactatggaacaacaacaccaaagacatagagcattgcaaagagagtgcttctctaatagctacattggttggattcgttgactcaactctaacaccaaaggaaatgtttggcctcagcttaacacctacaacattcaacatcaaaccctcctctggctggaaattttcaaactctttctctcgtattagcttcactggatgataaataatgaaagcagaaatattcagtctttgtgtgtattgtgaaagatgagtatgtattgattggaatcaaactcaatgaacagagccaaaaaaaaaaagtcgtatatataaagaaaaaaaactgactttgataaaagagaaaactttatagtttatagagtgtagattagataaagctctgaccttggaacgattttgccggagcttgcaatg

SEQ ID NO: 6207 - DNA, 3000 bp, Unknown
  misc_feature (1)..( 3000): cDNA_ID_1830969_gDNA_ID_1620864_Annot_ID_51301 3000 nt of promoter + ATG
  misc_feature (2520)..(2520): n is a, c, g, or t
  misc_feature (2538)..(2557): n is a, c, g, or t
tgttcctctaaaccttgctaatccaattatttcttatctaactcgtttatttctttgtttcatgacacgcaattatatctattttcagaccaacgtagaggttttaataaacaatatatcaccaattcttttttttgtttgtttgttacattgccgtttctggacgtataaggttttctaatggcgatatggttgattcgtccttatatgtgaaaaattctattcactcgtaccaccaaggcaacaactaatataccattatactagttatgacaaatatatatcaagacttcctaacattccggtgttaaataaataatcgacacatctaactgtaaaacggtacggatcacgtaggttaagaaaatgacatacatgatctttggggtatgatgtctttctatcaaattaaatttgtttctttcactcccgagtgtattttaattttgacgcaatactatttctttgttgtataaatttggatatttggttatcgtactgcgtggcagtccatgcaatttcatatatatatttagaatttttatttcccttggatttgcctatatatttctatctttcgtttagtccataaaatttactacatatactacaatacaaatgttgaatgttttaaccagaaaaagaagaagaagatcaatttccattttaaaaagttcataatttttgttctctctcatgatcatactttggcggggaatttaaaacatgtgttaagttattgattactcaataacagaaatatggatttttagtagtgggccattattgagctattatagcggcccatgcgaggctgaaggtgtcgtgatcggcaagtcaagaaaccctagccagagattgtacagataccaaacgtccgtcgcatctcagatcatcgacgatcttatgtcactagacactagtctttttgtaatacagatcagagtcgctcgtgtttgttttcctctcctattgtgcccaaattttattttgttgttacttgcagttttgcattcaacttgtttgattaatgtctctgagagaccaagttcacgttaagacgtgtctttttactcagaagacaatggaatatgaagagacaaaatgtctatcattttttgaagtgatatttctcatacaagagtgcatttaacaagtaagattttgtcagcaactaagatttgtttgagaaatgcacaaagtttgaaattctagtcattccaacaatgaggatgcttcttgggattccttacgtagacaagtcggttctttccaactctgttcttgagaggtgactcttatctctgaatctatcattgcttgtacgcacatttttacttctttctgatcaggttaatgctcacatttacagaggcaagcaggataaaagcaaactattgttagtcgacaaatgccattatgagcttgatgttgaaggtatgttccattcttttatcaccataattgaaatttgtgtcattttgtagaccgtacaaaggaatatagatggtttaattcgactatgtttgtgatatgtagacaaatgctcacatatattatcatgagtttatatgagcattgtgtctcttattggagtggttcctgatttccaaaaagttggggttcactttggagtctttttaaaatgtagtcctcttttggtaaaacacacatgttttattaaaaactatataaccaccgattaagttaggcctactatatatcacttactaacaatgaacttaatagtccatatgttttgacatttgaacctaggtgagtggtcctataattaggggtatacgacaacaaagacaagtagacaactatagttacccaattgataaaaggatataagtagttttattctttaaattatctttttgccgcaatatttatttccattcttcccccaataattatcatcatgtgatctataagagaaggaatttaactaaatcagaagaaaatagaggattaaaagtagtggggtcgaaaagagaaagaagaaaagaaatggggggtgaaaaagatagtaaaatctaagaaagtgacccgaagagagtaaattagttagagcatcacatctctctctggtccccaatgagaagaagctctcacggaaacctcatatgggtcctatttaccaacacacatctccaagcaccctcctttaaaacgccgttacacttaacggagctttatcctcatcttcatggtacgatgtagtttgagaatgagacaaaaagagaagacgttacctaaggtcgaagtaaaagcttttgaagaggcggtgtaatggagagagtgttaacggcgttagtgtaggaaacgacaacgtgggatgctgctgtctgtgtcagggagaagagagagagagagttaatgaagatttttgtctgtattctgaaacaaggtcgaatgttggagactaaggaaacaaaaataaagctttttgatggcttatgagtctttgaaatagctacaccgctcctctcaccttagtctttaacctaatangggggggggggggggggnnnnnnnnnnnnnnnnnnnncccccccccccccccccttgtctttaacccaataacccccccccccccccccccccccccccaattttctctccctatcctctcatttttgtagtgcgcactgagagagacaaaaaaacaaaaaaagatggagcctttgtttttaaggttttctttatgttgaggacattaggctaagacaaaaagctctgttttctttctttgttggatttttgggtgttgcttgtttgaagaaataaagctttgagtatctccaaggtttccattacagagacaaaaggggtatttgagcttagtttctctgtttatgtgtttgttgtgcttttaaatcggggtttaaggtttatagaagtggtgtttctggtaacagttgagactttttgaggggatattacagagttcaggaaataaaaaatatagaaatttgtgttttgtgtttaatg

SEQ ID NO: 6208 - DNA, 3000 bp, Unknown
  misc_feature (1)..( 3000): cDNA_ID_1808803_gDNA_ID_1620864_Annot_ID_51302 3000 nt of promoter + ATG
ttattgggggaagaatggaaataaatattgcggcaaaaagataatttaaagaataaaactacttatatccttttatcaattgggtaactatagttgtctacttgtctttgttgtcgtatacccctaattataggaccactcacctaggttcaaatgtcaaaacatatggactattaagttcattgttagtaagtgatatatagtaggcctaacttaatcggtggttatatagtttttaataaaacatgtgtgttttaccaaaagaggactacattttaaaaagactccaaagtgaaccccaactttttggaaatcaggaaccactccaataagagacacaatgctcatataaactcatgataatatatgtgagcatttgtctacatatcacaaacatagtcgaattaaaccatctatattcctttgtacggtctacaaaatgacacaaatttcaattatggtgataaaagaatggaacataccttcaacatcaagctcataatggcatttgtcgactaacaatagtttgcttttatcctgcttgcctctgtaaatgtgagcattaacctgatcagaaagaagtaaaaatgtgcgtacaagcaatgatagattcagagataagagtcacctctcaagaacagagttggaaagaaccgacttgtctacgtaaggaatcccaagaagcatcctcattgttggaatgactagaatttcaaactttgtgcatttctcaaacaaatcttagttgctgacaaaatcttacttgttaaatgcactcttgtatgagaaatatcacttcaaaaaatgatagacattttgtctcttcatattccattgtcttctgagtaaaaagacacgtcttaacgtgaacttggtctctcagagacattaatcaaacaagttgaatgcaaaactgcaagtaacaacaaaataaaatttgggcacaataggagaggaaaacaaacacgagcgactctgatctgtattacaaaaagactagtgtctagtgacataagatcgtcgatgatctgagatgcgacggacgtttggtatctgtacaatctctggctagggtttcttgacttgccgatcacgacaccttcagcctcgcatgggccgctataatagctcaataatggcccactactaaaaatccatatttctgttattgagtaatcaataacttaacacatgttttaaattccccgccaaagtatgatcatgagagagaacaaaaattatgaactttttaaaatggaaattgatcttcttcttctttttctggttaaaacattcaacatttgtattgtagtatatgtagtaaattttatggactaaacgaaagatagaaatatataggcaaatccaagggaaataaaaattctaaatatatatatgaaattgcatggactgccacgcagtacgataaccaaatatccaaatttatacaacaaagaaatagtattgcgtcaaaattaaaatacactcgggagtgaaagaaacaaatttaatttgatagaaagacatcataccccaaagatcatgtatgtcattttcttaacctacgtgatccgtaccgttttacagttagatgtgtcgattatttatttaacaccggaatgttaggaagtcttgatatatatttgtcataactagtataatggtatattagttgttgccttggtggtacgagtgaatagaatttttcacatataaggacgaatcaaccatatcgccattagaaaaccttatacgtccagaaacggcaatgtaacaaacaaacaaaaaaaagaattggtgatatattgtttattaaaacctctacgttggtctgaaaatagatataattgcgtgtcatgaaacaaagaaataaacgagttagataagaaataattggattagcaaggtttagaggaacaagaaatgattattcaaatggaaaagtaaatacttttgtaagaaaataaaagcttattgaaatgaagaattgtgcatgatcatttgataaagccaagtcatggactgattcttctgtttcacaggacggttcaaccaccatgcacctctttttctttgggcgtttaatgacacaaaccacatttatctttttatatccttttttgttttgaatttatttggttacaactgttatttacctcttttatcttccaatctttctcaatttctaagttttttccatactaagtattttgttcatctgaagaatctggcacctttgtacattcaagaaagttttaaatgttttcactgcaagacaaacaatactgtgtgtacaattatgatagaaaacatttatatatggagaataatatagtcatgtgatacaattatgtaccacatctatacatatagaagaaacaaaaaccaccaatttgtcactcccaacttcattcacaactcacaagttaagaaaatacacatagtttctcttacacgcattactatggaaccttctgaattcgtttccagcaaaagttattttcttatttcaaaaataagttccatttttttatgtataaaaaataaagttaattgcaataaattcgccatcttcctatcaacatatatagatttttcgacaaattcatataaggagagtctaaaattaactcacagccacatgttatttagccaatgtttttaataccagaccggtcaaaccggtggatccgtgaccttatatagtaattctagagtctttaacaaaatctcaacttatgacatcatattatatattaatcacgtatcatctatagactatatacattcatacgactctctgattcttcgtttctctccataatatctcctagtctcaactctcaaatagagagagaaaaacagaaagacagagagaggttctatatattatagataaagtacattacacaattgtacaagtggaaaaatcatcacggatctctcttcaaatatataaagaagatttgtatatcaaactctctaagcttttgttgagcc

SEQ ID NO: 6209 - DNA, 3000 bp, Unknown
  misc_feature (1)..( 3000): cDNA_ID_1815462_gDNA_ID_1620864_Annot_ID_51303 3000 nt of promoter + ATG
ctaagattctcaagaaatcaggatttgttgcgaaaccattcacaagacaagagaacacaatgattcagacatctgctgttgcttgttacggcatcgctgtcggaggttaatttaagaacataaatttgcttttatttatttcttaatagtttattttcttgcgaaacaagcaaagattcagtgaaaggatctgtgaaacagttccaaacatactaaaatatattaactttttgaaaaacttttgggttagttgagtcacaaaaaagggttgatattgcttttgcttttgggtatgatataaaatctaagttgtaaaattttgatttaaaatatttgagtatttgtttttctttttcaggtgggtttgcttcatatcttctggggttaaaccataagacatatgtgttgtctggtgtgaacttggaaggtaactctccaaagagtgtgaaagaacctggccttggttggatgactgcttatctctttgttgtctgtttcatcggtctttttgtcctaatccctctccgaaaggttatgattgttgaccttaaattaacatatccgagtggtttagctactgcggttctcatcaatggcttccacacacaaggagatgcacaggccaagtaagttcattaacctattttacaaaaagtgatattgttacataagtttcctaatctttaattggaatcgatttgcaggaaacaagtgcgtggtttcatgaaatacttctcatttagtttcttgtggggtttcttccagtggtttttctctggtattgaagattgtggctttgctcaattcccaacctttggtttgaaagcttggaaacaaacgtaagcattaattatacaaaaacaaaacaaaaatatttcagtgaaacgagttcttgaatcatataataactaaaaacttttttttggtaggttcttctttgatttcagcatgacatttgtgggagcaggaatgatttgttcacatttggttaacctttctttgcttttaggagctatcctctcttatggcttaatgtggcctcttcttgataaacttaagggctcttggttccctgataatctcgacgaacacaacatgaagagcatttacggctacaaagtcttcttatccgtagctctaatcctcggcgacggtctttacactttcgttaagatcctctttgtgaccattgccaatgtcaacgcaagattgaagaacaaacctaatgatctagatgacgtaggtcacaagaaacaacggaaagatctcaaggaagatgagaatttcctcagagataaaatcccaatgtggttcgcagtttccggatatcttacattcgctgcggtctcaaccgtcgtggttcctctgatatttcctcagctcaaatggtattacgttattgtagcttacattttcgcgccttctctggccttctgtaacgcttatggagctggacttacagacattaacatggcttataactacggcaaaattggtctttttgtcatcgcggctgtgacgggaagagagaacggagttgtagccggactcgccggttgtggactgatcaaatccgttgtttcggtttcttgtattttgatgcaagatttcaagacggctcattacacgatgacgtcacctaaggctatgtttgctagccaaatgattggaacggtcgttggatgcatcgtgacgccgttaagtttctttttgttctacaaagcgttcgacattggaaaccctaacggagaattcaaggctccttacgctttgatttacagaaatatggcgattcttggggtgcaaggcttctctgctctgcctcttcactgtctccaaatgtgttacgggtttttcgggtttgctgttttggtcaacgtcgtcagagatcttactccggcgaagattggaagattcatgccacttccgacggcgatggctgttccgtttcttgtcggagcttatttcgcaatcgacatgtgtgttgggactttgattgtgtttgtttgggagaagatgaatcggaagaaagcagagtttatggttccggcggtggcttcagggctaatctgtggcgaagggctttggactttacctgcggcggtgcttgccctcgccggagtaaaacctccgatatgtatgaagttcttagcttcataggatcagtcaaagagataagaagacttgtgaagttagagtacttagaagacgtcaatgatattaaaatcatcctattcttagaataacaggtagacttctgaacaagaacatctcttcttctaggaattaagactaaaatctacttacatccggatgattcatgctctgttttttggtttggtataatttgtcaacacatctagatctgttccatttccggttatcttctattgggttatctctgaaactgttatgggctcggcccataaatttaaaccttggtgtaacaaaaagtaataaaatcagctatttaatcctatatatttgtttctttttttattatataggaagaaatccttgcctttagattgcatacactagaattttagtattttcaaaaaagaacactatatttcaaataaaaatggtatatatgataagttttgttaagatattatattcaataaattgcctaattcaataagcatattttagtaaaaaatcgcaaaatattcatcatctactaaacaggtcaagatgtatttgactatcttaagaaagaaatattaattcactttgaccaaataaatggacaattaggtaaccaaacaaaaaccacatgaaagtaacaagacagagaattaggcaaaccaaataaataactcacacaacccaccgctcaaccacctaccccttgtaatatatctctccccttcttctttttatttcattatcttccaaaatcctcaccacaaaacattatataatttcctcttcatatttcaagaaaactttaatctttttttgtgtgtagaattctatatttctggtaactaaatg

SEQ ID NO: 6210 - DNA, 3000 bp, Unknown
  misc_feature (1)..( 3000): cDNA_ID_1830965_gDNA_ID_1620864_Annot_ID_51304 3000 nt of
tggttttgggttctcttttcaactcacacttcttcaaaagcgaatttgcttgtaacatgttaatataaaattattattaaatctataggattgtccttaatgggccggccttttacgatataaaatttggttcaaataaatgtcgaatacgtcttttcgttcagcccatgaattgactaaacaaaggggattagaatccaaacaatcaaatttcttctatagtttagtttagaacaagaccatgaccatgaccaatattatatatatcgattattcgtttttatatgttctatatgcttaaaccaaacttaaaatgtaaaagaaaaacactgtgaatcattttcagagttatgatgtattttgttaggaaaccaaacccctgttaaaaactaatactgaaagtctgaaactatgacgatattcactttcaattggattttttttttctatttgatttaaggaagtacttttgaacccgaaaactaactgaaacttaaccacacacaaaaaaaaaggatttgtatcttatattgaacactacagaatttcgacattagattttttatgattttggttttcataagagtttaaaaatgtgatcatctgttttggacactgcaaatagagattttaaaacaataaaccaagtagatataatagtccgtatagtttgtccttatatataacattataggtgtaaaacacggactacataaaagtggacacataaatgcaaaattgttactacgaaactttacactgcatgtgactgatattttacgctcattacatttggatcattcgtagtgataaattaattcagggtaacatggcaagtaagtgagaacgtggtcattaatttcccccaactagttactaaaataactaaggtaaccttcgaacaaaaacaaaactttggtaaaccaaaatacaaaaacttaggtaacatgacaatgaaagtaaagaatatatagtacttgttgataagaatatagtactcgttaataaaacgctgtcggtagaagcgggtttggacgcaatcgcaggaattagatggaaaacaaacaaaaaagaaaaagaaatagagttttagcaaagagtcaaaaagagtcattttcatatatagtttggggtcaatgtagggctataggaggataagttgtgactttaagagtgaatgagattctttctcaaatgaatggtgtcaaggactagtattcattttttcttctttcgtctccatccacctatcaatatccccaatcttttttacatttttgaaatgttttttgttttgttttgttttcctcaattttagataataagtagacgaatctaatccctactaggcctaatccctatataatacacgcattttatgtcatattagaaagcaacatgttagttgaaaagtttaaagtgttttggtttcagctttgtacccactattagattttaattactaatttttttttgtaactgatttatcgtttttagtattgatagatgttaggaactttatatcaaaaataaggtgagacctaatgtataaaagagaagcaatcaacacattaccaattcagtttaaatagaaaatttgctaaacttaaccccgcatgcccttgcgtaaagcattcaaagcacaagtgaaaataaacccacacttcagaagttatatgttagtcaattgtctaattttgattgctattttccttttctctttctttattttcttcatcgccgatgtggtgttccacaatctattattcacgtttacttaggttttgttaatatatattttcttcccctcctacgtgttttcaacatattttcattaattttctctattttcattctgggaattagatctttaacatcgtcactactcatcactgtcaccagtaatgagaaaaaatacaaaataaaaccacacactctcaaagctggatttcttgtcattgaactatcgctaattaatactgtggaactcgtagaataatcaagacgaagggattgcgtagaaagagaaacgaaaaaaaagaaagaagaaagtgcattgtccttgtcatgacatgtggaagtatcggtcttatatggtccattgagccacactcatttagaatctcactactttttcaccattttcacatctatacacgattatagcatctatatacatttactttttcaattattctgctattatgggttttggatattcatgtcctaatcattataattctcttaaacaaatatcgaatttcgaatattttttaaggttattggctatatgtactatatttctatagaatagtttttgttaatatcatcgatcgatcttcagtcttattttgaactatctaatatattcagtggcttttcatatggacataaaacctaggccagtgtcgaaagttcataaacttcgaagtcaaaactagctataatggttatctttgaaaagtaactcaaatataaggagagtagaaattctacacgtaatgctgtccgagacatttaattatggacgatgtgattgcagaaacaattttgttttcaaaccctctcttgatcaaaaaggacatttaaatcattgcatccacttcaaccacacacattcatttggctgtaataacatttcaaagattcttacaaaacaagtgaaatgtcattaaatgtccttttagaacaagatgctaacgacaatctacttggccacttgacttgtataccaaatttctcccaactttttgttcacagaatttgcgtttacaactttggcgtttgtgttttgacggattcgtctaagtgggacaatgcgcgtgtcggacatgcgcacttaagagggtagagacagtgagttctttagctttccttatattctctttcaaaccaaaaaagagactactattttttgtacacttagactaaggaaagcaaagtttcatattcctaaaaattctggttttataagtatcaaagacaaattcagtctccatg

SEQ ID NO: 6211 - DNA, 3000 bp, Unknown
  misc_feature (1)..( 3000): cDNA_ID_1830961_gDNA_ID_1620864_Annot_ID_51306 3000 nt of promoter + ATG
ggtcaaccgatgtgtcgctgtacaagaaggctgtggttgatgaggtcaacgcttttaaagcgtagtgtcggaattagattagagtctgaataaaacgggaattagagtgctttgtaataagtgatgagtttatgtaccccatgattatcttctactttgttagttatgtctactactttgttagttttgacttttgagcaagtcttgttaagattcgcattatccaaaagaaaatttaaagccgcattaacagtgtttagctctggtgttactaaagaaaaagtgattatgcgggtcaaacacttctcaaatagtttgctttgatttctttggagaactgaaatgcatgccgtttcgaaatattagaatgcatgtcgtttcgtggatttcagtaccagtaaaggctaatgctgatgcatcgttgcattttaaaaatcgtgtcgtttttcattccgttttagtggccactcttcgcaaccagataagaactcgaagattttctttttctttatcaaaatgcaatctttatctctgcaatcgcttccatggaaaccaaattcagtgactttacctgaaattaatcttttgaatcccaagcaattgactgcctcgagttctcagtatcgtagaactcgaaactggagaattagaagttcgtcggaagataatgtagcaatttcgagtgacggcggagatttgaagaattctctgtccggtattgtgggaaatcaagtggaggagctattgagcagagaagagaacaaaggtttgcttgatggtctggaaaaagcttcgttgagagtggagattgcgaagagagagctcgaagatatagagagacaagaaattgaggcgaaattgctacaggattatattaatcagctcgaatcaagagccgcagaggtgagagcttgttctcgaaatggtgttagatatgaaaatgattgaacatttgattcttttgctctttggaatttgaggtttttgggaggttctactatagagtatagattaaggttgcattgagaatgattggtttatattacaatggactagtgaatttgtgcagtatatatttatatgccaggataagctcaagttgtgcattgtatgcttaggataggataggtaattcaaagtatcaatcaatatcaatggtgttgcttttgtgcttgaaacctggaaatggggtttctcttagtttgtgtgaaggtacttcattagataaggttactaactaaatcatgagtttggttgcattttgtgttttctcgtgttttggaacaaagtctctagtttggttttgtatttgtagacagagcatgttaatcttattcaatatctgattcaagattgcagaatgccagcaggagattgacgcagcaagatcaatggttgaggaagcagaacgctccttgtcattagcagataactcgacaattggaagttcggagaaaggttattcgattgataaagacaaggagaggttagaatctgcaaaagcggcagtgatcgcagctgcggttgggaccattgcggaactcccatttgctctttctcaagtcgcaagcatggagcagcttgttctgcccctgggaatagcgtttgcaagctgtgcattgtttggagtcacattcaggtatgcagtcagaagagacttggatgataatcatctcaaatccggagccgttgcagcttttgggtttgttaaaggtaacaacacatttgattactgtttctatctaacttctttgaattgttcaaaagcaattgcgttttgtgattgaataagcttaacagaaatggtaaaagaaaaagactttctttgtctttgtcatgttatatattgtgtggaagtatgagctggcaaagttcccatcgttgtcccgccctttggttgtttttaaattataatctgccagtaatagattactaatcaacgatttgatttattctaaataattgatgagttgattattagtctctgacctgtattatttggatctgtctttttttaaaaacagatttattatagattcgattttttttaatgtgttatataggacttggtatgttgagcagaggaccgccattggagctgagctgggaaagcttgttttcacatgggatagacggcgccgttttggtgtctcagagcgtcttgatatttgcgtttgcgtccataggtttggacttctgtttcaagatgaagctcttaagaccatttcctagctctgactagattgaagagcaaattaaaaatgtagaaatgaacaaaatcttcttttgaagactttatttgtttttttttatattattaattttggtctaaaatgtaaatgtttcatcctagatttttatgatctttaacttgtcacaaaaaaagttacacctgattttaaaagcatgatcataaggaatattgaatttagaatgatgaatccatacataattcaaattttgctataaaaaatgaatcagttgggataattctttcttttaactttgtataaaaagttatgaggaatatttatctttgtcaagtgatgaagtgattagtgacttgtgaacttaaccaaagaggtagatggggtcaaggccattcctagccattcattatttatagtaaagccacgtgtaataatcttagaagcttacagatataccacgtcagcacaaaacagttcttttgtctttcgatcgctctcaaatcgcgttttgtcgtggaggtcaactgatcagaaaaatatagcaagcagaaagtgaaaaacagctgaattattatttttctatacaaaaaattaaaaaattagtatccaatttcaatggggtttcgacttgttctcgagtaaactactagtctctatctctctcagctccagattttgtttcttcttcttctgtgttaaattcatttgatttgttgtatctgaaggcgaaattactggtttctgatttttggtggtattcagggcggttttaaagcgacggaagaagatg

SEQ ID NO: 6212 - DNA, 3000 bp, Unknown
  misc_feature (1)..( 3000): cDNA_ID_1808204_gDNA_ID_1620864_Annot_ID_51310 3000 nt of promoter + ATG
atatatcaacatcatcatgattctaaagatgtactttgggttgaatgttgaaagtgacgatggaaagcatactcaataaccaattttcaggaaataaaatgcagagacgagtgtattacttaagtaaataaggcagagatgatttcatgtgatatattttatttacataataaatgttaattttaatacacactaaatattgttaatcgaccttcacaaatacaaataaaaagtattagtccaaggaagccgtatgtatgtaggaaatgaaaatgggtccccattttcgttggctagccaatacaagtgctcttaaaagctgattttccattatctctatatttccaatttttccctttgtcttaaaccgaaagtgatttttactttttagtttaagtggttaagaaagtaacgttttcaatcttttttggacagatttttgcctttggcatatactctttaacattgccatgttgatgaggcgacaatatcgatatttttttttttcacaagtgtgattggtaattatatgagccacacaacttttctcatttggaattcatagtcaatcgacagtgtcagttgcataacaaaattcatagtttgatccaatattaggtcattgaactgaagcaagtttcttatatagaaaagtctctgacaaaactagagtactcgaagatactagatcaaaaagagtactttctacacattatctccaagaaaaaaaaaggtgggtaagaaaacactgattgagagtaagagttcaatattcactcgaactcacttttggataagcgtaatcgagctaccaacgtgacaatgagctggaatcttgtactcaagacacaacaaggacaatacgaaaaaggcaaggagggagagaagctttgcatccccaatcatctattgtcgtttgtatgaaagggaacacacatgaagctctcagatgtgccaaacaagagagataaagaaagcttcacataagcatcatggtttttgaatgtgttcaaagtttgtaaagaatgagattttttgtgtgaatttggggatataaacgacatgtgaatatgtgataaactgaatatattaatttcgttctccttctacaatttaacagaattttatttttattatttttatcaatttcatacttgtaaaactctctgtccttctcttattgatatttgatttgatttttttgtatagtaaatatgttcatccgtgagagatgcatgtgagctttatatgttcaacaaaatttcaagcatatataatcattggctgaatccttacaaaaacttataacaatatgacttaaaaacggtattggatgttacggagactgaattattgaaaaataattgatcattagcaaataataaccaaactaattagtaaacaaattaaatatatttttttgtctatgaccgtgttccaagggagaggagaagcgatccagcacgcggtgagtaaacctcacgtgcgtaaaccttctcacaagattcttctttaacgtttctacgagactaattacttccttattcatccacataccacattgcctctcctgccgttttcacgtttactgctctaactactcgttgtctccatgtacttactttatattgtctacggtagtcccaagaccgcgcttattccgagattgatataggaaatacaagtatttaaaaaaaattaggattagtaaatgaggaaagaataatgagataatgagtgacactaagtatacaactaatacgtcacgattgtataattgtcccctacaagtagtcaaaccttagcccttttgaccgttaatatcttgcatttgacgataatcttttccgtgttttgatctgtttccactgtacaaaactaaacgttaataagctcagtattgggtacgttagtaaaaaatcaatcataaaatataaaataatctcactttaagctccaaccagagactgacagctgttagttagtttgaatactcaatagtaatcaattaggtttgaccaaaatagcttcataaattattcatcaatccaataagtcatttaagtgataattaccaaaaggcacatgatagctctctaaatatagatataccaaaatcaatccataccaaaagttgatgatttctttccctctacaccatcgatatgttgaatagtttagattttttccaatatttgtttaattattatttatattgcctttatatatcaaaagtgaaaaaatccaaacaaaatcttgtcaaagaaattaacactggataaatatttagttatttttggataacttgttttgaaattgagtttaccattccaaaatcagcttaactttgtccaaaaataaggaaaaaatcagtctatatttaacacatgtattctttgtaaagattaaatctaaaattctttaagacaaacttgtgtttttttttctgtatacattgtttccctagtattttatgtttcatcgtaatgcagcatcttttgctaacctctctagtaggttttaaacaagaatgaatattgttgacaataatatcataataaaaatattatactgtatacaacaactagacctaccactacgaaatgatttaaaacaagaagagagtacaagaagaatatgataaatttaattttaaaaaaattcaccgatcgtattgataaaaaagttgtatctacttttctctctttttacctcatcaattaaaaagttgactataaataacacattactatttcttctctctcgccaggcggcgttgcctacaaaaacctgacaatcgaaacacagtttttctgataataatatagacatttaccattatgcccttctaactgaaaacggcaattacgttccttgttatttgttttcttccttctccttctgtttcttttttgtggctttaatttttttcatattaattcggaaagagaaagactcttcactcccataacagtcgccggtaacagaatcactccgatg

SEQ ID NO: 6213 - DNA, 3000 bp, Unknown
  misc_feature (1)..( 3000): cDNA_ID_1839100_gDNA_ID_1620864_Annot_ID_51311 3000 nt of promoter + ATG
acgaggaaatatggatctacaacagacggattaaatcatgtaaataaaacttaaaaaaggggatcaaaatggctgccaaaaaaaaaatcggatcaaaatgacatggaactaggtatgcatgtcaaaacaacttttaacagcatgaaaactttgacttttgaggttaagaaggatagagataccaaatttgcttgctcaaagaatatagtactacattgtttaaaaccgaaccgaaccaataacccaatatgtttattaatttaattaactaattatattaataatattgtaataactaaactaagtaattattatctacaaaattctaacctttaaaaatctaaggttctacttctaactaaataactaaactaaagtatttattatttctaaaactttaactcttaaaaacctaaggttatacttctaacttctaaaaaataaaactcaaaaaaaaactttcgtatttcatttgttctttcgtttatacggctaattgatttttttgaagtaaactaataccaaaccaaatccaaccgaactaaaactggttcaaacacaaaccaaaataacttcggttgagtatggttagagtattacaaaacccaaataaaccgaacccaaaattaaaccgaaatgcacccctgataaatattattactatataaaatatatataactttaataattacataataacacctaaaaatgacataaaaagcaaaaatcccataatcatattttctacaaaattgtaaaacgaaaacctttatctgcgcatccagggaatcgaaccctggtcagtaccgtgggagggtactatgataccactacaccagatgcgctatttctgacaaacaataatcgttttatatacttatatttacattttctcggttcaaaatcgttattcctgtaatatattgatccatcccacgatcttcttttcttggtcgtcttctgaaacgctaatcggatccagaagccatggacaaaagcatcagcatcacctccaacgttagcacgacgacttccatggaaaagatcgaccacgccgctagctggatcagcgcaaccgtaatatccgctttcttcacctccctcgaacgctgcgcctgcgtcaatctctccacctctcatgacgacgacgacgacgacgacgacgaatcccatcaccgtcctctcgctctctccgccgctcctcatccaaacgacaccgtttagctctgttttttaacctctggtaatttataaatttaatccctcgtttgtttcttttgataatcgattggtgtggatttgtaatttcttgatttgaaaatgtatgtctactgtgtgtaaatgtgcatgtctcagaatttgattgttttgcgtgtatctgactttatatacttgggtttaaaatcagaatgaatcatcgtttttgcatttacattgaaaaaatatcaagaagagaatttggtagagatcatttgtttgttttgaagttttcttttgtgatcaatgtttctcgatttacctttttcatttcatttctgatctctgcgttcaactattaaaaccggaacagcatcagtttcatgttttattttgtcaatgtgtcagagatcctgtcactttagatttcatagtttcaaaagtgattatttgatcatgtgggtccctgctgtgagaaccagtgggcactggcctttagtttggttaaaagcaggattcaaaacttcatactagtttctttgttctaaaatgtatttagcctttttcaaactcaagttgcacttgttgtacaaaagacacttttcttttgaatctaatttaacattacattcaaaaaaaaaaaaaacttcatactaagtaaatgtcgtgtttgatccaaacttttcccaatttgtttgcttagcagggtgcaatcttgtttaaatatctttgtcatgtataatgtgattccatctcttcatccatatagagaaaatcttgtttaaatgtcttttgtcatatgaccatattctcacttgggtttctagaaaaagttttgggttctttgagtttgttgaattggatctccttatggcttagaccgtcgttccaactgctgaagaagcaagtatgttgactcaaaacagtcacgttatatctctgtctctttgataattcttggcttttatgtgttgggtgcctagtatcatttgttttaaaggtttagggaacaaaaggtcataaactataataagaatactttttacaatgttatttcctcagcaaaagtagcacgcattcacattctccaagtttcatcatttgttatttatgaacgcaaacaaaaaaactgtactattaacaagcttttgttaagaaaaaagtaaggaaaccctcttaggatatgtatgtttcaacaataagcttatatctttactcattaagcccactagacaactttgtgagatagatcttataagaagcgtatcactttatccccgtgattacttctcaaaacaacgagttttgatttgtgctactttattaaattcacgttctgttttcagaaattttgttttttctgataggttcgtattgaaattgacctctttggaaactggatctttcataagatagaaagagaggtccccatttcccaagtttatcaaacaaaaagaaaaaaaaatctaaattgttctcatcttgagacaaccaatcagaatgaaccatctgagtcagccaaagggtttaatagtcaccatttgccaattgtattcatactctttcctttttggtgcgttattctaagagccctagtcagaattcaaacatttggcaatgaaatcatacaaacttaataaccctaatttactcatctccacgcacacacataataaactcttcttatcctcttctccattcaatctcttattctcttttccttccttcatataccttaaacagcaacgttctctgttcttcttcttctttttcttcctctgtttttctttcacaacttccatg

SEQ ID NO: 6214 - DNA, 3000 bp, Unknown
  misc_feature (1)..( 3000): cDNA_ID_1815496_gDNA_ID_1620864_Annot_ID_170426 3000 nt of promoter + ATG
ggcttttacgccggataatgagaagctcgagtaaagtttttgaaaaaacgttagaatagtgattgacaaattgttgaatactataatattgaagttgatctttaggaattacgtcaatttagaaactggtcggtagcaaattaaaatgtgttgtattgttgtatacgtttggttacgtgagacttgtataaatttacttaattgatataactaaaaaaaaggacttggtgtggtcaaatacgtgagttaattgatgttgcgttgggttctttacacctaaagtttagccagcaaaatctgtttaaattttttaaaaaacttattaatttgtaagtaatctgtttcatggcagaacgatcatacatatatatatatacggaaatcttgaaagaaatcgagacgataattccagatcatgtgatgatggtctgatggatctcatataacttcccgaccactacttctgtattgatgtataaacgccaaagagaatggtgagggtgacatttcttgtctaaaataatttaattgaaatatttaaactcgaaattaaaagatgacatattctacaactaaaagtaaatgaggttgtgggttttctttacatttttaatcattttttatggttgaattttatgattatcataatcataatacacaaactatcgaaagtggaacccgtatcacgatttttttgcctttattttattcgttgcctattaaaattaaaaggaagactaatgatactatcgcctgttccatttagatcctacacttcatgcttttttatatttctccttttggacatctaacatgtttataattactatagcctttaacgaaattttaagaaataaagccagcctataaatgaaatacaaaacggatcatatttgaggaagaccaatgtacatatgtgttgttatttgaacaaaaatttgtttctaatttttttcgaaattaatcttaaaagaacaaatgattcttatcagactttcaacaatattgatcatagtcgaaactcaaaatttcaagccaaattagaatcttaaaacctaacaatgaaaatatatgatccctcgtttacaaaaaaataaaaaataaaaataaaatatatagatatgatccctagtccttatttccgtaccaattatgatattgagagatagttttgggataaccattttcgtttactcgagataaattcactcatcagtttaaaataaaccaaaaccattaccacataagattcttatcccaatttaactattatatttctgctaattaattgattacatgttgtgaagtataaattgggccaactatagaggaatggtgtttgtttatgttttattttggctgctagtgtggttttcttaacttgttagcaatcattttactttttgaaaaaattgttagaaaactattaatgtgaatagttatttactcaataaatcttattgttaaccactgagaatttaaagcatttaaacatctgattattttaattctatgttaattccaggcattaaattttaagcgtaatttatagaagaagaaaaaaaatctagttacattccatctaagataggggtacaaatccatacaagagtctatcttctgtaattcttagcaagttgaacatttcttaatttttattttattttatttttggtcaaacgttttctttaatacaagtggcaaagatattctataacagttataatcatttatagttagggattttttaatcattttgtagtatttgtttttctcttttttcctaacaaagtttttggaacttttgatcatctctcgattgaaagcgaacatataaataatttttactactgcaaatttttaaaaagttaatattcgactttataaaagagatgagagtcaacaaaacaaaaagcaactaattttggacgtacgaaatgctttgtaaatacattgatatcacttatgtttataatatcactcatcccaagtgttggtcaacatttctttgataaaaattaaactattcaatagaacgaaaaccacaaaaaaattataaagaattattgataacaactcttcatgttaatcttatatatttttttaaaaatatttgtttttaggttttaatacaaacaacatgattctagtttattaaactaattaacgcaacttgatggattataaaaatatagcttaactaatccatcaaattaacaagtgaatcgcactataattctaaaagaatcaggtaggtccaggatttgtcttttctccacttctcaatttcccattaataatcccgaaaaggcattacgtaataattaatattttacgctgtagtattattttatgataaacatttccaaattttccaacacttaatcataatttaaggattaaaggaaatttgattggtgcattcccaccacgagtttgcttaacgtgtcgttaaatgcagccgtcggacttgacaatgcaaaaatgctacataatctaaataattaactctcgcaataagattcactaataataacatttttaacgacgatatataattttacaataagaaaaaaaatatgaatctaatatttatttaatattaatttactccattatctgaataatctagaatatgtcaaatatccttttattattttgtagctgtcgaaactatggtgaataaaatctcgaggaatatattagaaaacaaaaaagatctagaggaataataatattttaaatatttggggcacagttgtattgtgaagcagagaatcggttctcaatatattatccgaaaatgtcttaattttaaattttgttttttgtttgattctgcgatattggaatcacacactctgccaatttgacctttctctctcgcttctctttctctatccaatcggaaagagatcaaccaacgatagaggagaagaagaacttgcatacgcaaaaaaactttcccgggaaaattccagaaactgctttggaaaaatg

SEQ ID NO: 6215 - DNA, 3000 bp, Unknown; identical to SEQ ID NO: 6213
  misc_feature (1)..( 3000): cDNA_ID_1839100_gDNA_ID_1620864_Annot_ID_170424 3000 nt of promoter + ATG

SEQ ID NO: 6216 - DNA, 3000 bp, Unknown; identical to SEQ ID NO: 6212
  misc_feature (1)..( 3000): cDNA_ID_1808204_gDNA_ID_1620864_Annot_ID_170422 3000 nt of promoter + ATG

SEQ ID NO: 6217 - DNA, 3000 bp, Unknown; identical to SEQ ID NO: 6211
  misc_feature (1)..( 3000): cDNA_ID_2123349_gDNA_ID_1620864_Annot_ID_170417 3000 nt of promoter + ATG

SEQ ID NO: 6218 - DNA, 3000 bp, Unknown; identical to SEQ ID NO: 6210
  misc_feature (1)..( 3000): cDNA_ID_2123342_gDNA_ID_1620864_Annot_ID_170414 3000 nt of promoter + ATG

SEQ ID NO: 6219 - DNA, 3000 bp, Unknown; identical to SEQ ID NO: 6209
  misc_feature (1)..( 3000): cDNA_ID_1815462_gDNA_ID_1620864_Annot_ID_170413 3000 nt of promoter + ATG

SEQ ID NO: 6220 - DNA, 3000 bp, Unknown; identical to SEQ ID NO: 6208
  misc_feature (1)..( 3000): cDNA_ID_1808803_gDNA_ID_1620864_Annot_ID_170412 3000 nt of promoter + ATG

SEQ ID NO: 6221 - DNA, 3000 bp, Unknown
  misc_feature (1)..( 3000): cDNA_ID_2123338_gDNA_ID_1620864_Annot_ID_170411 3000 nt of promoter + ATG
gatatcctccagctcaatcttggaacgtccgctacaagaaaatcaaacgaaagtaaatttcaaatattctactcctagggaaatattggccagtagttctaaaaaaaatgcatgtcaaatgttatagtaaatatgttaaatgatagtaagatatttcgttgaggtaaaaaaaaacagaacaatcacatgtaatgatgtaaaataaatagctatagattatatgagttttatttatttattatagatatctattatatattagacgaaaagattcattattgtctcttgaaatattacggttaataaaacctgtttagaggctctttttaataaacacatctttgaacaattctgatatagtgatatgagtacattttgcattaattaataaaacataaacaataatgaatatatatacccgagttcttgaagcggagaaagagtgaggatcttggactcgccattattgtgagacaaaaggatcttccctcgagttgtggtgatgggttccttgtccgacaagcaatagcaaggcttccactcggcttcgaagagataatcagctgctttgtagaggagacaaagaaatgaatcaacgatgtctaagatacagaacacgacgaagctaacggcttcgttcagccatgttcctgctacggtcgctgctccttttatcttcatcacagccatggctcaacaaaagcttagagagtttgatatacaaatcttctttatatatttgaagagagatccgtgatgatttttccacttgtacaattgtgtaatgtactttatctataatatatagaacctctctctgtctttctgtttttctctctctatttgagagttgagactaggagatattatggagagaaacgaagaatcagagagtcgtatgaatgtatatagtctatagatgatacgtgattaatatataatatgatgtcataagttgagattttgttaaagactctagaattactatataaggtcacggatccaccggtttgaccggtctggtattaaaaacattggctaaataacatgtggctgtgagttaattttagactctccttatatgaatttgtcgaaaaatctatatatgttgataggaagatggcgaatttattgcaattaactttattttttatacataaaaaaatggaacttatttttgaaataagaaaataacttttgctggaaacgaattcagaaggttccatagtaatgcgtgtaagagaaactatgtgtattttcttaacttgtgagttgtgaatgaagttgggagtgacaaattggtggtttttgtttcttctatatgtatagatgtggtacataattgtatcacatgactatattattctccatatataaatgttttctatcataattgtacacacagtattgtttgtcttgcagtgaaaacatttaaaactttcttgaatgtacaaaggtgccagattcttcagatgaacaaaatacttagtatggaaaaaacttagaaattgagaaagattggaagataaaagaggtaaataacagttgtaaccaaataaattcaaaacaaaaaaggatataaaaagataaatgtggtttgtgtcattaaacgcccaaagaaaaagaggtgcatggtggttgaaccgtcctgtgaaacagaagaatcagtccatgacttggctttatcaaatgatcatgcacaattcttcatttcaataagcttttattttcttacaaaagtatttacttttccatttgaataatcatttcttgttcctctaaaccttgctaatccaattatttcttatctaactcgtttatttctttgtttcatgacacgcaattatatctattttcagaccaacgtagaggttttaataaacaatatatcaccaattcttttttttgtttgtttgttacattgccgtttctggacgtataaggttttctaatggcgatatggttgattcgtccttatatgtgaaaaattctattcactcgtaccaccaaggcaacaactaatataccattatactagttatgacaaatatatatcaagacttcctaacattccggtgttaaataaataatcgacacatctaactgtaaaacggtacggatcacgtaggttaagaaaatgacatacatgatctttggggtatgatgtctttctatcaaattaaatttgtttctttcactcccgagtgtattttaattttgacgcaatactatttctttgttgtataaatttggatatttggttatcgtactgcgtggcagtccatgcaatttcatatatatatttagaatttttatttcccttggatttgcctatatatttctatctttcgtttagtccataaaatttactacatatactacaatacaaatgttgaatgttttaaccagaaaaagaagaagaagatcaatttccattttaaaaagttcataatttttgttctctctcatgatcatactttggcggggaatttaaaacatgtgttaagttattgattactcaataacagaaatatggatttttagtagtgggccattattgagctattatagcggcccatgcgaggctgaaggtgtcgtgatcggcaagtcaagaaaccctagccagagattgtacagataccaaacgtccgtcgcatctcagatcatcgacgatcttatgtcactagacactagtctttttgtaatacagatcagagtcgctcgtgtttgttttcctctcctattgtgcccaaattttattttgttgttacttgcagttttgcattcaacttgtttgattaatgtctctgagagaccaagttcacgttaagacgtgtctttttactcagaagacaatggaatatgaagagacaaaatgtctatcattttttgaagtgatatttctcatacaagagtgcatttaacaagtaagattttgtcagcaactaagatttgtttgagaaatgcacaaagtttgaaattctagtcattccaacaatg

SEQ ID NO: 6222 - DNA, 3000 bp, Unknown; identical to SEQ ID NO: 6214
  misc_feature (1)..( 3000): cDNA_ID_1815496_gDNA_ID_1620864_Annot_ID_51312 3000 nt of promoter + ATG

SEQ ID NO: 6223 - DNA, 3000 bp, Unknown; identical to SEQ ID NO: 6205
  misc_feature (1)..( 3000): cDNA_ID_1838557_gDNA_ID_1620864_Annot_ID_51314 3000 nt of promoter + ATG

SEQ ID NO: 6224 - DNA, 3000 bp, Unknown; identical to SEQ ID NO: 6204
  misc_feature (1)..( 3000): cDNA_ID_1830949_gDNA_ID_1620864_Annot_ID_51315 3000 nt of promoter + ATG

SEQ ID NO: 6225 - DNA, 3000 bp, Unknown; identical to SEQ ID NO: 6203
  misc_feature (1)..( 3000): cDNA_ID_1825220_gDNA_ID_1620864_Annot_ID_51316 3000 nt of promoter + ATG

SEQ ID NO: 6226 - DNA, 38 bp, Unknown; identical to SEQ ID NO: 6202
  misc_feature (1)..( 38): cDNA_ID_1830941_gDNA_ID_1620864_Annot_ID_51318 3000 nt of promoter + ATG

SEQ ID NO: 6227 - DNA, 3000 bp, Unknown
  misc_feature (1)..( 3000): cDNA_ID_1813832_gDNA_ID_1621084_Annot_ID_55336 3000 nt of promoter + ATG
tacctagaaaaaatataaaacaatgtcaaaaacgaaaaaaatctgacaaataaaattaaaattagaaaaccgacattattgtataatggtttgtgctagtaattttgttatgttgctattcggattcaaactcttgtatgttattgacaaataaaaaaatccgacaatcatgtatttttctaagttttgaaagaattaacttattttaaatttctatattggattattaataaaataaaggactgagtagataatgtcaaaaaaaaaaaatgagtagattaataaataaatgagagggaaaaaaaaggcgagattggcggtggtagatgtaggagaagaagagaacaaaacaaggaggatacagttggctatggaatattatggttcataatgcaaccaaacacatataattgaaatgaaccacacacacgcttttaattatacacataagagtgatcgagcaccattacattttctttctttgcttcgttgtaaagccgactttatattatcatctctttttatgtaaaagaaagttgtaatgggttttaataatatatataaacagaatgggtcaatctaataaatattcggaccacaatgttaaaaattagttatctgtttttttccggccggaaacaattatggtgatttaaaagattatcatcatcaatttttattttttttgacgttatcatcaccaattattgattggtatatattcttctacggtttctgtaaatttatcatgaaattccttactatgcttttttttggttaaagaattatttactgtttttgataggaggaaaaatgatcgtccacgttcagtatacggcatcatcagcaaaaccattcaaaaatgtttttactggaacggccaaatatggtataacgacttatagcattgtgtacgtgtgttatacaataacaagttctctaaatgtttcgaagtttacatggtataagagcctctatgaaatggaaacctaattcgttatcatggagctcgtccaatggtgagaaagaactcagcaccaagttggtggaattatcaacatcataagagagttcttctagctctttggtgcaagtgacatgtgagaattacaaaaaatgggttaagaattaaaaatgcactcaaattattggtttgttagaatgaaagtggatcacaaatagaatgtggtcgtggagctagaaactggagggtagaggctcatatcagaactcacctcaaagtccatatccgtgtcaaggcaggcgtggacgaggacatcaattaaggccgtagtactgtcccgtattaaacacaataataaaatcgtaccttgaaagctataagaaaatagaagagagtgaacaatcgacaaatgacaacgagaaacatttaatgaaatgaaaatatctatgctccagacacagagataacccacgggcagccaatgaagcactccacttgcgaatttgtaatagaccctacttgacaatgagtagaagagccatatcatgtatatttaatatttaagttggtgtgttgtagaatacgtagaattgttttgtgccataaaaattaagaaagtgtttattttgttttcttagctcgtgtataatcaaatttaagtagttgaattcgtggaattgtagtaagtaactgtgtgcttcgactaagtgtatggtgtgatggtgtcgtggtgacatttcttcggttcttccaaaggaagttaaaccttgcactgcccgcttgatcccgtttgagagaaatgagtccaataattaaagatatcataaatttcttaagttaaaaacagtgtgttgaccgatgaaatattatacaaaaatgtcttttctacctaattgagagtcacacatctttgatccaatttttctctattacatctttgatacaatttattacatctttgatccaaattgcactctattacatctttgatccaatttttctctctatttttctaccgattacacaataacatattaatttgtccataaagattgttatgaatggttcagtgttacaaaatctccattattccaccttgcatattgctgcggaatgcccaagaaacaagactaaagaggcgaataaatcacagaagcgaaaacgctctaaaattcctaatctaatagacgcattcgcctctttgatttattcgccacaaacaagttttgttagtataacaaataaaaattttcccttcgcagaaacaaagtcgagattcgacaaaacgttcaccattcgaacaccaacaacgacgaaaagaagctaattaataaaccaaacagaagagaaagccttggcctgcaaataaccgtcatgacttagtgctggctgcaactaacgccatgaatggtctatcaattaagaactcttttgatgtaattcactacaaaatctaaatttttgacccgctacaagatttaattgggagatacgttgaatctcaaaaaaaatcgtaagaaactacaatcttccttcctataggcatgaagcttgttgtatgcttcgccaacgttacgtgtatgacttataatgccacgtgacactctcttagttggcggtttttgtctaaatcttttatgtgacgtggtgcgttctgatattcttattggtcaattatttttgctgatgtggtatgagaaaagtcaaaatcgtttcaaggagatttgttatcttagctaaaacaaaaagaagttattacaggaatagaaagagagagagacgaaaatttacgctgatgacgtggtaagggaacgacggagtggggaaccacaagccgttcttgatattcaacgtggtttgctcatggcggcgcgtggtagactcgtggtggcgcgtgggaacagaagcttttcatctataatcagaaaatactcattgaaaagtccatttccctctattttgttctttcttatttcttgcaatttcatctctctcatttttttttctgataaaggtgcaatctcatctcttgcaat

SEQ ID NO: 6228 - DNA, 3000 bp, Unknown
  misc_feature (1)..( 3000): cDNA_ID_2125304_gDNA_ID_1621084_Annot_ID_55337 3000 nt of promoter + ATG
agaaccgccgggaaaatgagcactggtgttgaagccaacgagattggagctctcatgggtcttgctggcttcaacggcgcaaccaacgcagtgaatcaccctccaaatgggattcaacaacagcttcaagctccaccgttaaacaacgtcaacggcgtcactaatcacaacctcaccaatagtaatggaggcatgatgatgaacatgaatgggtacaataatcatcatccaatgaacatgcagagtaggcaaatgatgcatcagcctcagcaaatgatgtaccaaagatcatctttcgttccagcatcaagcaatgggtattattacaattatacccctagtccctacagttattatccttattacccttacgcaagtgatcagtaccaacaacaaagtagtcattcacatgcaacaaacatgtctagtgaagaagacgctggtaataacaatagctgcaacatcatgtaaagtgtggatgcttgctaaggaagatatctatcttttgcttttggaaacaagacttaaaagtttaatcttttctggagtgtgatatattagtgtttggtttttctttctctttttttttggtgtgtgtcatgtagctgttttggactgacatgaagttgtgttggttgatatataaaatcctagaatgttattgatgtttcttgtgagatgcttttgtttgtcttggttctttttcatgagatccggttggtgcggtcgaaacatttgtagatgaggagcgtttaaagcggttggttttgtcacaatgtggtttgtgtgtatctctcgaaaagatattctctctatccactcaaaaagttattccacctgctctcgcttgcctcttggtaggtgtctcgttttacgcgtcacctatttttattaaatgcgacatggttcaaaattttggacttgtgaaagtaataatgctaagccggtcatgcatcaatcagttctttgttttaaatttgatatatttccaagatacaccgatggaaattggtatttgcttaggaaaaatgtttatcagattcgaaccatcttttgggccacatgaatttcaagaaacattttggggtaaagcccaacttttttttctttttcaaacgtatttaaattctttagagcctacacaagattccccaaccagatgacaaaaacatgcaaacgaaaatgctaaacattttgtctgtttatttttgacaaaatgggaagaagttttctcatttaaaagttaaaatgcttttaaaatcgtactctaaaaattggtccaaaataaaataaagatcgtaccctaattttgaggtttagttatgatttctcaccacaatcgcttgtccaaatttatacatgtgaaataatcttatttaccaattatgatttaattaatttaattgttactgaaaaatacattatacaatcactatatgaaactctaaccacaaattaatagcagtgcaggacactaaaattataagtaactagaaaacatttggtacgagtgaaaataactctatgtaatgttcggtccatttgcatgctatagtaggtttatattaataatgtggtttgtgcataataatggattaccaaatggacacttaaacgtaagaagcatcgagtttaggatagtggaccattctcttaaattcttttcacacttgagttcctactttttacgacacgagccgtgagatgtttgcctttgtttttctataatcgaattttatcttgtagattacaaaattatcgagagacttgcttgtgtcttagtttctgattaagtggttataaaaagagactaagaatacttagataaaaagagagagatagatttaagtatgatttctcgaattaacaattttccggtcccttaaatgtaattaggtgctttggtaacgcgtctaggatactagagctttcgtatcacacaataatcaagacaattagtgtgattatttattcaactataaataatacgaggtttaatgcaataattcgagatattttgccacgtaagaaggtggtatctggatacatagctaaatgaaatttgctaatattttatcgtcactttttagtattgcctttctttgtattttccctcgtcaatgtttgctttctctgcttttctgcggatgccattgtatttaatttgtaatttagtatacgtcgctactagctttttcacctgtgaagccaacacaaacatattatctttggggagaatcccaaaaaaaggaaagttgaaaaagagtaatcttttaattttgatttcttaagactcttaaatacttggaactgattgctaactgacaaccaaattatggattttaagatctattatcgatcaaagactcatagttatacgtactaatcaacctacctaacctacctacctcaaataccattgtaagctaaaaaggatgaatcatcgagttaggctctcatttgtcattaagcttcttctttgtttcactagtcattaagcgttgcacattatacgcaactttcattaaatgcagacttcgataaatccggtactaaagactatagagtgtgacaaaaaaaaaaaagagtacaagagtgaaatctcataaaataatacaaagacaaacaaaaattcccaaaacaaacaatttggaaagaaaggtcactgaataatgaaaaaggaaaatgccatctgcacatcatgcaaccattaaaagaaattttttataccaaacttagtttaatgatagaataaatttgtaacgatactataacaaagactcatgggtgtgaaccaaagacaaccacgttctctcaaatactcacacacacactcctatatataagtatctaatctaatcaagaacttaatttctctcacccgaagttaataattcagtcagaaacacacacacacacacacacacacacactcaaaactgaattgacttgtcagaaatggaatctctgttgtgtcggaggaggataaagagagtcatg

SEQ ID NO: 6229 - DNA, 3000 bp, Unknown
  misc_feature (1)..( 3000): cDNA_ID_1813821_gDNA_ID_1621084_Annot_ID_55339 3000 nt of promoter + ATG
ttcatgaaattgtacaatgcataaaataaaacattgagaagttctaactgagtggtcacatatgttagcggtccatacataatttaattcgtcatcattagagaaacaatattgcaaatatactaaatctgagtttgagaaaaaatatagcttgtagacacacttcagtacctagtgatcaaattatcatatgacatatgatacttatgtgagtgtgactatgtaattcctagttgaaaaaatacattgatgattgaaaattacagtctagaaattataccaactaaattaccttggtacaacttatataagtaagtagtccctataataagcctacactctctacaaaataagtaaaggagaagccttgaaggagaacaacatgtcaattcaaaatagtcatggaatcactaaaaggccttaaagaagttcttaaggcccaaaataaataggtttttcggaatttgaagtccagttttctgcgaaccagactagttctgctcactttgggttctttcaggtgggcttgaaaactagacaactgagtcagaccaagatctttttttcttttcaaatcaatattgttgttgttgttgttgtaaatcaatctttgtgtagaaaaaaaagtgaaaaaaatgatcttgttatgaaattcaaaatccatacagtatttgtttttccttcatgattttacttttttaccaattaacttaataatatttttgtccgaaaacagatttttcgaaatatttgttggtcatcaattttgaattcaaaaccgacttgatgagattgatcaatagttcaatactcataattacacacggattctaaaagataagagaaacagtaagtcggttaattttggattaagtaacgcacaagccaaagccttctcctgatcgaatcataaaccaaacaaatctttcttttaaaagaagcggacacaaaccctaaccaccaaccctctccgtcgtcaaatttcccggcgaaagatgaaacgaattgttcgaatttcattcacagacatggaagcaaccgattcttcaagcagcgaagacgagtcaccaccgtcatcacgccgtcgaggtaagaagctagtcaaggaaatcgtaatcgatcattctgatcccccggaggtcggaaaaactcggttcaaaatcaggattccggcgagtttacttgctgcgaggaatacgacggcgaataagaagaagttccgtggcgtgaggcagagaccatgggggaagtgggcggctgagattagatgtggtagagttaaaggaagacctgaacgaatttggcttggaacttttgaaacagctgaagaagctgctcttgcttatgataacgctgcgattcagttgattggacctgatgcgccgactaattttggccgtcctgatgttgattctgcggtggtgaaaaagcaagattctgatgctagtggtggtgcttctgaagaagttgtttgattttcttgtttataactaactttgcaaggttacttttgtttatcatcatcttttgtaaatttgatcatcttgctctttgctttttaacttctcttgtacatgtttgaattataaaagttctaatttttcaatccagattcttggttttcataattgtacattttgatcagcataactattgcttaaaatttccatattggttttaccttaattgatcaaaagtctttcttttggatcgaaattgagacaattgttctaccaactgtacttgaaaaactgctatatttctcttgcaatttggttatctcctgatctcttttacttatgatgactctgttagatgctgctttcatgagcgtttctttgttaaactaacttggtcggtcttgttgtcactttcaccaactgaaaagaattaatatgttttaagtatgttaaattgctgtcaagctagctagggatgttgtaccgaccagcggaaccggtggagcagtaactgatttattaaaaaaggttgtgaaaaaactgatctggttaactttttgagccggtcctcctcagtaggaccatctttgtcaaaactttgatcagaccgaaaagctgtgttcaaccacattagcctaaagcttagctcacaaagaccatcagaacagaacaggctgaatcatcatcacatatttttttaacaaaaccatataacaaactattagaactgaattctcataaagctatcaaaaaccctccttttttcacaaacctgggttgaattagtagtaggtttagccaccttatctctgaaactttcttgataaccttaattatacatcttacaatgtttaacctatggttttgtttaacctcaattatacaaaaccattaccactaatgggctaatagtgaatctggcccaaaatgtatttgcccttttcttctttagccaaaagccttctcaataagtcttcttcttcttctctgatttctttctcccttcttctctcggtcttgaatctttctttgtttgctaatatggggattaatacttaaacagagaagtttgtttttttccaacttaattcttcaagggcatttcaataaataacactaagtcccctaagtgacaaacgacgacctatcagctaagcaaaaacccttagcttggcagaggcgtcaagggtttcaaatggggaaatcaaagaaaaaggttctaaataaatctctgattactcatcctagcaccagtgacgatactctccaagtattcttctttcttaccatgtttgtttcatgttttttggaaatgaattagaattgtaattagacaaagatcatgctaaactttttgcagttgttcgatccaacatcgtctcctacaaaggaaaaagttaactggaacaatgttcttggcatttctgattacctctctaaacaagccaccagaggttttagggttctctgttaatatttgttaatttctcggttctttttttttgtgatttcttcctctcaatttggttactacttaatt

SEQ ID NO: 6230 - DNA, 3000 bp, Unknown
  misc_feature (1)..( 3000): cDNA_ID_2125352_gDNA_ID_1621084_Annot_ID_170468 3000 nt of promoter + ATG
gtgagtcagatgttgatctctattcgttctgtttagaaacattttgccaactgcttcgtaggttttgaattgtgatttattctggactcgtattgatgaaatatggcttagctgaagtctgaggtgactaatttaatgcaagaagtctaaggctgctttaggtttaggaaacataatcttatccgtgcatatattctcatgtctctagtgtgctgttcatcaatatagttaagattaagattaatataggcatctgttccagaattgctgtaaaaaaacttacatagttcaattttttttcttcgcctttgggttattgaatggcatatgatattatgtgtataatggtcgattaaatacttaaagtcttgattgatgtaagggtctgtgtttcttaatcttattgcagagcaagtgatccaagctattgatcccaaaaaggttgaaatcatacagaggtatagttactaaccgtataaataaatttcacccagttgaattttagtaaaaccttactagtaagaggaaagtccaccagagtttgttgtagcgaagttgggaaaattctaaaacttttttcttgctgaccttatatactggccaggtacttccaatggttgattgaggaaagagactacactgacccgcagctgcatacatcgtatgctctctcacttgccagatcagcacttgagtgtgttgaagttcaaaatggtatccaagaagctgatgttccaaatggtagtgaggcacatgatagcaatgttggaagtatttctttgtttgaagttgacgtacgagaaagattgcaggcctttttgcagtcttcagatctatatgatcctgaagaaatcttggaattggtagaaggatcagaactgtggttggaaaaggtttgtctgtcaaatttgtttccttcgattttgaatggttcttaaaaagtgtcatttagatgtgtatgcgcacataggatgcttcatgattatgttggtgcaccgattttttattcaatggattttttactgtcaaaattatgtgtgtttgcccatttgtcatgtgtaatttttttttatttgataggcaatcctataccgaaggattgggaaggagacattggtcctccaaattcttgctctgtaagttgatttaaataccaagaagtgataaagaacaaaactgaattgtctatctgattgtgtgagcaaatatagtttattttattgtgaatttgaatgtggttactgataagatcttctctggttgggcgccaggaagcttgaggattgtgcagctgcagagcaatattgtgtagagattggaagaccagatgcatttatgcagtaggttcttttccttcatttcgttacttattgtgaatgccattgtatgatcttttttccttgtgaaatccctttaaacaaaaagtttatcttaggttgcttgatatgtacctggatcctcaaaatggtaaagaacctatgttcaaggctgctgttcgtctgctccacaaccacggggaatcccttgatcctttgcaagtattggacgtaagaaacccagtcctcctccatatgtgaaaaagacactgatattgcctcttatcctacagctttttcatttggtagttgtttgatgatagagctgatatctttttttatatgcagaaattgtctcctgatatgcccttaaaactggcatcagatacaattttgagaatgctgagggctcgggttcatcatcatcgtcaaggccaggtaaaaattcacaacccctaccaattgtgtgtttttagttgtcaaatttgccatgtgtaacagtaatatgtacatttaaatgctaagaagagataattattgaaagtagcatagataaacttatcaaaaagttgttactctgttaaaagtgccttcaatctgtatgtggtgtgggtatagctttagtgtctgaatgctctgaattcaattgttacagatcgtacacaatatctctcgtgcattggatgtagactcgaggttagcaagattagaagaaagatcacgtcacatgcagataaatgatgagagcctctgtgattcctgctatgcccgtctgggaactaaattatttgctatgtaccccgacgataccattgtctgttacaaggttagtcccccgcttacaatataattctgttgcatgctatatccaaattcattagggattaagtatatctttcttgcacggtttcttttctctgagggtatttttgttgttcctcttccttcttctcagtgttaccgacgcctgggtgaatcaaagtcagtaacaggccgcgacttcaaacgagatgttctgataaaacccggttggttagttaaccggtagcagaagaagcccatcttgttccgcatcaattggctttttttcacttgacctctaaccctcacaaacacagagttggtacagtacatacagcagctcacgcagtttcccttgctacaaataatgaagaacataaggatctccgttcgatcgccatagcttcatcaagctcgtctctagacttgtgtagagagattcgaatcggcaacatttcaaaagttcttcatcttactgtaaatggtggaaggcatcgtgtagttctataggcattttcgcctttgagacagttaaacatggacaaatgtaactatgggttcctctaataccttgttgtagtctcactttagcttatttatgtaatactttcttctcaagacgaaggactcgtttcgctaataattaaaaataataaattataaaaaccagaaaaacgagtaaaaaaagcagagaagaaaaatcaaacatacatacacacaagtctcgctaagagaaggtcttgggaagaagacgattcgtcgattcaggtttctgctatcatcttcctcttcgggacacagtttcccttttcctttcttcgtcggaatcgcttctcttcactcaccggttggagaaacagttaaattctgacaaaaaaaaatg

SEQ ID NO: 6231 - DNA, 3000 bp, Unknown
  misc_feature (1)..( 3000): cDNA_ID_1813795_gDNA_ID_1621084_Annot_ID_170467 3000 nt of promoter + ATG
ggtgcaggtcagagtaaatgctttgctttgcttagcagagctggttcaaacacttgataaactcgctgttactgaaattctgcaaacaattcaacgctgtactgctgttgatcgttctgcaccgacccttatgtgtactcttgcaatcgcaaacgcaattctcaagcaggtaggtaaaagtagtttactttctcaataatattagatgtttgaaaatcttaattttcaatatttttcatagtgccttctccatcatttctttctagtatggagttgaattcacttcagaacacgtacttcccctgattataccacttctcactgcccaacaattgaatgtccaacagtttgccaaatatattctatttgtcaaagatattctcaggtatacctccgaccaatcctgtcctgtttccaagttcttattccccttataactgcatactgttgtaattgttttcaacatctggtttgtctatcctctggtcactgaacaggaaaatagaggaaaaaagaggagttaccgtaaatgattctggagtcccagaagtaaaaccaggctgtgtggcggatgggcttcagtttcaaacaccaaccaaaaaaactgaaaaggttgcttctgcagcaaagaacagtccagcatgggatgaagattgggccctcccgaccaaaatttctgctccaagagatcctggacccgcaaactctcctcagtttaacaattctacagttcagtcacagtcatcgaaccggacatcagtaccaacaacatgccctgcagttgacctagagtggcctccaagacaatctttcaatgccactgctcagccagctaatgatgagactcggataaacgcagcaggaacaccaacaactccgagttttgatgaactagacccttttgctaactggccaccacggcccaacagtgcttccactgcctctggcggtttccataacagtactaccactcaacctccaatcaacaacagcggttctggtttgagaaacaatttaacagacggtaggcagtttcagacaactaacaacgacttctgggcctttggtaatgcctccctctcttctatgaaatcacagcaagagacttcgggtatcagggcaagtaacgcagatcctttgacctcttttgggattcagaatcagaaccaaggaatgccgtcttttggaagcagttcatatggtaaccagaagccgcaagcagacatcagctccatattcagttcaagcagaacagagcaatctgcgatgaaactcgcaccaccgccttcaatagctgtgggaagaggaaggggaaggggtagaagtgggacatctatctctaagccaaatggttcaaagcagcaacaaaccgaacagccatctttgttagatctattgtgaatctagcttttggtgagacattgaggtaaaagacagtacctgtgagaaaacagacgcatgtgctcattgttttcttcattagtcattctaatctcgtctgtgatttatcatagagcctctgtgcagtgcaatggataggagatcttaattgttttcatcaacatagtgtatatatctcttccagtttggaatatgttccagaaaagaatcattgattactcgttgtacataatatctccttctaaattgatgatttatagttatgtataacatgttttgcaagagatttgaaatcttcttatgtatcaattcaatgcttgtaccctttttttatccctcgagttcttaaggtacttagtccctagtgattaaccaaattagccagcatatttcttttagaacatatatcattttagaaaatatgttactaaacgatatgtttgggcctttgatgatgaaaaagctaagaacgattttcttttggtatgaaatgtttgttattactattccctttagtatttaccaaagacttcgcagggggtgaaaaaaaggatcaacctgatgttatcatattacacgtgaatctcccagatcgagattttgctacaagaatcaagaaatattatgtagggattcgttgtggaacgagagaaagtgtgttttgtttgcttaactttaaatctcagttttcttataaactttttatagccgtcttttatgcaaaaccccttgagtttttcatgccttaacttgtgaatcgtgatagagtaagaagattatggatattgttaagtgttaattaagatcaatttcatcttctacgagatggtattcctgtacgttttccaatcaaataacttcattttaccattgttattatttaagaatatgtatatatataagaaagtgagttcgatattttcatttgtatgtatataatgtaaaagattatacaataagacaataataaagagattaaggaatcatttacgtgttaatcacacttgacttgagaaactcttttaaattgaagtcctcctatagacccgtcgccgttatcttggcgccatttacgtaccctccttttttctaaatcataatccccaaaatccctaacctaactaaactaaatactacctaactaactaccctattatcaagatttaagacattgtttatctatcccctaatcgtacgtattacgcaatgccactatctaaaatacacttcattacagtttactgtggtaaaaaagataagtatcaaacatcaaaactaccaagaaattaccaatttgtgtcggtgaactcatatagacaaacctatgtggtaatcaaactattagttaaaaaaaaattgaacatattaagaagattacagaataatacatgtaatcctccacttgtcagttctataaaatattaattaaaaaggaaattcaaattgaagtaactaagaacagtttttttagcagttaagctgaatttcaaaaagccataatcttcgctctgaatctcatcagccccggtctccttctctagctatatatatacgtgtgtgataaagtcgtaccctcaagccaacacaataacaagaatg

SEQ ID NO: 6232 - DNA, 3000 bp, Unknown
  misc_feature (1)..( 3000): cDNA_ID_3048061_gDNA_ID_1621084_Annot_ID_170464 3000 nt of promoter + ATG
atcttcttcttcttcttcttcgcctctctctctaatcaaaatttttgtcaatttgaagtctctttgactcttctttcaccgccgcagttaaaaacctcgtgtgattcttcttcttcatatagattcccagaaacatcgaaactggtgaaccgtgtacgcttcgtcgttagtgatgcggagacgaaagatatcgccggaaaatcattggcctagattcaatccattagagactcatcggagacgtctacgttagcgtacccaatcctcctcctcttctgggttgtttgctgatcacacatatcttctttcttcgattctctctcaggtgattctttctttctccgatcacttttccggtctattgtgtaatccacgcaccaaaaaatcagatcttggaactcaaattccttatttgcagcttgagtttattaaaagtctttgtctttctgggtttatactataagttgattaactttgacatctaatgtgtatttgctggtaacagggcgtgtcctgtgtaatcgtttagtggatgtgcaatgcaaaggtcgtgtagaactagaagaagagtttctgtgaacaagtttaatggaaggaacagcttttacaaagtctctttgtctcttgtttttctcctttgggttcttctcttcttttccaccttgttgattagtcatggagatggtgccaaaggtaaccttcaagttcttttctttggtggacatcattgtcgttttattaccttaaagcatgttaagaaccaactcttgtgtacttgtagatgagcctttgaacgactctatgggaatggctgatccggatgatggtcagtcagatgagaaagttgtgccctttgatggaccattatccttagcgtctgcttctgttgatgttacgtctgatttgagtcggaatgatgatgtaaacctgtctgaagaaagtgaagacaaagaacaggaagcagagatcagtagcacagtttcagggaatgatattgaaagcaaggacacttaccttttgaagcaaagtgagataaataagaaagatacagggattgatgcaggaagcaaatatgatgactttcccaagaaaagtgagattaacaatacaggtacgtggaatgatacagaaggcaaagacgataataactttttgaagcaaagtcaattgaacaagacaggcacagggaatgatacagaaagcagtgacaatgagttcttggagcaaaatcagatgaacaaaacagttttagggaatggtaccgagatcaacgtttcaaaggttgatcaaccatctcgtgcggttccgcttggccttgatgagttcaagagcagagcgtccaattctcgaaacaaatcgttatcagatcaggtcagtggtgtgattcacaggatggagcctggagggaaagagtacaattatgcatctgcttcaaaaggcgcaaaggtcttgtcttccaacaaggaagcaaagggggctgcaagcatcctaagcagggacaatgacaagtacctcagaaatccttgttctactgaaggtaaatttgttgttgtagaactttcagaagaaactttggtaaataccatcaagatcgcgaattttgagcattactcttccaatctgaaagagtttgagcttcaaggcaccctagtttatcccactgatacctgggttcatatgggaaacttcacggcttcaaacgtgaagcatgagcagaacttcacacttcttgagccaaagtgggtgagatacttaaagctaaactttattagtcattatggttcagaattctactgcaccttgagtttaatagaagtctacggtgtggatgccgtagaacgaatgctggaggatttgatatctgtccaggacaacaaaaatgcatacaaaccccgagaaggagattctgagcataaggagaagccaatgcagcaaatagagtcacttgaaggcgatgatggtgctgataagagcacgcacagagagaaagagaaggaagccccaccagagaatatgttagcgaagactgaagcatcaatggcgaagagtagtaataagctgtcagagcccgtggaagagatgaggcatcatcagccagggagcagaatgccaggggacacagtactgaagatactgatgcagaagttaaggtcattggacttgaacctatcgattctagagagatacttagaggaactgaacctgagatacgggaacatattcaaggagatggaccgtgaagccggtgtgagagaaaaggcgattgtggctttgagacttgacttggaaggtatgaaggaaaggcaagaggggatggtgagtgaagcagaggagatgaaagagtggcgaaagagagtggaggcagagatggagaaagcagagaaagagaaggaaaacataagacagagtcttgagcaagtaagtaaaagacttgagtggatggagaagaaatgcttaacggttttcaccgtatgtctagggtttggcattattgcggttattgcagttgtgattggtatgggaactggtctagcagagaagaccggtagtggggcttggctcttgttattgattagctcaacattcattatgttcgttttgtctctttgatgagagttttggtcttatttttacactgtagagtcatgttaccaatggatgaaatataccttgtttttcaataaccggcacacatacatatacttagcaattttctcaataatctaatgcctaatttgtaacatagattgtattcgatacaatgaagtcttcttatatagtctatagaaaaattgaaaaaaatgggcataattcttttgcggacgtaagtaaaagtgaaagtaagtgcgttgagtggatatagtaggtgagtgggtacaagggacccgtgagtactacaactttcaacgaggcttcattttcttaaataacagaggagctggtcttcgttatatattgaatttgtgggagactttgatcgacaacttattttaagcaatg

SEQ ID NO: 6233 - DNA, 3000 bp, Unknown
  misc_feature (1)..( 3000): cDNA_ID_3048091_gDNA_ID_1621084_Annot_ID_170461 3000 nt of promoter + ATG
gttatgaaattgagagagagtagaacactaaattagcaaaatggctgcaaaaacatcaaatttagttgctcttcttctctctttgtttcttctgcttctatctatctcctcacaagttggactaggcgaggccaaacgcaacctacgttagtattttttacactcattttcatgcttataatataggtctcgtctcgtctatatacatattgttatataacttatatttgtattcaccttctttgttattatatttatagattttttttgtttggagaaactaatcatacaatgtggtgcaggtaacaatttgcgtttggattgcgtttcccatccctctcctcctcctcctcatcgttccatggcccctccaatttttgtaccgccttctacatcacacaaaggacaaggcccataaacaaaatcatacaagtaaccgagaagaagtgatcaaaatttcataccaaaaaaagaagtgatcaagattccatatagagaaaagagtattgtgtaagaagaagggtcaagatttttcttttattgggtcaagcttttacaagttgactattataaattatacaacttattgtgtcttatacaagttgaaccttttcagagcatgttggaattttaaatcatatattgtgaatatatatgaatatgttgtatatcttatataataaagtcattttagataaattgattattgtactctcttttccacaaattatagtattttaatcagaactatttttttgttattcgaactgaaaccggccagaaaaaaaaaaaaaaaaatttgacgaaattttcatatctaaaccaaattcaaaccgttctggtttattctgatcgaaccgaattcatgacctaacaacaaccataattaaaacatacatacaattcactaaccaaaattttgctacaccgtccctttcgtccgaagacactcacacgtccaaacatacatttacacatctcaagtcgagatttatttcaaactaaaccttttaaactattaaggagatccacaaccaaaagaaaaaagagagcaaagtgaaacaatttattttcgaattacataaacaaatcccaaaagttaatgccaaatgaagacattatactcaaccacggcatctatatttacaaccttataagtctttggcagtgcatatcctctagcaaacctgaaatcgccggtacctccgatgatcggcaactctctctcctccagcagtatcggattccgtccatacaacgcagcggtgctgccgttaaactctccttccgtgaacacaaagttaaagaccattgtaaaaccaaacgttttcatgtccgtcgatgcgtacaacccctgagctctccccacttccttcgagctcagctcaggtccctcagtcaccggggcgtcaacaataagaaccgcaccgaatacagtggcggaggagtttgttcccggggcttcagcgactctgatggtggtgggtttgtcaccggagatgatgtcatggaagtagaagtggaggtgtgtgagtttatccggcttatttccttgaaacggagtcgttttggagtaaggtttggattgtgttacggtgatggtaagaaggagaacagttgagaatatcaaaggaagtagaagaagcagaaaaggtgtagccatgttcgttatttgtaacatatgtgacttattgcatgaaagcacgaatttttgttggtttatataacatttttgtgtgtgtatgtatattgttttcagattggtgacaataacatatccgttgacgaggaaaactaggaagttagatttgtagacaactagatattcccacccctacgaatatatatgtaaatgataaggtgtaaacaaacaaacaaaaagaaaaaattggacaaacaacaaataaggaaaaatattagattttgtattgcgatgactttgctgaaatttgcaagaaattgttgtctatattgatgggattacagtaaatggttctagtgttcagtgttctctaatgatcttcgttttgtagaccatgaatgactaattaactagaataatacttccatgataattaaaatttgtattataaaagaaacatgtgttcgagaaataaagaccccatgcaaaaaaagaaactcaaatttgatttacaagtgatgatacaactgatacctcaatcgtacgtcatctccacaagtatacaaataaactcaaaactgccttatttgccccaaaagaaaaagtttaaatcctgcaattttctcaaaatcagttgtattattttgtatacaaccacaactatacatcaataagatcaatggttcgcataccaatgaatgacacaagtacaattacaactacaaccgttgcttaaatttgaccaacaagatgtgagttgttccaaaataacaaaaattaaatatgtactacgtatttagctcgagaaaaatgaggaaataaaacatttttatcatttaatttctaattttcctcctttatttccctttaaataattgaacgtaccggcaggggataattcaataaaataaaatacccgatgcctcaattctcacgcatattcactcgcgtcacgaccacagatccttggagctgaggctgcgtgagagacacgagcaaaaaaatgcgtcgagggtgttagataatgtgggcaatattgttatctttctccatataacactttaattattattttttccgctttcattttttctcttccctcttcttcttgttctcattacatatcaatcaaccctaaaaaaaacttatcttatgaatctattaagtagatctctaatctctttcctactatttatatagactccttttgttgtagcctacttcttgcatattaaccccttgtgtctctcacaatcccactagtactgaaacatagagatagacttagctcaagataagctaatttgttttcactctaatatagagagagagagaaagagatcggagaggaaaaaatg

SEQ ID NO: 6234 - DNA, 3000 bp, Unknown
  misc_feature (1)..( 3000): cDNA_ID_1813809_gDNA_ID_1621084_Annot_ID_170459 3000 nt of promoter + ATG
acaaatgtcaattaaaaatcaacttcaaattactatggaatatctcaaggaaacttattgtagaaatttggtggaactagtaatcaaacttgttcatataaatgcatttggccttttgggttcgttgttggtctagagtttaacggtttagagattgttttaagattttatttcccatgtacaatgaaagtctaatacaaataagtactataaactaagcgttatgatcagtagattataatttatatcctactatattatttgggaagtacattttaaatgtaaccttaatttttgtaagtaattacataggtatgccattagaaataaaattttaaagagtaaattaatttatctctttaaggattaaaaagtcaaatactaatttaattaattaaatttaattaaaaaatgaaatatattattaatttccaaaaataataaccaatcaaaatcaacatataagatttgatatctaaattttaattaatttaatttaattagaaaaacaaaatacattattaatttccaaaaagtaaccagttaaaatcaacaaattatgtttgatatctaaattatcatattaattttttattaattattatagttcacttctcatcgttatatgattctatttttgcggaaaaataatatcatcattataaaaaaataattagagtttttttgcatatgccataatttgaatttttaaaaacaaatataaactgttcaatacatgaaaaaatattataagggtaaaaaatagatttaagaaaactttttactgagtaacgggtcataatttgaaatatttatattcaatttcatacatattatattgaaaatttataatttatatatactacaataattaataacatgttagatgtgattcaatttttaatacaagctggaaaatcctagaattgacgggtttagatcgatattaatacaagatagtatactacaggtgaaactcttaaattaacaatcaaactacaagtatataatcttaaacactaaacaatatagataatatcaacaaaacgtatacaactcacagtttactatacatttaaaatcaaataaaataatattatatattttttaatcatctttacaataaaagtttttagtttaactaaaatataagcctacatgcggtatactgcaggttaatatctagattatagagcttattggatctaaagacgggtcatcaaagatttcctaaactgaagcaaaatatactaaatattcaaatatctatatgttaccaaattataaacaaataagtcaatttaatattttatatacaaaatcaattaaatcttaatcacataaaaattagcacaaaaaaatgtattcaacaattaaaaatttatcaaatctctgtgttatataagttttgatactatattcaaataaagtgtaatataccttttcaatttgtattctttaactaatttaagctaactaatatatttgctaatcttatatctatcaaaaccgactatcgtttcttatctctatattatttttgcaagatttttttggtggatttggataaaagtgcattcgggtcatatggtacattcccctattaaataaatatggtgcactcctatgttattagctaaaatatttagattataattcagagtcatatcattaataaaattaatattaataaaataaataggtttttggcaagacggatttggagggacgggtttttgaatcaacattaataaaaaagtaaaatataattaatccaccgtttcaatacgggttaaatctttaatttattattttttaagaccactaatattaaacatatcaaatcatcctaatttagaaaaaattatataaaaccaaaaatgttatgtagtatgtataatgttactatatataaaattaaactataaaatataaatgtactagagaatgatacaatttgcaaaacttttatatatgaaaaataattcttaaattttaaaaattactactttaaaaaaaaatcacgggacgggtaaagaaattacagaacgtgttttattttggaattgggttatatggtggatgtatttgaatcaatatttataaaattttaaaatattattaatatgctgttttaataggaattaaaaacttcagttttttaacaattgtctcatgaattcgtggtatagttttacttaataacaattataaactgtaaaatataaatattttataaaaataaaattttcaagttttaatatatattactttgaaaaaataaatcatcccgccggttaaaatctagtttcatgtataataatcttacgaataaatatatacaagatgaccaaaatgaaaacaaaatttagataatcaacgcaaatgacatgatacatgccactaaagttttgcttagttccaacgacctttttgcctagttcgtttaatcgttttgtttaaagcatatattatcgtgtcgttaacgaaaaatgagttgagagaacttgatcacgttgattactaaaatctgattagctgtcgatgattacctttaaaattcaagtctattgccattataagatcatgcaagaatgtgggttaaaaaaaagaaaatctagaagtaatcaattatttcggatagtagagtaggtagcgtcagaaaattctgctacaacaaaaggggtattattgtcaatttaataaaataacacggttaggttcgtcgcttacgtgtcgagttcttagataacctttgaatgcaaaaatacgcagtttcgatccaacaaggcaacgctttgtgaccaaacagtcttttttttttcccttataaaacaaaaaaaaaaatgattttcttaataaaaagaagggaaagaaggaaaaacacacaaagcaacttcttcttcttgttcggcttttatcatctctgaaaattgctttatttggttgaattcattggattgttgatcgagattggtttactgattgatcgaaagtatg

SEQ ID NO: 6235 - DNA, 3000 bp, Unknown
  misc_feature (1)..( 3000): cDNA_ID_2125311_gDNA_ID_1621084_Annot_ID_170453 3000 nt of promoter + ATG
acaacaacaacaacaatattgatttgaaaagaaaaaaagatcttggtctgactcagttgtctagttttcaagcccacctgaaagaacccaaagtgagcagaactagtctggttcgcagaaaactggacttcaaattccgaaaaacctatttattttgggccttaagaacttctttaaggccttttagtgattccatgactattttgaattgacatgttgttctccttcaaggcttctcctttacttattttgtagagagtgtaggcttattatagggactacttacttatataagttgtaccaaggtaatttagttggtataatttctagactgtaattttcaatcatcaatgtattttttcaactaggaattacatagtcacactcacataagtatcatatgtcatatgataatttgatcactaggtactgaagtgtgtctacaagctatattttttctcaaactcagatttagtatatttgcaatattgtttctctaatgatgacgaattaaattatgtatggaccgctaacatatgtgaccactcagttagaacttctcaatgttttattttatgcattgtacaatttcatgaactctatcaaaacatttgttgtatatgtttattttacaaagatagttttggtaccctatagttgcttagttaacttgcttataccctaaatcttaatcaacaagaaaacgtaaaacccactcagtgaatcaaattatcaaccaattaacgtaaaacgcatgatatcatgttttataagatgtgttatgtgtaagaccaggtttgaaaaagtgtgaaataatataatattactcttcgattgatccttaattgcgatatctttcgtatgatttcaactatatatgacgcacttacaagttacaacgatattaattatattaatatcgttttctcatatattcatatatgcatatgatatgactgaattatttattattcgcctccacaagttacaggactataaattattcatctccagaagttgcgttgcaccactaaatatgaagagaagataaaaccgaacaggtaaaagggacgtttaccaaaatatcaacctaatcttcccctaaaccaaatttttccaattaagtttattcttaagcacaatcaactctctgttactttaaagtattctcgtgaccactgattgtttttcctggtgtataagtaagtaccacaaaatataagaacatgacataagactctataaaatatgtataactaaacatttttcatttgtagccagataaaagaaatctatgggccggaagtcgtattatttgacacggcacttttggttaacgtataaactatctgattttataagctgtcaaaacaaaaaaatggtaaatttaacattcataaaatatcatgatgttccacaggtcacatcagtgaaagactaaactttctgattttttgtaaaattgactatgaggacatgcatgaattaatattctacgaccacaattacttctctaatctggattgaaaaatggccaccgtatacatttctttaaataacgtttttcaaattttattataaaatctaggggactaccatattatatgtataaacgtccatatccatcttagaaatgttatcaataataggtctgaaaaatttcatagaaccacacttattttggagctgaattcaatcccccaacgtactttctcgttcttgttatgtttcgttgtcgctttgtttatatttcttcttattttaggggttttttcagttcgattttgttttgtttttagttagcggacgaaaatatacagatggtagtactaacttttctcctagcattctcatctatgtgtgtgtgttatacatttatatcggtgctcttggttgaccttagaaggtactttatatatggttcgagggtccatatggataagttcagattaaacatctaaaagtgcatcttgtgaccaaaaaaaaaaaactatccatatttaaatgcaaaaagatctttggatgaattattatgacacaagcaatcgcgatagaataggaaaataataaaatgcatgcatcctcagcattggttgctaaatttccagttcgattttcaatttcgaaaggtgggctccatttgtttactagatgtgtttttttctttctttttgttgtgaatgtttactagatatgtttattttcaattatttgtatacgtgtgggtcgcaaatgccgcttgcgtggtacacaaaataatatcaatcctttgagaaaattaaaagtcaaagtgcataataatatactcagtatgtttttttcctttgcagatattccatgcatatgctaaataacatcatttatatatcattaaaaatgtacaacaagaaaccaaatgcatatgctaaaccaatccatataatatgttttgcaggttcatttaaatcgactaattatattatggttttttttttttgcttctgatattgcatctaaattgttgttgaactcttttccgccaatagaaacaatatttcaaatttgtagcatcgctaaataaaatacataataagttgaaacaatatagttgttgagtaaattatataatcatctttgctattgttaattctaaatttatttaacacaaaaagctaaccattaagcaaagaagaaagtgacatgatgatcgaaaggaacattagaaacgtcctcattgtccgccgggaaatattttggagaaggacatcgattaatctatagattagaggacacctcttagtttaaataatgatatcgttatacacctaatgaaattaaataaatgctcaattcatcaataaataatttaatgtgtgtttcctaatactcggaacattataaccaccaatcaccacctccaaacttccctatataagacacgacacccattctaagcatcactagctctctccctctccctctccctctccatctctctgctcgcttgtgacagtaaacatg

SEQ ID NO: 6236 - DNA, 3000 bp, Unknown
  misc_feature (1)..( 3000): cDNA_ID_2125304_gDNA_ID_1621084_Annot_ID_170451 3000 nt of promoter + ATG
aaccagaacactcaacaagtaatggcggctatgagaatgagaaccgccgggaaaatgagcactggtgttgaagccaacgagattggagctctcatgggtcttgctggcttcaacggcgcaaccaacgcagtgaatcaccctccaaatgggattcaacaacagcttcaagctccaccgttaaacaacgtcaacggcgtcactaatcacaacctcaccaatagtaatggaggcatgatgatgaacatgaatgggtacaataatcatcatccaatgaacatgcagagtaggcaaatgatgcatcagcctcagcaaatgatgtaccaaagatcatctttcgttccagcatcaagcaatgggtattattacaattatacccctagtccctacagttattatccttattacccttacgcaagtgatcagtaccaacaacaaagtagtcattcacatgcaacaaacatgtctagtgaagaagacgctggtaataacaatagctgcaacatcatgtaaagtgtggatgcttgctaaggaagatatctatcttttgcttttggaaacaagacttaaaagtttaatcttttctggagtgtgatatattagtgtttggtttttctttctctttttttttggtgtgtgtcatgtagctgttttggactgacatgaagttgtgttggttgatatataaaatcctagaatgttattgatgtttcttgtgagatgcttttgtttgtcttggttctttttcatgagatccggttggtgcggtcgaaacatttgtagatgaggagcgtttaaagcggttggttttgtcacaatgtggtttgtgtgtatctctcgaaaagatattctctctatccactcaaaaagttattccacctgctctcgcttgcctcttggtaggtgtctcgttttacgcgtcacctatttttattaaatgcgacatggttcaaaattttggacttgtgaaagtaataatgctaagccggtcatgcatcaatcagttctttgttttaaatttgatatatttccaagatacaccgatggaaattggtatttgcttaggaaaaatgtttatcagattcgaaccatcttttgggccacatgaatttcaagaaacattttggggtaaagcccaacttttttttctttttcaaacgtatttaaattctttagagcctacacaagattccccaaccagatgacaaaaacatgcaaacgaaaatgctaaacattttgtctgtttatttttgacaaaatgggaagaagttttctcatttaaaagttaaaatgcttttaaaatcgtactctaaaaattggtccaaaataaaataaagatcgtaccctaattttgaggtttagttatgatttctcaccacaatcgcttgtccaaatttatacatgtgaaataatcttatttaccaattatgatttaattaatttaattgttactgaaaaatacattatacaatcactatatgaaactctaaccacaaattaatagcagtgcaggacactaaaattataagtaactagaaaacatttggtacgagtgaaaataactctatgtaatgttcggtccatttgcatgctatagtaggtttatattaataatgtggtttgtgcataataatggattaccaaatggacacttaaacgtaagaagcatcgagtttaggatagtggaccattctcttaaattcttttcacacttgagttcctactttttacgacacgagccgtgagatgtttgcctttgtttttctataatcgaattttatcttgtagattacaaaattatcgagagacttgcttgtgtcttagtttctgattaagtggttataaaaagagactaagaatacttagataaaaagagagagatagatttaagtatgatttctcgaattaacaattttccggtcccttaaatgtaattaggtgctttggtaacgcgtctaggatactagagctttcgtatcacacaataatcaagacaattagtgtgattatttattcaactataaataatacgaggtttaatgcaataattcgagatattttgccacgtaagaaggtggtatctggatacatagctaaatgaaatttgctaatattttatcgtcactttttagtattgcctttctttgtattttccctcgtcaatgtttgctttctctgcttttctgcggatgccattgtatttaatttgtaatttagtatacgtcgctactagctttttcacctgtgaagccaacacaaacatattatctttggggagaatcccaaaaaaaggaaagttgaaaaagagtaatcttttaattttgatttcttaagactcttaaatacttggaactgattgctaactgacaaccaaattatggattttaagatctattatcgatcaaagactcatagttatacgtactaatcaacctacctaacctacctacctcaaataccattgtaagctaaaaaggatgaatcatcgagttaggctctcatttgtcattaagcttcttctttgtttcactagtcattaagcgttgcacattatacgcaactttcattaaatgcagacttcgataaatccggtactaaagactatagagtgtgacaaaaaaaaaaaagagtacaagagtgaaatctcataaaataatacaaagacaaacaaaaattcccaaaacaaacaatttggaaagaaaggtcactgaataatgaaaaaggaaaatgccatctgcacatcatgcaaccattaaaagaaattttttataccaaacttagtttaatgatagaataaatttgtaacgatactataacaaagactcatgggtgtgaaccaaagacaaccacgttctctcaaatactcacacacacactcctatatataagtatctaatctaatcaagaacttaatttctctcacccgaagttaataattcagtcagaaacacacacacacacacacacacacacactcaaaactgaattgacttgtcagaaatg

SEQ ID NO: 6237 - DNA, 3000 bp, Unknown
  misc_feature (1)..( 3000): cDNA_ID_1813832_gDNA_ID_1621084_Annot_ID_170450 3000 nt of promoter + ATG
aaaattagaaaaccgacattattgtataatggtttgtgctagtaattttgttatgttgctattcggattcaaactcttgtatgttattgacaaataaaaaaatccgacaatcatgtatttttctaagttttgaaagaattaacttattttaaatttctatattggattattaataaaataaaggactgagtagataatgtcaaaaaaaaaaaatgagtagattaataaataaatgagagggaaaaaaaaggcgagattggcggtggtagatgtaggagaagaagagaacaaaacaaggaggatacagttggctatggaatattatggttcataatgcaaccaaacacatataattgaaatgaaccacacacacgcttttaattatacacataagagtgatcgagcaccattacattttctttctttgcttcgttgtaaagccgactttatattatcatctctttttatgtaaaagaaagttgtaatgggttttaataatatatataaacagaatgggtcaatctaataaatattcggaccacaatgttaaaaattagttatctgtttttttccggccggaaacaattatggtgatttaaaagattatcatcatcaatttttattttttttgacgttatcatcaccaattattgattggtatatattcttctacggtttctgtaaatttatcatgaaattccttactatgcttttttttggttaaagaattatttactgtttttgataggaggaaaaatgatcgtccacgttcagtatacggcatcatcagcaaaaccattcaaaaatgtttttactggaacggccaaatatggtataacgacttatagcattgtgtacgtgtgttatacaataacaagttctctaaatgtttcgaagtttacatggtataagagcctctatgaaatggaaacctaattcgttatcatggagctcgtccaatggtgagaaagaactcagcaccaagttggtggaattatcaacatcataagagagttcttctagctctttggtgcaagtgacatgtgagaattacaaaaaatgggttaagaattaaaaatgcactcaaattattggtttgttagaatgaaagtggatcacaaatagaatgtggtcgtggagctagaaactggagggtagaggctcatatcagaactcacctcaaagtccatatccgtgtcaaggcaggcgtggacgaggacatcaattaaggccgtagtactgtcccgtattaaacacaataataaaatcgtaccttgaaagctataagaaaatagaagagagtgaacaatcgacaaatgacaacgagaaacatttaatgaaatgaaaatatctatgctccagacacagagataacccacgggcagccaatgaagcactccacttgcgaatttgtaatagaccctacttgacaatgagtagaagagccatatcatgtatatttaatatttaagttggtgtgttgtagaatacgtagaattgttttgtgccataaaaattaagaaagtgtttattttgttttcttagctcgtgtataatcaaatttaagtagttgaattcgtggaattgtagtaagtaactgtgtgcttcgactaagtgtatggtgtgatggtgtcgtggtgacatttcttcggttcttccaaaggaagttaaaccttgcactgcccgcttgatcccgtttgagagaaatgagtccaataattaaagatatcataaatttcttaagttaaaaacagtgtgttgaccgatgaaatattatacaaaaatgtcttttctacctaattgagagtcacacatctttgatccaatttttctctattacatctttgatacaatttattacatctttgatccaaattgcactctattacatctttgatccaatttttctctctatttttctaccgattacacaataacatattaatttgtccataaagattgttatgaatggttcagtgttacaaaatctccattattccaccttgcatattgctgcggaatgcccaagaaacaagactaaagaggcgaataaatcacagaagcgaaaacgctctaaaattcctaatctaatagacgcattcgcctctttgatttattcgccacaaacaagttttgttagtataacaaataaaaattttcccttcgcagaaacaaagtcgagattcgacaaaacgttcaccattcgaacaccaacaacgacgaaaagaagctaattaataaaccaaacagaagagaaagccttggcctgcaaataaccgtcatgacttagtgctggctgcaactaacgccatgaatggtctatcaattaagaactcttttgatgtaattcactacaaaatctaaatttttgacccgctacaagatttaattgggagatacgttgaatctcaaaaaaaatcgtaagaaactacaatcttccttcctataggcatgaagcttgttgtatgcttcgccaacgttacgtgtatgacttataatgccacgtgacactctcttagttggcggtttttgtctaaatcttttatgtgacgtggtgcgttctgatattcttattggtcaattatttttgctgatgtggtatgagaaaagtcaaaatcgtttcaaggagatttgttatcttagctaaaacaaaaagaagttattacaggaatagaaagagagagagacgaaaatttacgctgatgacgtggtaagggaacgacggagtggggaaccacaagccgttcttgatattcaacgtggtttgctcatggcggcgcgtggtagactcgtggtggcgcgtgggaacagaagcttttcatctataatcagaaaatactcattgaaaagtccatttccctctattttgttctttcttatttcttgcaatttcatctctctcatttttttttctgataaaggtgcaatctcatctcttgcaatatggtattaggagaaacgaataagaaagtgatcaagaatgtgattaagctcttaacg

SEQ ID NO: 6238 - DNA, 1291 bp, Unknown
  misc_feature (1)..( 1291): cDNA_ID_1019898_gDNA_ID_1621084_Annot_ID_170471 3000 nt of promoter + ATG
ttctatcatttccggttttgcatacaacgagagatcagaagaaacctctttcctgctcaaggagatgttgctctctggatttcacccaaatcacattacgcttgctagcattctccctctttttgctcgggtgggaaacctgcaacatgggaaagagtttcactgctacatcctgagacgccaaagctacaaggactgtttaatcctgtggaactcccttgtcgatatgtatgcaaaatccggtgaaatcatagctgcaaagcgagtatttgattcgatgaggaagagggacaaagtgacatacacttctttgatcgatggatatggcaggctgggtaaaggagaagtcgcattggcatggttcaaggatatggacagatccggtatcaaacctgatcatgtaactatggttgcagttttatcagcttgcagccattccaatttagtgcgtgaaggacactggttgtttacgaagatggagcatgtgtttggtatacgccttcgccttgaacactattcttgtatggttgatctttattgcagagcaggttacctggataaagccagagatatattccatacaataccttacgagccatcaagtgctatgtgtgctactctactgaaagcgtgcctcatccacgggaacacaaacattggggagtgggctgcagataagttactactagaaacaaagccagaacacttaggtcactatatgttgcttgcagatatgtatgcagtaactggttcttggagcaagcttgtaacggtgaagactttactgagtgacttgggcgtgcaaaaggctcatgagtttgctttgatggaaacagattcggagttagatggagagaataataagccgatgaacgatgattctgtcatcaatcaggagcaaagttcagatgaagaacgtcttgtagaagtaggataaagaatcaaattctgatagaaatattttatcaaactggagaatcaatttgtacataaatcttatatacaacaagttttaattgcatgatttcctgtaaacataagtttacatgaactaggggatggtccttcgcaagtatgagtaacaagcataaacagcattatatatgaaataaatatgagcccacctaaacccattaagggcccattaagattggagatactgcttttttaagagaggtcactttttccacagtgaaaccctaaggaaacttcggcaagctccagagaaacgagagttccgtaatcattttctcttgttgttcctgatcgcgtagctcaagcgaaaaaaatg

SEQ ID NO: 6239 - DNA, 3000 bp, Unknown
  misc_feature (1)..( 3000): cDNA_ID_3048083_gDNA_ID_1621084_Annot_ID_170469 3000 nt of promoter + ATG
acttgaaggaatctactgcgcctaagtgaatctgatggtggattgattctgagttgttaagtctctctcagatgaggcttttttactttgctatattcttttgccaaataaaatctcaaactttttttgtttatcatcaattacgttcttggtgggaatttggctgtaatgtgtgctgaggctcactttatcgagtacatttgattttctgaggctcattttccttttttttgtctagaaagcattttctcacttattattggtgcttaaatttgaaggacaaaaaagattcgaattatatatcaactattaacaataatggagcaatacatttaacgttgatacatgatactctgttggcgttttacaaatcctagagagtcaaaaccattatccaatcgctggcttgtttcctactttgcatctctcttctcatcatcatcaatatcctttatagcatcctgcaacacacggcaagtaaaagatatacatgagacagattcatttcactttacatcttttaagtttcaaccaaatgtgggacttttctgagcttatatgctacgaagctttgaaccagttggtttgatatcagaagtgggaggcaaatataacgcagaacagagaaagaaaagaagtaaacaagtatgagtttacctttgcaaggcttgtcacatatgttccagccaatgcagtaaccaacagacccaccccgagagttaaaagctggccgtttcctccaggcaagccaacattagattcttcttgctgaagcgacatagacagaagattgtcatttgatgattttatgatgcttgccagagtcaccatgtattcacaattcaacaggatatcagacacagtttctacaattcaagttaacttccataagttgactagcctccctcgtattgagtacatgtttaccattcgatatcgatctccttttcattaagtcaaaaacaaaacttttagctgatgattttagctagctttctaccctacacaagtgctgatcaacatgaacttattgtacaccataggcttgaaatgagagaagataggcatgtttttgtacagttcatttttttgtgtcaaagtgatatagagattagataaaaagacaacagaactcacaatgattgctcgtccaaaagccccggcgctgacataagcccaagagcctggaagcatacccaaccagctgcaaaaacagtatgatccatgaatgagtatgtaaactcagactatagcttatcaagttgaaatcttgttctcaaatgcaaaacaaattgaatcaactcctggtcaagattgcttgagagtaaacaccaagtggacattaagtgctgggaactaattgactactacaactcaagtatcaagcttctacagcggatatcatagggaaataagtataacaaagttgcaagaacacagaccttcctaatacataaggcacaaacttcacagacgtcaacccgtacaggtaattgccaagagagaaaggaagtagagggcttagccgaaggagagtaacaactctaaacccattttcaccaatcgctttatcaatggcgaggaacttcttgttgtcttcaactaacttaaggatgcgctctcgggcaaaatatctagcaattaagaaagcaacactagcagccatctaacacaggaaaaccaaaataacatatatcaacatgggaaggtcacttgatgagattaaggattgtgttcttgggaagaataaacttacagttccactgatagaaactatgatagtgccaatgagtggaccgaagagaagaccagccgacatcgtcaatgggagagctggaatggctagtatctaacacaaatgattcaaaaaacaaaaccttgaaactggggtcaatgaagagtataaaaaacatcaaaagcagatgaagaagtataaaaaagcttgcctcaagcccagcatagacggcaatgaataacgcatacccagccgtaccataacctgttgtttgattcatcaagaacacaaaactccatcaacttacttctatctaaatgcatcatcaatatctaaaggtctattctcactaagttctattagcttctatgtatcgaatcgttaccttcgatgtaagtggagaattgagtaaggaaagtattgatctgatccctgtagacatatccaacgccggcgaatccaccaacagtaccaatcaacaaaactccggctaagatagtacccttaatagcagcatcaccttccgatccgccatcatcatcgctctcagacttaacatcatcttcgtcgttttcatcattagtggatttagaattgaagaaccaccggagactctgaggaggcggagcggtagatgggagagactgttgcttcttcttcttggtttgctttagggaagagcatggtttaaggaaatggaatcgtttgtagagtctaaaggacgaagaaggaggaggaggagagcagaagcgggagttgcaggtgaatggaagagaagaggaggaggaggatctgagagtcagacctagagtgaggctgcgcattcttaagcagctttaatggagatgatgatgatgaagacgaagattggattgaagcagtgccatctcagtttgggcttttggattggcgcggctttgttcttgccaagtatcgtattttcggatgggcttctggcgatctagagcgccacgtgtctatctgttcttaggatcacgaaattaaaattagttttcttccagaaaaaactacaaatcaaaaattcaagaaaattgaatttatatcgcatattcgcatcaaatttttttgcaaccaattaattcagacaaaaaaacaaaatttttttagaaaataacattttaaggaacttgatttgtttagggcttaacttgaaaattaagtttttggcttcaaaaaacaaaaacaaatattataattgaacgatgctttaaacgacagcgtttagtgtttgttaagctgtaatg

SEQ ID NO: 6240 - DNA, 3000 bp, Unknown
  misc_feature (1)..( 3000): cDNA_ID_1813836_gDNA_ID_1621084_Annot_ID_170449 3000 nt of promoter + ATG
acgtcacataaaagatttagacaaaaaccgccaactaagagagtgtcacgtggcattataagtcatacacgtaacgttggcgaagcatacaacaagcttcatgcctataggaaggaagattgtagtttcttacgattttttttgagattcaacgtatctcccaattaaatcttgtagcgggtcaaaaatttagattttgtagtgaattacatcaaaagagttcttaattgatagaccattcatggcgttagttgcagccagcactaagtcatgacggttatttgcaggccaaggctttctcttctgtttggtttattaattagcttcttttcgtcgttgttggtgttcgaatggtgaacgttttgtcgaatctcgactttgtttctgcgaagggaaaatttttatttgttatactaacaaaacttgtttgtggcgaataaatcaaagaggcgaatgcgtctattagattaggaattttagagcgttttcgcttctgtgatttattcgcctctttagtcttgtttcttgggcattccgcagcaatatgcaaggtggaataatggagattttgtaacactgaaccattcataacaatctttatggacaaattaatatgttattgtgtaatcggtagaaaaatagagagaaaaattggatcaaagatgtaatagagtgcaatttggatcaaagatgtaataaattgtatcaaagatgtaatagagaaaaattggatcaaagatgtgtgactctcaattaggtagaaaagacatttttgtataatatttcatcggtcaacacactgtttttaacttaagaaatttatgatatctttaattattggactcatttctctcaaacgggatcaagcgggcagtgcaaggtttaacttcctttggaagaaccgaagaaatgtcaccacgacaccatcacaccatacacttagtcgaagcacacagttacttactacaattccacgaattcaactacttaaatttgattatacacgagctaagaaaacaaaataaacactttcttaatttttatggcacaaaacaattctacgtattctacaacacaccaacttaaatattaaatatacatgatatggctcttctactcattgtcaagtagggtctattacaaattcgcaagtggagtgcttcattggctgcccgtgggttatctctgtgtctggagcatagatattttcatttcattaaatgtttctcgttgtcatttgtcgattgttcactctcttctattttcttatagctttcaaggtacgattttattattgtgtttaatacgggacagtactacggccttaattgatgtcctcgtccacgcctgccttgacacggatatggactttgaggtgagttctgatatgagcctctaccctccagtttctagctccacgaccacattctatttgtgatccactttcattctaacaaaccaataatttgagtgcatttttaattcttaacccattttttgtaattctcacatgtcacttgcaccaaagagctagaagaactctcttatgatgttgataattccaccaacttggtgctgagttctttctcaccattggacgagctccatgataacgaattaggtttccatttcatagaggctcttataccatgtaaacttcgaaacatttagagaacttgttattgtataacacacgtacacaatgctataagtcgttataccatatttggccgttccagtaaaaacatttttgaatggttttgctgatgatgccgtatactgaacgtggacgatcatttttcctcctatcaaaaacagtaaataattctttaaccaaaaaaaagcatagtaaggaatttcatgataaatttacagaaaccgtagaagaatatataccaatcaataattggtgatgataacgtcaaaaaaaataaaaattgatgatgataatcttttaaatcaccataattgtttccggccggaaaaaaacagataactaatttttaacattgtggtccgaatatttattagattgacccattctgtttatatatattattaaaacccattacaactttcttttacataaaaagagatgataatataaagtcggctttacaacgaagcaaagaaagaaaatgtaatggtgctcgatcactcttatgtgtataattaaaagcgtgtgtgtggttcatttcaattatatgtgtttggttgcattatgaaccataatattccatagccaactgtatcctccttgttttgttctcttcttctcctacatctaccaccgccaatctcgccttttttttccctctcatttatttattaatctactcattttttttttttgacattatctactcagtcctttattttattaataatccaatatagaaatttaaaataagttaattctttcaaaacttagaaaaatacatgattgtcggatttttttatttgtcaataacatacaagagtttgaatccgaatagcaacataacaaaattactagcacaaaccattatacaataatgtcggttttctaattttaattttatttgtcagatttttttcgtttttgacattgttttatattttttctaggtattaaagtttagatgttggatttataacatagtttttaggatttagatttagaatttaaactttgattattttgtcttataaaaatatagactaagactatttaatttcttaatgacttttcttcttttcgagactattccttaattatgatttgaaatatacactaaaaaaaaaagttgacaacaacaaaaaaagtggaccaagacgtaggtccttaaaacggtgccgtaacaaggacctctcgcttgacaaaatggtcgcgtgaataaataaaagcaacgttagtcgcttctgagtaaagaaccaatcccaaagctcatttattctttccttttcaattattctttcaatttttccgatcgacggaggttgatcggcgacggcgtaatg

SEQ ID NO: 6241 - DNA, 3000 bp, Unknown
  misc_feature (1)..( 3000): cDNA_ID_1813817_gDNA_ID_1621084_Annot_ID_55340 3000 nt of promoter + ATG
ttcataattgtacattttgatcagcataactattgcttaaaatttccatattggttttaccttaattgatcaaaagtctttcttttggatcgaaattgagacaattgttctaccaactgtacttgaaaaactgctatatttctcttgcaatttggttatctcctgatctcttttacttatgatgactctgttagatgctgctttcatgagcgtttctttgttaaactaacttggtcggtcttgttgtcactttcaccaactgaaaagaattaatatgttttaagtatgttaaattgctgtcaagctagctagggatgttgtaccgaccagcggaaccggtggagcagtaactgatttattaaaaaaggttgtgaaaaaactgatctggttaactttttgagccggtcctcctcagtaggaccatctttgtcaaaactttgatcagaccgaaaagctgtgttcaaccacattagcctaaagcttagctcacaaagaccatcagaacagaacaggctgaatcatcatcacatatttttttaacaaaaccatataacaaactattagaactgaattctcataaagctatcaaaaaccctccttttttcacaaacctgggttgaattagtagtaggtttagccaccttatctctgaaactttcttgataaccttaattatacatcttacaatgtttaacctatggttttgtttaacctcaattatacaaaaccattaccactaatgggctaatagtgaatctggcccaaaatgtatttgcccttttcttctttagccaaaagccttctcaataagtcttcttcttcttctctgatttctttctcccttcttctctcggtcttgaatctttctttgtttgctaatatggggattaatacttaaacagagaagtttgtttttttccaacttaattcttcaagggcatttcaataaataacactaagtcccctaagtgacaaacgacgacctatcagctaagcaaaaacccttagcttggcagaggcgtcaagggtttcaaatggggaaatcaaagaaaaaggttctaaataaatctctgattactcatcctagcaccagtgacgatactctccaagtattcttctttcttaccatgtttgtttcatgttttttggaaatgaattagaattgtaattagacaaagatcatgctaaactttttgcagttgttcgatccaacatcgtctcctacaaaggaaaaagttaactggaacaatgttcttggcatttctgattacctctctaaacaagccaccagaggttttagggttctctgttaatatttgttaatttctcggttctttttttttgtgatttcttcctctcaatttggttactacttaattatgatagtgaaaacgctatggactggagaaactccaaaagctgaatcagttaaggagacaatggagtcttacttcaaggctcttctagggtttttgctctgttgtcatggaagcactcttggtgctggtcctactttgtcttcaatcgtacacggttctgttaagcaaatcgttgactccagcttcagattgtttcagggttctgtatctctttacggtaataatgaaaagttttatacttttcaactatctcaatgtaacatctattgaactcgtcttgtcaaaggatagtgtagccactgtttcatttgctttcaacatacacttctcgtgagtgctttaactgtggatgatgttgccggtgttttgtttgtatctgttaaccagatggatcatatgaaaagggggaaaagccgtctatttcgcagctttcaggagcagttttggaggcatgctctagtttcaagaaggttcctacaacaaacctcatcgcgattggcagtgctatttctcaggtttcggttatcatgaaggatgttcttaatgagatgaaaaaagtgaaaccagcttgtccttcaagtgagggtgaggcatctggtgatgatttttctcctgagcaaatagaagttgctaaaatggttgctgacattgtgtatgaggcgatgacggtaataatagtcattcgagtaatcaccaggatgatggagaaggagaattcaaatgagaatagcgtgtttgtggagtcgctagagaagctacttaagttgtgtcaaagaagtggagtagtgatagaagagcttggtacttgcgtttatcatccaccgctgaagatagacaagataactcaaacggtgaagatactagagggaaatctcgatgaagttgaggctcaagttgagtatatgaagaggtcttccaacgcctttccgggagtttgcagaaagctgcgagacgcgatcaaactcatggaagttggattggaaaaaagaaaggatttgaatcaaattctgatttctcgtcaaaacactctctacaatgctctccaggtatgtttcttcttacctatttttgttttgtttcatgttttctcgcaatgaattcgacaaggattaggccaaaatgttttgcagttgttggatccaacagcttctccgatgaatcgatgttcttagatctctgagcagccctctaaacaagataccatagggtcaatgttcggtttcctctgcatttacatgagaaacagacatgtctcttataagttaaagactgcttcaccttttcccaagttcatctttcgttgagactttatgttcatgagcgtttcttgttaaacatgactctgcttctttaaaggatctgaaaacttttcccaagtttatagtctctgatctttctttaatactttcctatgcaatgtttttgatcgcttcatagtcaataacaagagacttgaagttttttctttaacttgaaaagcaaaattttgtaagggcttttctgtaaataataacactagtttccaaagtcttcaaacgacgtcgttacgaacctgtgaagctttagcttcgacaaaacccttaagctagtagagacgtcaagaggttgaagcaagacaaaa

SEQ ID NO: 6242 - DNA, 3000 bp, Unknown
  misc_feature (1)..( 3000): cDNA_ID_1813813_gDNA_ID_1621084_Annot_ID_55342 3000 nt of promoter + ATG
aagatgacctggttagagcagcttgtcagcttgagctttctatgattcaaaaatgcaagctaactccagaaggggttgacactatgctcactcatgataagaaagcaattcaaatgcaggtttgcttactcaactctctgttatttcctttttagtcttttgatatttttgttgtgtaatgtgaattctcgttgtaggtaacacaagatcaagaactcctaacagagaaagtacgacacctgagtggagttgcaggagttgagcgcatggaaagtgcgttgttggaaacacgaacaaagtactttcaggcgaaggaggatggaagccctatggctaatcagctcgcacatttcttttctccaagcccagcttcatctccagttcagtctgtgtctagttccagcagcagaagtaaagatagcataggtgttgaaggatcaaatcgtgttaatcgttctttattgaaggatgatactccaccctcatctggaccctctagagtcagtaatggcactgtggacgaggtttcaaatcagaatgagttgatggtgaatgagttcctgcatgatgggaacctcaactttcctggtggatccactgtcaaggatgaagaggacaatcttaaggtttgctttctttgcagttctgcacattgttgttggactcattacaaattctggttatagtatgttcttgccattgattttgtaaatgtgtgttgcagagaaggataaaggagactatggagagagctttctgggataatgtcatggaatccatgaaattggagaagccagactatagctgcatctctaaccttatgaaagaagtgagtgacgaactttgccagatggtaccagatagctggaaagtagaaataactgaaactattgatctggacattctctcacaggtttgcctcatctctctggtctcatattacgtgtctgtcgttttttatatattttagagggtggttctcatttcatcttttattggtagttgctcaactccggcaccttggatatcgattaccttggaaagatgcttgagtttgcgttggctactctgcggaaactctctgccccagctaatgaccgtgagaatgaaagcacccaccgggatttactcaaggaacttcacaggttgtgtgaagctgaagatgagtctggtaacttccgtgctgttgcaatagtcaaggggatccgcttcattcttgagcaaattcaggtctgtatgtacaagctcttttttcttcattcttcctcttcatcagcaatagctttggatagaaagaaaaaatatacttttgctttgcttgtccacttatcagtttcttcattttttattctatatccaacaggaacttaagcgagagataggcataggtcgcatagcaatcatgaaaccctttttgcaaggaccagcaggctttgattaccttacaaaagcatttgaaaagcgttatggacctcccactcaagcctacgaatcactaccagtgacacgaaggtggatatcaactcttttgtctagcaaagaagagtgggaagaacacaacaatacgctttcagccttgaatgtggttgagagatcctccatgggtatttctctcaaaacgggtggaagctttctatccccagtcaataccacgtccaagtcaactgttatggacactgcaggttttgcttgttaccctcattgaagaagtctagaaataccttcttttatagattatagcactaaaatgttttcatttgctttttggttcataaggtcaactatcagaatgcaagggagaaagagttgatttggcagtgaggcttgggttgttgaagctggtgaatcaggtagctggtttaacaccagaagttctaccggaaacttttcagctcaacctctttcgcgtgagggatattcaagctgaaattcagaatataattgtggtaaccacaaggtatgaacgattgttacatttggtaagaagactcatatagaaattagagtactttctcatcttaaaaggatttgtgttatgcagcttgctcatttggcgtcaaatgcttgcaaagagcgaaagcgaaacagaaagtatggcaaagaaattgttggagttgttagatgggaaggaaggagcaggactaacggagataatcgaaacaacaatgagtgaagaagatggagagaagaagaagatgatgagaggattattggggaagagtttgggagaaggtaacacagtgtatgagagagttacaagttgtatatacaaagcggctcgaggagctttattggctgggaatggagaaaatgggaagagaatggttgaaacagagatgaagaaagtaggaggaggtggaggattgaaagaaagggttttagagacagctcgagcccttggtgttgtagcttgtgtctcagtcagagttcatggtccatggttgactcagctcatgccacaacattgaaccaaaccaaaccactcggtaaacttgtatagcctcttgtatatattatgatatatatcaataataattacacgtgtaatgtaagatgcattttgatttgaagatgcattatgctgatttgtaaaacataaacggctttggtccctttttagtgtgtccgaatgaataaggtgttcaaaatagcgtgtgatttgtaatttgtaatttgtaattagtctgaaacgttgtatatatgaatattcttcaattatataaaagcttgctttcaaatatatcaatttatctatcttttgattatattgtccctttttcgtggaccacaagtattaacttatctcatacaaataattcgtgcttaagtttggtgttaaaattattgaaaattgatttacattgaatttttttcgcggtaattgataattcatgaaaatcgatgaaatttactaattttatttcacattaaagtcaataaaatgggaaaatatttgatgagaataaaataaaataaaataaagagaagggacgagaaatg

SEQ ID NO: 6243 - DNA, 3000 bp, Unknown; identical to SEQ ID NO: 6234
  misc_feature (1)..( 3000): cDNA_ID_1813809_gDNA_ID_1621084_Annot_ID_55343 3000 nt of promoter + ATG

SEQ ID NO: 6244 - DNA, 3000 bp, Unknown
  misc_feature (1)..( 3000): cDNA_ID_1813805_gDNA_ID_1621084_Annot_ID_55345 3000 nt of promoter + ATG
actacggattgaacttaatcactgtcattgttttcgtaacaatttgtgacaaaaccacgaaaaaattgtactcacagataaatatttggctatatgacaaaaatatatatcctatatggtttgtatagttgtctaaaattcaacctaagtaggtggaagaaataaatttaaacagaacaggacgtgagccaagagactttcgtatggaaaattaaaggcgcgttgaatagaaatgtagttggcgactagtacatttcagcgatgcttatcctttagccttttacatttcaaggaagcttttattatataaatcatcctgaagctagtctttgttatgaaattgagagagagtagaacactaaattagcaaaatggctgcaaaaacatcaaatttagttgctcttcttctctctttgtttcttctgcttctatctatctcctcacaagttggactaggcgaggccaaacgcaacctacgttagtattttttacactcattttcatgcttataatataggtctcgtctcgtctatatacatattgttatataacttatatttgtattcaccttctttgttattatatttatagattttttttgtttggagaaactaatcatacaatgtggtgcaggtaacaatttgcgtttggattgcgtttcccatccctctcctcctcctcctcatcgttccatggcccctccaatttttgtaccgccttctacatcacacaaaggacaaggcccataaacaaaatcatacaagtaaccgagaagaagtgatcaaaatttcataccaaaaaaagaagtgatcaagattccatatagagaaaagagtattgtgtaagaagaagggtcaagatttttcttttattgggtcaagcttttacaagttgactattataaattatacaacttattgtgtcttatacaagttgaaccttttcagagcatgttggaattttaaatcatatattgtgaatatatatgaatatgttgtatatcttatataataaagtcattttagataaattgattattgtactctcttttccacaaattatagtattttaatcagaactatttttttgttattcgaactgaaaccggccagaaaaaaaaaaaaaaaaatttgacgaaattttcatatctaaaccaaattcaaaccgttctggtttattctgatcgaaccgaattcatgacctaacaacaaccataattaaaacatacatacaattcactaaccaaaattttgctacaccgtccctttcgtccgaagacactcacacgtccaaacatacatttacacatctcaagtcgagatttatttcaaactaaaccttttaaactattaaggagatccacaaccaaaagaaaaaagagagcaaagtgaaacaatttattttcgaattacataaacaaatcccaaaagttaatgccaaatgaagacattatactcaaccacggcatctatatttacaaccttataagtctttggcagtgcatatcctctagcaaacctgaaatcgccggtacctccgatgatcggcaactctctctcctccagcagtatcggattccgtccatacaacgcagcggtgctgccgttaaactctccttccgtgaacacaaagttaaagaccattgtaaaaccaaacgttttcatgtccgtcgatgcgtacaacccctgagctctccccacttccttcgagctcagctcaggtccctcagtcaccggggcgtcaacaataagaaccgcaccgaatacagtggcggaggagtttgttcccggggcttcagcgactctgatggtggtgggtttgtcaccggagatgatgtcatggaagtagaagtggaggtgtgtgagtttatccggcttatttccttgaaacggagtcgttttggagtaaggtttggattgtgttacggtgatggtaagaaggagaacagttgagaatatcaaaggaagtagaagaagcagaaaaggtgtagccatgttcgttatttgtaacatatgtgacttattgcatgaaagcacgaatttttgttggtttatataacatttttgtgtgtgtatgtatattgttttcagattggtgacaataacatatccgttgacgaggaaaactaggaagttagatttgtagacaactagatattcccacccctacgaatatatatgtaaatgataaggtgtaaacaaacaaacaaaaagaaaaaattggacaaacaacaaataaggaaaaatattagattttgtattgcgatgactttgctgaaatttgcaagaaattgttgtctatattgatgggattacagtaaatggttctagtgttcagtgttctctaatgatcttcgttttgtagaccatgaatgactaattaactagaataatacttccatgataattaaaatttgtattataaaagaaacatgtgttcgagaaataaagaccccatgcaaaaaaagaaactcaaatttgatttacaagtgatgatacaactgatacctcaatcgtacgtcatctccacaagtatacaaataaactcaaaactgccttatttgccccaaaagaaaaagtttaaatcctgcaattttctcaaaatcagttgtattattttgtatacaaccacaactatacatcaataagatcaatggttcgcataccaatgaatgacacaagtacaattacaactacaaccgttgcttaaatttgaccaacaagatgtgagttgttccaaaataacaaaaattaaatatgtactacgtatttagctcgagaaaaatgaggaaataaaacatttttatcatttaatttctaattttcctcctttatttccctttaaataattgaacgtaccggcaggggataattcaataaaataaaatacccgatgcctcaattctcacgcatattcactcgcgtcacgaccacagatccttggagctgaggctgcgtgagagacacgagcaaaaaaatgcgtcgagggtgttagataatg

SEQ ID NO: 6245 - DNA, 3000 bp, Unknown; identical to SEQ ID NO: 6231
  misc_feature (1)..( 3000): cDNA_ID_1813795_gDNA_ID_1621084_Annot_ID_55348 3000 nt of promoter + ATG

SEQ ID NO: 6246 - DNA, 3000 bp, Unknown
  misc_feature (1)..( 3000): cDNA_ID_2125352_gDNA_ID_1621084_Annot_ID_55349 3000 nt of promoter + ATG
ttctaaaacttttttcttgctgaccttatatactggccaggtacttccaatggttgattgaggaaagagactacactgacccgcagctgcatacatcgtatgctctctcacttgccagatcagcacttgagtgtgttgaagttcaaaatggtatccaagaagctgatgttccaaatggtagtgaggcacatgatagcaatgttggaagtatttctttgtttgaagttgacgtacgagaaagattgcaggcctttttgcagtcttcagatctatatgatcctgaagaaatcttggaattggtagaaggatcagaactgtggttggaaaaggtttgtctgtcaaatttgtttccttcgattttgaatggttcttaaaaagtgtcatttagatgtgtatgcgcacataggatgcttcatgattatgttggtgcaccgattttttattcaatggattttttactgtcaaaattatgtgtgtttgcccatttgtcatgtgtaatttttttttatttgataggcaatcctataccgaaggattgggaaggagacattggtcctccaaattcttgctctgtaagttgatttaaataccaagaagtgataaagaacaaaactgaattgtctatctgattgtgtgagcaaatatagtttattttattgtgaatttgaatgtggttactgataagatcttctctggttgggcgccaggaagcttgaggattgtgcagctgcagagcaatattgtgtagagattggaagaccagatgcatttatgcagtaggttcttttccttcatttcgttacttattgtgaatgccattgtatgatcttttttccttgtgaaatccctttaaacaaaaagtttatcttaggttgcttgatatgtacctggatcctcaaaatggtaaagaacctatgttcaaggctgctgttcgtctgctccacaaccacggggaatcccttgatcctttgcaagtattggacgtaagaaacccagtcctcctccatatgtgaaaaagacactgatattgcctcttatcctacagctttttcatttggtagttgtttgatgatagagctgatatctttttttatatgcagaaattgtctcctgatatgcccttaaaactggcatcagatacaattttgagaatgctgagggctcgggttcatcatcatcgtcaaggccaggtaaaaattcacaacccctaccaattgtgtgtttttagttgtcaaatttgccatgtgtaacagtaatatgtacatttaaatgctaagaagagataattattgaaagtagcatagataaacttatcaaaaagttgttactctgttaaaagtgccttcaatctgtatgtggtgtgggtatagctttagtgtctgaatgctctgaattcaattgttacagatcgtacacaatatctctcgtgcattggatgtagactcgaggttagcaagattagaagaaagatcacgtcacatgcagataaatgatgagagcctctgtgattcctgctatgcccgtctgggaactaaattatttgctatgtaccccgacgataccattgtctgttacaaggttagtcccccgcttacaatataattctgttgcatgctatatccaaattcattagggattaagtatatctttcttgcacggtttcttttctctgagggtatttttgttgttcctcttccttcttctcagtgttaccgacgcctgggtgaatcaaagtcagtaacaggccgcgacttcaaacgagatgttctgataaaacccggttggttagttaaccggtagcagaagaagcccatcttgttccgcatcaattggctttttttcacttgacctctaaccctcacaaacacagagttggtacagtacatacagcagctcacgcagtttcccttgctacaaataatgaagaacataaggatctccgttcgatcgccatagcttcatcaagctcgtctctagacttgtgtagagagattcgaatcggcaacatttcaaaagttcttcatcttactgtaaatggtggaaggcatcgtgtagttctataggcattttcgcctttgagacagttaaacatggacaaatgtaactatgggttcctctaataccttgttgtagtctcactttagcttatttatgtaatactttcttctcaagacgaaggactcgtttcgctaataattaaaaataataaattataaaaaccagaaaaacgagtaaaaaaagcagagaagaaaaatcaaacatacatacacacaagtctcgctaagagaaggtcttgggaagaagacgattcgtcgattcaggtttctgctatcatcttcctcttcgggacacagtttcccttttcctttcttcgtcggaatcgcttctcttcactcaccggttggagaaacagttaaattctgacaaaaaaaaatgtcgattaatatgagaacgctaacgcaagcactagccaaaacggctgcagtgattgagaagacggttcaaaccacagtccaggaggttacaggtcccaaacctctacaagactacgagcttctcgatcagatcggttccggtggtcctggtctcgcttggaagctttactccgccaaggcacgtgactccacgcggcctcagcagtatccaacagtttgcgtctgggtgcttgataagcgcgctttatctgaggctcgtgctagggcgggattatctaaagctgctgaagatgcgtttctcgatttgattcgtgctgattcggggaagcttgtgcggttgagacatcccggtgtggttcatgttgttcaggcgcttgatgagaataagaatgctatggctatggttacggagccgctcttcgcatccgtggctaatgcgcttgggaatgtggaaaatgttgataacgttcccaaagatcttaagtccatggtgcgttagaatttgagcaattgagtgagcaaatggaagatagtttactgtttcttataattgttgtaggagatg

SEQ ID NO: 6247 - DNA, 3000 bp, Unknown
  misc_feature (1)..( 3000): cDNA_ID_1813791_gDNA_ID_1621084_Annot_ID_55350 3000 nt of promoter + ATG
ttcttggtgggaatttggctgtaatgtgtgctgaggctcactttatcgagtacatttgattttctgaggctcattttccttttttttgtctagaaagcattttctcacttattattggtgcttaaatttgaaggacaaaaaagattcgaattatatatcaactattaacaataatggagcaatacatttaacgttgatacatgatactctgttggcgttttacaaatcctagagagtcaaaaccattatccaatcgctggcttgtttcctactttgcatctctcttctcatcatcatcaatatcctttatagcatcctgcaacacacggcaagtaaaagatatacatgagacagattcatttcactttacatcttttaagtttcaaccaaatgtgggacttttctgagcttatatgctacgaagctttgaaccagttggtttgatatcagaagtgggaggcaaatataacgcagaacagagaaagaaaagaagtaaacaagtatgagtttacctttgcaaggcttgtcacatatgttccagccaatgcagtaaccaacagacccaccccgagagttaaaagctggccgtttcctccaggcaagccaacattagattcttcttgctgaagcgacatagacagaagattgtcatttgatgattttatgatgcttgccagagtcaccatgtattcacaattcaacaggatatcagacacagtttctacaattcaagttaacttccataagttgactagcctccctcgtattgagtacatgtttaccattcgatatcgatctccttttcattaagtcaaaaacaaaacttttagctgatgattttagctagctttctaccctacacaagtgctgatcaacatgaacttattgtacaccataggcttgaaatgagagaagataggcatgtttttgtacagttcatttttttgtgtcaaagtgatatagagattagataaaaagacaacagaactcacaatgattgctcgtccaaaagccccggcgctgacataagcccaagagcctggaagcatacccaaccagctgcaaaaacagtatgatccatgaatgagtatgtaaactcagactatagcttatcaagttgaaatcttgttctcaaatgcaaaacaaattgaatcaactcctggtcaagattgcttgagagtaaacaccaagtggacattaagtgctgggaactaattgactactacaactcaagtatcaagcttctacagcggatatcatagggaaataagtataacaaagttgcaagaacacagaccttcctaatacataaggcacaaacttcacagacgtcaacccgtacaggtaattgccaagagagaaaggaagtagagggcttagccgaaggagagtaacaactctaaacccattttcaccaatcgctttatcaatggcgaggaacttcttgttgtcttcaactaacttaaggatgcgctctcgggcaaaatatctagcaattaagaaagcaacactagcagccatctaacacaggaaaaccaaaataacatatatcaacatgggaaggtcacttgatgagattaaggattgtgttcttgggaagaataaacttacagttccactgatagaaactatgatagtgccaatgagtggaccgaagagaagaccagccgacatcgtcaatgggagagctggaatggctagtatctaacacaaatgattcaaaaaacaaaaccttgaaactggggtcaatgaagagtataaaaaacatcaaaagcagatgaagaagtataaaaaagcttgcctcaagcccagcatagacggcaatgaataacgcatacccagccgtaccataacctgttgtttgattcatcaagaacacaaaactccatcaacttacttctatctaaatgcatcatcaatatctaaaggtctattctcactaagttctattagcttctatgtatcgaatcgttaccttcgatgtaagtggagaattgagtaaggaaagtattgatctgatccctgtagacatatccaacgccggcgaatccaccaacagtaccaatcaacaaaactccggctaagatagtacccttaatagcagcatcaccttccgatccgccatcatcatcgctctcagacttaacatcatcttcgtcgttttcatcattagtggatttagaattgaagaaccaccggagactctgaggaggcggagcggtagatgggagagactgttgcttcttcttcttggtttgctttagggaagagcatggtttaaggaaatggaatcgtttgtagagtctaaaggacgaagaaggaggaggaggagagcagaagcgggagttgcaggtgaatggaagagaagaggaggaggaggatctgagagtcagacctagagtgaggctgcgcattcttaagcagctttaatggagatgatgatgatgaagacgaagattggattgaagcagtgccatctcagtttgggcttttggattggcgcggctttgttcttgccaagtatcgtattttcggatgggcttctggcgatctagagcgccacgtgtctatctgttcttaggatcacgaaattaaaattagttttcttccagaaaaaactacaaatcaaaaattcaagaaaattgaatttatatcgcatattcgcatcaaatttttttgcaaccaattaattcagacaaaaaaacaaaatttttttagaaaataacattttaaggaacttgatttgtttagggcttaacttgaaaattaagtttttggcttcaaaaaacaaaaacaaatattataattgaacgatgctttaaacgacagcgtttagtgtttgttaagctgtaatggtaagtcaaaataactcgaacgtgtctgactctttactttaccggtaagcggcgacactgatcaccggagtttttcaatcgcggtctttcttctacttaaatccgatcactaccattgtacatcgtatatctggtttaggtcatg

SEQ ID NO: 6248 - DNA, 1291 bp, Unknown; identical to SEQ ID NO: 6238
  misc_feature (1)..( 1291): cDNA_ID_1019898_gDNA_ID_1621084_Annot_ID_55352 3000 nt of promoter + ATG

SEQ ID NO: 6249 - DNA, 3000 bp, Unknown
  misc_feature (1)..( 3000): cDNA_ID_1813895_gDNA_ID_1621085_Annot_ID_55355 3000 nt of promoter + ATG
aaattggaaaccacagttcagagaattacctgaagagtatgtagactgttgcgaaagcattctcgagaaaactctctgtgatcaatgagagaagaatccagtctctgtcttcttatacgaacatgatctgcaacaataagaagaaaaaaacaatgttaggtaaatatacaagtctttgatcgcttaactgtactcaaaattaaattcacgattacagatattgaaaccctaattcaaagaatcaaacacaaatattcgattaattggaagtaaaatcgagtaaatcaaaacaaaaaagatcgcaagatcttaaaagaaaagcgatttttgagaatttgaaaccctaaagagttaattcgatgaagaggattatataaatctttgtttaattttacccaaattgaagagagaaacgagagaaagaacttaaaggcgaatactaaccgaagagaaaaccatcaatctccgattagttatactcaaatcgagtacaacaagggaaagaacttgaaaatttgaaaccctaaacatcgattacagaaattactgactgaagagaacgataagtcatgataaatccagatgaaaccgaagatttgaacgaaaacttacagagcaaaattcaaaatcgccgatcaaagagtcgcagagaaagagaataatgaaaacctttttttttggcattataatagaaatctcagggaatttgatacgcttatatacgccacgtggcacattcctaacgttgtcgccaacgctaataacggctacattacgttttagaaacaaatgttttgatttttgcgtgttgtgattagtgaatgtggccacgtcataagcgttacatgtaaaatttgttaaatattaaattatagcatgccaaaaaagaacaacaaaaaaaatattaaggaaaaagcaaattacaaatacatcttttatgtaacacgatcacattatcattaaataaattaaaatattattattcaaaagtgaaacatgtggacacaaaattatttaccgaaattatttattcttcaaatcctaatcatcaaatagtatattttaatgtttgatgattctgattactaaccatctagaatatttgctaaagtttgtattccctctatttcataaaatttgatgttttacgttttgcacgaaaaagtaaattttttattttttaagtattattttgttagtttaataatattattgttatctcttccttttaatattggccacaaacaaaattaataattatacttttacaaaacattaatcttttgtggaacaagtaaaagaacccaaagcatcaaataatttggaagagagggaaaaattaacaacgtaacaaggtttttataagtcgtccattgttaagaaattgggctatagtctaaatatttttttaacaatgggtcttaaaagttaaaacataaaaaaaaatccaaaaattgtgatgagcttctgcaccgatgcccctttattctacccatttttggtctgggtctggtcttcacgtcggctcttggtacactgccactataaattccgaaagctgctcgtcgaatctctacattactgacatgtttggttagctatctgttcatcgtcttattcaccgggcagaatcattcaagctagctatctattcttgagaaaagctttcgaaaatattgtactgccacttcacctttagaaccttaagtaaattgttcgataccattgccattgtaagaaaggattttttattttttccggtttaacattggttttcattttaacttttaacggatcaaaatattaacagagaagtccgatagtgactgactgactgactgtgacgctttttgtttttagctaccgttaatgtttgttttccgttaacggcgtattttagtgtgcgtggacatatacgctcaagtacgccgcacgcttctcttctttttgtcgcgcattcaaaaaccgaaacgatcagaaaaaaaaaaaaagaatattaaataaacattttggactaaacaattaatttttttttaaaataatttctcgaaagagaaaaaaagagagagagagagagagatggagcttctacagtactaaaagctgagtgaatccgaagaaatctccgccaacggaatattttttttctgggagctgaaaatcgttggtgacgatggcggattctctttctagggtttacggaactctgtttagtggtgttaatatatctctcttctcggatccaccgttgaaaaccccctgaagagtgtttttttttccgggtttaaggtcttttacgtttcgttttttcttgagatttcgtcttccgctgtgagtttctgttctcgcggcgagtttttgtgtagatctgagggttttcaaggcaagagaaagtgtcggtgatgtcgattttctcactcgcgagctcttctggtaaattctcgtttatctattagcttcttatactgtctcttccaagtgtagtgatctcgatttttaaggaattttgaaattggaggaaaaaaagttgtgatgtttcggatttctaattttgtctatgggacctatgtgatatctagttactttgtttctttatctgttaggtcactctgattttggttagtgaatatcaagtcacaatatagatttggaatgtagtttggatttgaacttatcgtgctcaagatttttaggtttatagtttctaaatatatggtacatgatctttagctctggacctatatgttagattatccaggctcaaaaaggcaaagtatgttggaagtgatttgggttttggaccatgtctttgtatattttcatgaatatagaatagtaggttgaattcattaggttgcttaaagacattctttcaaaattactcccgaatggttgcaatacctaatcacatggctagctttagttctgttcttgtcttagctctatctcactgtttttaacgatataacaatcccagattcacaaagagatgacctaata

SEQ ID NO: 6250 - DNA, 3000 bp, Unknown
  misc_feature (1)..( 3000): cDNA_ID_1813891_gDNA_ID_1621085_Annot_ID_55356 3000 nt of promoter + ATG
tagttggaacatgttcttgaacgaatttgctacccagcttggtctcctacctcaccaaatcgagctgattaacttctatgtgctaagcttatcaaggatgaacatatcgatggatatcacccctcattctggaattagtttctcagctagtcaggcatccgcaataaactcttcccttatcagccacaagattcaatttagccctactttggtgggagattacaaacttctaaaccttacttggtttgaggcccctgcaccttcgcaaggtaaagtacttttctacaattgtatctgggaaagaattcaatcgccccatcaattctgcacatttgatttcacatctgcggtcaaagtttcatcacattcaagatagcatagccgaaagaaagtagactgatatagttttttatgttaaaaaagcatctcccagtttgatgctttttggagtatatcaccatgattccttgcatttgcactaagataggtcttaatatgtttgcagcacctctagtggcttcttcacctcataaagcaccatcacaaggatcctcagcaactacgtcagtaagatctccagggaaaaagaggcatcccaatcttattcttatcttttctatagccgctggtgtgcttatacttgccataatcactgtacttgttatttgttcccgcgcactccgagaagagaaagctccagatcctcacaaagaagctggtatgtacctcttctgattacaaggtttaaattataggccgatctcagttaggaatacgtgaatcatgtcaaaaggtacacatcatgtgagcagcacattgggaagttagcatagatgttgggataatgtcaacttttatattgggtttaaagttgtgttgttagttgtcaacagaccttatgtaaaaagccaacagaccttaggaatcaaacaaaaggattgagaaaaatggggatacatagatgatgaatgattgctgtccacttaccagtgtgatttatgttactttcctaaatcctggcaattaacttttagttcttgttcttagtaaaaacttgatcgcatattcctttctttcagtaaaaccaaggaacctggacgctggttcatttgggggatctcttcctcacccagcaagtacacggtttctgtcatatgaagaactcaaagaggcaactagcaattttgaatctgctagcattctaggagaaggtgggtttggcaaggtttacagaggcatcttagccgatggtactgctgtagcgattaagaagctcacaagtggtgggccacaaggtgataaagaattccaggtggagattgatatgcttagccgtcttcatcatcgtaatcttgtgaaacttgtgggttactatagtagtcgagattcttctcagcacctactttgttatgagcttgttccaaatggcagcctcgaggcttggctccatggtaatatctcctctttgcttcccttgctgcctatttttagatctgacattgtcaaaagtagttattgtacactgagttcatctacaagagtggtttatttaagtcattgtttatgcttcagggcctctcgggttgaactgtcctcttgattgggacaccagaatgaagattgcacttgatgctgcaagaggacttgcataccttcatgaagactcgcaaccctccgttatacacagagattttaaagcctctaatatactccttgaaaacaacttcaacgccaaagttgcagattttggcctagccaaacaagctcctgaaggcaggggtaatcacttatctactcgtgttatgggcacatttgggtgagttgctcatatctctcgacagttttcatatacaaccttaaattctgagttgcctattgaatccgcgatctgttttcagatatgttgcgcctgaatatgcaatgacgggacacctactcgtcaagagtgatgtttatagttacggtgtggtccttctcgaattgttaactggtagaaaacctgtggatatgtcacaaccttcaggccaagaaaatctcgtcacttgggtaagtagaaagttcttgtcatctcctagatcttcctgcactttcattgtcgaaaacttaagcttttgaagtctcgaatgtaaaaatttgattctggatgcagacaaggccagttttaagagacaaagaccggttagaagaactagtcgattcaagacttgaaggaaaatacccgaaagaagatttcataagagtatgcacaatcgctgcagcttgtgttgcacctgaagctagccagagaccaacgatgggcgaagtggttcagtcacttaaaatggttcaacgggtggttgagtatcaagacccggttttaaacacttcaaataaagctcgtcctaaccggagacaatcatcagctacgttcgagtcagaagtaacctcttctatgttctcttctggtccttattctggtctaagcgcttttgatcatgaaaatattacacgaacaactgttttctcagaagatcttcacgaaggccgatgatagaagccagggttttcttctttttatttgtttttctcccacttacggtgagaaaatttccaccagagaagcttttgagtttgggacattattacagctctttggattttggattctcctttattggaggatagaattttgtatatatttttgcgttaattaattaatatttgccacaaccatcagatatacaaatagaatttgaatatactttttccaatataaaaaaactatgtacaggtgattagtttgtactgttaatttttaaaggctttttacagtaaaagtttttacagctaaaagtaacagtataatactttttttttatggaataatctaaataaaatataatctgttgaaaaactaatattttaaatataatttttatggtatcaaaccaatatttaaagtaattcctttcttattagttaaaatcacagtttttattattattatttttgatagtggtt

SEQ ID NO: 6251 - DNA, 3000 bp, Unknown
  misc_feature (1)..( 3000): cDNA_ID_1813887_gDNA_ID_1621085_Annot_ID_55357 3000 nt of promoter + ATG
caataaagtaaacagagactcagaagctgatgcaaaagaagtaggtgagcctattccagacaattcggtccatgatggtggttcctcaatttgtcagccacaccatggtagtggaaacggagcaataatcattgcagaaatgtctgagacaagtcgaccatctacagagtggaatcctatcgagaaggatctttacttgaagggagtcgaaatctttggaagaaacaggtaaactggatcttggtaaattattatctttaaacacagaacacctataacgtatttacatctagtatgttttgtccgtgctatctcagctgtcttattgcaagaaacctgctttctggcttgaagacatgcctagatgtgtccaattacatgcgtgaaaacgaagtttcagtttttcgaagatctagtaccccaaatttgctgttggatgatggcaggactgacccagggaatgatgtaagctcttgatcttcctagggtcttttgtcttttcaaattttctgcagtatctgcgactttgggcattgttgtattgaaagttagcttgtcagactgatagggttagagatctattccagaagaaaaaagttctgatccggaaaagccaatttccttgcttaatttttccctgatacctgcattggacaagagaaaacgatagttgaccataagttggcttagacaagtgattattttatttgagattttattgatattagcatgccatgtctgtcagaatcatattttggtttaccgctctcttactttacttgacagaatgatgaggtgcctccaaggacaagattgttccgtagaaaaggcaaaacccggaagctaaaatactctacaaagtctgctggtcatccgtctgtctggaaaagaatagctggtggcaaaaaccagtcctgtaaacaatacacgccgtgtggatgcctgtcaatgtgcggaaaggattgcccttgtctaactaatgaaacttgctgcgagaaatattgcgggtatgcaaacaaattaacgtcaattgaagtaacagaggatcttcttataaccatccattgatttaattcaggtgctcaaaaagctgtaaaaatcgtttccgaggatgtcattgtgcaaagagtcaatgcagaagtaggcagtgtccctgctttgctgctggcagagaatgtgatccagatgtttgcagaaattgctgggttaggtagtcattttaaatctagatctcttgatgtgccatatacaatcaaatctactatttgatgagtaacttaagatgccttgcttattcactcagttgtggagatggttctctcggtgaagcaccaagacgcggagaagggcaatgcggaaacatgagacttctcctgaggcaacaacagagggtataatactgtcatcaaatcatgtatttactaaaaataaaatgcattcattgttgataaatctagtttctcatgtgctatatttaccagatcctattgggaaagtctgatgttgctggatggggtgcttttctaaaggtaaagcatgtgaatatcttcctcattaacttctgtttcatacctcttgtatgtaatctgaacctcatctgatcatcagaactcggtcagcaaaaatgaataccttggagaatacaccggtgaattgatctcacaccatgaggcggataagcgtgggaaaatatatgaccgggcaaattcgtccttcctctttgacttgaatgatcaggtgaccaaatctctcacccttctttctgatagtttcctcttgaatttcgcatatgtcagtaagcttttgatatttgcagtacgtcctcgatgctcaacgcaaaggtgacaagctgaaatttgccaatcactcagctaaacccaattgctacgctaaggtactaaatgcttctctctcatatccattttggtatgaaaaaaccacatgatcggttagtaattataccttctttctcacctctagccactcaaaagttccatttagaaggaggactaggattataacattttgtagaaactaatcgcaattagcactatagaaaacagatgatcaaatctagctttgtaggttatgatcaaaacacacttgtttctacaatctttatgattgtaatgtgtaaagtaacatgtgtatatcatctgctagatttattcaacccttttcgaaaggtgttaattatttacaaaaaagagcgattttcagtctattgtcgtagtaaccatggtctcatcgcttcccgcataagtacggtgtctttttctgtgtggtgtaggtgatgtttgtagcaggagatcacagggtcgggatttttgcaaacgaacgaatagaagctagcgaagagcttttctatgactatagatatggaccagaccaagcaccagtgtgggctcgcaaacctgaaggctccaagaaagatgattcagccattactcatcgtagagccagaaagcaccaatctcattgatgattactggctaagagaagtaacttttataaaaataacttatagagttgtgagagatgatatttgaagtttgataacttaagcttgtctttattaattaattattatagagttgagattttattttattttgacatcgagtttggactttgtataggtgataaaacaatttatgaattattggggtcaataagtaaaaatgtatcatttcgaaaaatagtttcaaatttatggatttttgaacagctaaagccaatctatgtacttttcaacgaataaaactgatttaaaataagtgaacgaaccaatcacactaaaccagtgcctaatctcataaaaagtaatccgactgctaaaccgtattccggttcgaatcggatacggatccgtttcccagttgattagtcggatccagtttcttcttgctttttcaattcacattacgaatctccgacgccaaaattctgcttccggtaacagatattttcgtcgtcgagaagaagcaggagtttagaaaa

SEQ ID NO: 6252 - DNA, 3000 bp, Unknown
  misc_feature (1)..( 3000): cDNA_ID_1813879_gDNA_ID_1621085_Annot_ID_55359 3000 nt of promoter + ATG
gaaaaatccctgagaactcaacaacatcacctggtgatacctacaagggtttaaggaaatttagtaagaatttcacaattgtacgatagtaaatgacgctgatatcacaatatctacagatagagtcccagtacaacattggaaaaaaaaatcctcttaatcaacaactgttcagcatatgcttttaagccgaacaacaacttctcattggactattcctaagcaaccgagctattgattccgaaagtagaacaaatagactccaatagtagcatgagactgaggtcaagaaaaggtacctttcttgtcaactctcctcttagatgaacagtcatagacctcggaatatgccctttgggaacatgttcagccaactcttgcatcttggcctgcaagacaatgattttttactcattagtttgatatcagtgcattcacataaatggcactcattgaccagaaacagaacctcctgaaactttagaaactttgatgctctgagctgaagaataggattcccggctttactattaagacgacagcgactagaaggacacttaaacaaaggcatgaagactctagatgtaacttcctgatttgacatgtaaaagaaaataatcagagttagtagttaacaaaataaaaaagaaactacaatctggcaaaagcatagttgtacctggtaaatctcatgaccacaatcttcacatgtgtaaacagcaaccgccatcaatggcttgacatcggaacaacgggtcacaataccagatatcctaacaagttgcccaatgtgtgaagccttaacctccctgatggtagatggccttccctttgaaggagctttaaaataaacctcactgaataaaagtaaattcattagcaaactattgtaaaactcattccctaaagcttatgtccagcaaatagactcagacaaaacttactaatatcttttaatctcagaaggaatctgctgatgaggatcagaaacatctggattatcagtcccatcatctgctctctgagtcatgagaatatcatgatcatcatctggaaacgcttccgttggttcgggtaacaactcgtcaacagcggcggagaaaattgaaacatatcggcgagtgttttccgtcaaccgtccgagaaactcctcactttcatctttatactacacaatatcaaaagagatgagtggcttctacaatagcaacatccaaaacagaaacaacattagagagaaacaaaaaaaaactcacattgaataagtcatcgagatcgacttgaatagctcgaatcttacgatttgaaacctcttgctacacaaattcataaaatagaacataaaaccctaaaattagggagattcgcgaaaaccctagaagagagaaattggtggaagatattggaaatgagacttacgagaatctccatgtacttagatctgccattagcgtcggcgaaattctcgagaaatcccttggcaagccctatatacaagaagaaaaaaagtgagaatcaaaactcagcgaaaaaagagggaaaagattatcgagaacggagaagaagagagaatgtaacctttgtcgccgtcgaaatcgtggtctttcatggtttcaaaacttgggtcgagagagagagtggaagaggaagaagagaaaggaatgaaccagtgactgcaaaattgggcggtaaaagggttgtagatgacgatgagtttaggcgggaaaagtattatagagagaaatggcggggagtaaaatgaacggtccagatctaatgatcacgtgattaatgtaatgtcgaaactacccctgctggaaataaaaaagaagaggtaacaaaaagtgtggctgccgggattcgagcccgggtccccacggccacaacgtgggatactaaccgctatactacaaccacttttgtgttatttctttcccttagtatttaattaaccaaagatttaataatattatcatctgtttccaaaaaatgggtgacaaatgtggatacaataatgtcatcttcatcatcctccttacgttgaaaactagtgtgatttcttcttacacttgtcttaaatccatagctactatcgaaatttgtgtgtgtgaatttaaagcttttgatttttttttttgttgttgtatatttagtctctctgtattcgactttgatcaaaacttggtcaacatcatctttaacatcgccttcatagtaggcgatcaaaaaatccatggaataaatagcacacacaagtctgaatcatttcccagtctacaacaaatcgttacatcttccttcttctttctcctgtaagtcctcttcttttttttttaatctgttttctttcaacctatgacgaaaatcatcacacttgtcttgattcttcactttctgtctgaaaccaacttttttttttttttttactaggaaggattttgatttcttttttttccgaggtgttacttgttagaacgggataagatcgtaatctttttttttattatgaagatgacatttgaccaaaaaagtataaaacctctttttgtatttgttttcttatatagcattagtatattctgacaatattccaacgagcattgatgatttttgtggaaatagagatcaaagtaggaggaagacatgcaaaatcagtattaaatttttaatttgttatgtgaagataaggtcaagaaaatgacgtatttacttgttggaacttaattccaaacaattatgtaccaaacacgaatccatacgcaattatcacaaatctcaaagtggcaaaacttcacatttaaaattttcccaaaacctaaccaaattgaaatctatctaaccacgtgaagatgtaaatgtgtataaccctttttgtttcgttgtctctcagattctggaatttgagtaaaagcaagaaaaaaagtcaaccgttgcaacaaactcttaaaaagaagcaaagtagtagcagaagaagaagaagaagaagaagaaaagaaaatg

SEQ ID NO: 6253 - DNA, 3000 bp, Unknown
  misc_feature (1)..( 3000): cDNA_ID_1813875_gDNA_ID_1621085_Annot_ID_55361 3000 nt of promoter + ATG
ctcagggatttttcttcccattccttacactgggtttaaggcacttcgagctggcttagtagcagacacctatctggaagcaacgtctgttactcatttcaagaagaaatatgaggagtaaggcgttgttacacctttacactaacgaaacattctgatttagtaacctattccatgtttttctgcatttgcttaagatacaaagcagctttcgtgtgtgcacaatatcagaaagcatctttatacctttttcattatgatctacagatatgagtttcagaaagatgaggaagaacagattgcacgtttggctgaggatggtgacatatacaataagctgtcgcgatccctggcccctgagatttatggacatgaagatattaagaaagctttgcttctccttcttgtgggtgctcctcacaggcaattaaaggatggaatgaaggtgaactttcctgtcctctgatttattctggcaaaatttccatgatattgctatctattatgataaagagtaaagactgtacactgattagaaagcagttgcttgctttagttcatctccgactatattgttttacctatttccatacagtgtccgcagtcttcattgattgagttatggagctttattatttacaaacatgttcagtcattcaagagcacattgcacttgattggaacacattttatctgtgaagatttaaaaacaatacattcattaattatcttttgcagattagaggagatgtgcatatctgtctgatgggtgatcctggagttgccaagagtcagcttctcaagcacattataaatgttgctccaaggggagtctacacaacaggcaaaggtagcagtggagttggtctaactgccgctgttatgagagatcaagtaacaaatgagatggttttagaaggaggagcactggtgagagacaatgcccttttgctttggatatattttagaaaatatgatgtaagagctatgtgatttagaagtttgatacaatctctatctcaggtgctggctgacatgggaatctgtgcaattgatgagtttgataagatggatgaatcagatcgtactgctattcatgaggtcatggagcagcaaactgtaagcattgcaaaagctgggattaccacgtctttgaatgctcgaacagctgttcttgctgcagccaatccagcctggtaagtgaactctcatgatatgaattaaaaactcatgaatgttgagtgatcattgctatcattattgaactatgtatctttgtgtttatgaaggggaagatatgatttgcgaagaactccagctgaaaacattaatcttccaccggcccttctttcaagattcgatctgctgtggttgatcttagatcgagctgacatggacagtgaccttgaattggcaaagcatgtgcttcacgtacatcagacagaagaatctcctgcgcttggtttcgagcctctggaacccaacattctccggtaagttaaatcgcttttacagcattcttgttctgcaaagtcagaaactttaacatgagcatatttggttctctagtgcatacatttcagctgcaaggagattatcaccatacgtcccagcagagttggaggaatatatagcaactgcttattccagcatcaggcaagaagaagcgaaatcaaatactcctcattcttacacaacagtgaggacactgctcagcattctgcgcatatccgctgtaagtagaatttgtgtaggaacttgagtaaattagttggactattgagtgttaatatatttccgatttgttctataggcattagcaaggttgagattttcagaatcagtggcacagagtgatgtggatgaggcgcttagactaatgcagatgtcgaaaatatcattgtatgctgatgaccgacaaaaagcaggactagatgcaatatcagacacatactcaatcataagagacgaagctgcaagatcaaaaaagacccatgtgagctacgcaaatgccctgaactggatctccagaaaggttagtttcttccttcatcttcatcttcatgttctttctgaaaatggatgatcactgagacgagagatttggggtgtgaaaacagggatacagtgaggctcagctaaaggagtgtttggaggaatatgcagctttgaatgtttggcagattgatcctcacacctttgacatccgttttatctgagtaacaccacccaaaaaaaaaaaatggaaacaaaccaagtctctcttgttatgttgtgtgctttatctctattatcttatcacatttcttaacgtagagaccttagaagtggaatctatagaagtgatctcttgattgcagaacaaactttacttttggaaatttagatgtgactttgtactcttgcagttcttttcactctcgcaaatttactacggttttgatctaggtttgattaaaacacttcttagtctaattttgtatccatgtcagtaatatactttcagtttggtataatttgatttcattattacaatcataaaatattgtaagtaccatgctaacatattttcaaaaaaattctaaaagtggaattttgggatttttatgacaattttggaaaacagaacaattttcggtttagtaacataacagatcggttctggatcggtttaagaattaatgggccatattattatacttttaagcccattaatacagagcaaagcccatttacgtcgttgcaatatctcactcactccataagcttttaacggcatgaataattcgattttcgagatggcacagagagagagcgagtattattactagagcgttgtttcccgccaattagcaactttcgccggcgtattttcccggtgaaaaattcccgcgcaatctcttcactccataataagcttctctcatcaatctcgctctcttcgccgactgtttcactccccttctctctcactctctgtgcgctttattccactctccg

SEQ ID NO: 6254 - DNA, 3000 bp, Unknown
  misc_feature (1)..( 3000): cDNA_ID_1808549_gDNA_ID_1621085_Annot_ID_55362 3000 nt of promoter + ATG
ttaataagattctgcttacatatatcttttgattggatgatgtctattggatatgcatataactgcaagaatagttatataaaaaaaacttcaaatcactatggtcttatatctaaaactcaattaccctaaaaaataataatacattaggttagctttcatatcacaaaaactttttaacttgtcatttcttgcccttctcttagtattgcatttttgtatttggattaattacgtcaaaccataggattgactagttcagcaacaaactaaatacacacatcataataaatgccatcaaatttcaatatcttcttggaattgtcgatttatacattctggccttagaaagttcattttgtcaactagtatcttaactaatcatatcaataatacgaaagaaaaaaacacttaataaaatactaagatacaatctcacaaagaggcaagaaccaaactcaacagtggatgaaaaaaaactccaaccacaaaaataagcgataatattctgattttcaagccttaaatatgtgataaactgaaatttaaactcgatttagctaacaacataaaaaaaagtttaggtaacctgatagtgactatttatcattatttttttgtggacacagaaaatttatcatgtaactcatattatataacaaaatgattgtgcaatatgtgaaactggaacgaatttgaatatgaagcctaataaggctcacgaattctatgattgctttatcaacggtcgcctgatcagctggtgagtacaccagaaatttaaactcgtgggtcctatttttatttttaaaaataatcagtataccaaaccaaaaaacccattacaaaatcttatgattattagtgttcctgaaatttcatgtttattcttgaaaaaaagtgagaccataaatgcaaatgaaaattgacccatactgaatatacgttttattatcattattttagcaaaacacatatttttcaaagaatcaaggtcaagtttccatattagattatacttctccatactctgatgttttctatttaaaacgaagacaacaaggtatatcatctgatcatcaacatgacaacatatcacgacaatagacaattatcttcatttgttataatattagttatgtaattattgtattgcataattattagcttcttttgtttccatacacttagacgctgacatttgtgcttatctcatttttttggcgaccttatctttctacgttctatttttgttggggttcaagtttcaacgactaaaaggaatcaattaaaacaaatattttgatatttaactcactctatttcaaaattcgccgactaatcattttcaggtagattcttgtaaatatcattatacacataattgatttgttcaattttaaacgaatataatataaattgtgccggcataaaatataaatattgcggttaaaaaaaaaaaaactttgccatgaaaatatgaagaggtattcgcgtaattgtgtaaatagatttgattaaattcgtcacaaaaaaaaaccgtggcagaaaagtataataagatagggcgattgacacaaatagcactaaaaaactttattattccaaaaatggcatctttttttgaaacttccaaaaatagtatataaaaattttaatcctctataaattaattcaataataaagtttttttattaccatttgtatcaatctcccaaataaaaatgagagcaaacactaatctaatattaaattgaattaaaaacttttaaatagtggaaatatataccctaaattggaaataaaaaacccaaatataatattacaaactaattttaaaataaaaaatctcttttaaatggtgaaaatatataccctaaattggaaataggaaacccaaatataataccataaacttatattaaaatgaatcaatatttcttttaaatagttgaaatatataccctatattggaaatagaaaactcaaatataatatttaaatttatttctaatttattttggttgaatagattttatataaacttgtggtattattattgtccataaaacttgttttagtgttacttttaagaatttttcaaataatcatttgagtgctaattatgtgtaaacaactttttaatgctatttttgtccaaaaaacttaaaaatgtgctatttgtgggaatttttcaataagatataaatttaaaactgagttgattaattaaaagtgtcacacaaaaaaaagtttaatgtgaacaacaacattaattcttttttaaaaaattttgttttatactattattctattaacatgttaattaatataactagaaaaaaaaatcaatctactaaaactaggttttttagcattttataaatatttgtatgagaactttctctaattcagttcatccagttaaccattgttcgcttattctgcaattcatttatttatctgatataccagttaaccttaaatgttgtgtaatcagtcgtaaaattgttttgtgtaatgttacataaattaatagaatcaaatttaaaatgtgttctaattatgctatgacgttataaacaaacgataaattccgattcatgattatgaagtatttcaattgaaaacacaaaaatcgacaaaattttaaaaatattttagatcttacattacatacctgtattgtcgcaaaggaaaatttatttcttgtcctaaaaggccatttggaacttgagctaatgtaaatatataaatgggcttattgggtcctctaatgggcttgcctttgacgtagaagacagaagcatcgttgtgactcccgtttgtgatttaggaatccgcactgcttgccgttttccgtttctactttacttttcaattcagaaacgcctctctcgtcgtcttcaaagctaaattagaaacctgacgatctctctctctctctctctctcgatcggataatatttgagctttgtggttggaggatctgagttagtc

SEQ ID NO: 6255 - DNA, 3000 bp, Unknown
  misc_feature (1)..( 3000): cDNA_ID_3593647_gDNA_ID_1621085_Annot_ID_55365 3000 nt of promoter + ATG
gtttgtttcttctttattcttcactatgcctaaacgacaaaacccaaaataaaaagtgaaccataatattatgaaatatttacatcactattcacatttgtgaaatatttatatcaaataataagcggtgtaatcattcgaaaattttgtatttctaatagtttctgttagttaaaaagcaagtattgtttctcaagtaaaagttttactgtctataatatggtttcacatgatctttgcagatatgaaataaagaaatgtgtagatgtaatgttgttttccttatgaaaatatccttaaagttaatctttttggttacaagtggaatactttatgaaggaatgcaaattataaaatactgttgagaagtgagactggtgaggaaattgtagagatcacaacatgtttgattgattgtctcctctttttgctcctatgaattgttttaaaaatcattttgataactaagaaattctgtattgaggtctatacatctttttaagattggatcaatatagaataattatatgtagcaacagcattcactcgatcatgtgaatttgtagatgactacaaaatacattttcagtcgaggtatcaacttctattagagaaaagtcaattgagaaaagaactacttacaatttgatcatttgttatataagctatcaatcactcaacaaactaattataaaatcgactataataaaattattattaaattatattgattttccttagcagaaaatactaatctttcaattagtctaaaaatttgttttaacatttatgttattgccaaatgaacgccatgacaaacaaacgggtctccttacaaacatacatagctaaattacaaaaatattaaatttggttaataatttttttttgtgtcaattaaaattttgttttaaaaatttgtaagtaaaaccatttgctataacaagaatttatagcttgattctggtgggttgtgttatcatcatactatttcacgtactatttcatcttgtcgactggaaaataatcgttagccgggatctacatgattcaagatattaagaaatagccaattgaaaacgcagtcatctcaagacccactaatttttgatggttaggagaaaagtttaaagatgtttttttgttgtaaattaatgattgtgtaactaataaattttcagacaacaggttacatcagaaattaaattatgagaaggaaaggttaaaaaattctaaggaaagaattgacagaagtccaatcaaatgcacataaaacgaagaaactagcaaaggacaaaagtttcttcactttggacatgacatatcgaaaggtacgtgaatgtataatatatagtttattacgataataataatactgctgcccataacgttgattcactttctcattggttagtgtttttgtcttctcttcttcactttgataacgcggttaaacctttattttgtgtaatgtctttgcatgccacaaatcagacagcacattggtaaatgagggtttgtcgattttaccaaggtaaaaagtatagaaagaacagtaggctaggcatgttcaatcagtttagcttaaatcaggtgggactaaaatgaaagcaaaattctaaatcgagttcgttcggttatgcagctgtcgacctttcaccaacaataaattcatcatgcaaatcatcaaaaaccacgatcggcttcgagaatgaagaagaaagcgatcaaaaatgtatttggagatcaaaaacatcacctaatagatcgaaagggctcgacggtggagccaataaagccagccgttgagaagacaaagggatttagaagtatatagttcatacacaaatcatgcctaccgcacttacgttgggttaggttagcatcaaagctcttactgtttaattatatacatgatcaaatattacttcaagaaaatcgatggataattttgaatttaaaatagtttgatgattattcagattgaaaattgtctcgtgcgtatgtcacttggtcgcttgtgttattggtagttccaaccaaatatttatgtatagcacaatcgatgtcttaagttttctatatgttttcgaagctcatcaaccatgaccccgtcaagcgactagtctattatactattgtagaggattattcgtcgataaaagttaagaaaaacctagcctctttatgatgaaaagaaatcgaaaagctcaatcatgtgactgcgttttgcgctacgggagtatatatagagattttgatattgttatatcactgttgcggtgcggttttagatgcagtatatatcaccattcatggctttagtttctcgatatttgtattttaagttatatttactaacgaaaaagaaaacaattaatttaagaatatgagtcaaacgtgcaattgagattttctaattcattcacaaattcatcatatcatttactatattttagatttttcttaacagaaattttataacaaaaccatattaaatgtaacgtaaataattgagtcattttgaaacgtaacgtattattatattctcgaagtcattttgtgagaagactatacgctatgacgctcgctcatggtcaaagttgggttttgcttccgatattgggtcgaaccgaatataaccaaaccaattacaatcttagtatggctcaatttgagtaaaaccaaaccagttttgtttttctacaaatggtggtggaatattgtgatggtgccacgtggatttggttagcccgccataccgcttcatcttaaaaaattagaaaatcaaaagttttcattttttcaatttcccccgcttccttcaaatcttccccgagacgctctctaaatcccaattttattaatttgttcgtcttcttcttcttctgattcaaagtcaattacagttaaaatctgggtttttcttttgatttcaaatccaagtatcgatcttcgattcctccaccctaataaaaccctaatttttcaaaaaaaaaa

SEQ ID NO: 6256 - DNA, 3000 bp, Unknown
  misc_feature (1)..( 3000): cDNA_ID_1813843_gDNA_ID_1621085_Annot_ID_170516 3000 nt of promoter + ATG
ttgacgaatacttaccttgaacaaaagcagagactttacaaggatgagtcatattcagcattttctccagggactaggaaatacttacagtctctaatcgatgagccgttgtctactaatcatacatctaaaagtgttctggacccattattatcatttatatacaatccgccgtcaccaaagaagtccaagcttgtacaacctgattcatctagtgaagcaagcatggaagacaatagcttaataagggattcaacagaaaagtaagtaattctttgacattttcttgattctgcttgctttatctcatcttcttaaaccttgtctaaagatacatttcgtatttctgtgtgctcagagactgggaatcgccgtctcccttgtcagatacagagctactagagaaggcaaagaagagagagtttgtacaaggtttaatatcatcagccatatttgatcacatttacaacttctaagagcataagtctttgtatatgaaactctcgcaaagtagtctgtactctgtagtataagccaatgagcttctgtttatcgtcaaacttctactttgcttctttacagctcataatcctcaagtcacttgaggtcggagtttccttaacaaccacttcttgcgtagtttcacatctagagccaagaaagttttcgccttgagtttatcttcaagcagatcacaagcatccaatataagttcatcgtccatgtctggtaacgcttgaatagcctcaaccgtgtcctctattgacatggtttgggtttcatcaactcgaggctttttcgggtttatagggcttgtatcagtattagcaagttgatctcttttgttcttggggtcaaacaaaagagagttgctatcttcttcctcagctgaaatagacaaatctgtagtaccactggacttaaattcttggaattcagtttcagggtcaaaccaatccatagctacaaagcattcgttttcttcgatcccagaatcgccacagagcacacacagatctttatagtacggaattggccgagtcataaattgccttgcatctctatgagcctgtgattaattcagacaagaacacacatcaaaacagagacgaaaacactgtaactaaccacacagcatagatcagagcgattaagttacctttatatagtcttgccatacattattatcagctgtaaccatttgacgctcattatcccaagcaaacccatctgatcgaagaatactcttgatcgcgttgaactgtcttctcagagacttataccggttcttcaacacatcaacatcaaagttagactcaaatttcgcattgaagagattaaccatctcagtccatgcttgtttcctgaaaacaccttcaatctggtttcctctcctcgcttggtccaacatcagatcaatgaaataccggtccattggaggatgccaagtagtcctgcaccgtgtgacactgcttccttttgagttagacctgactgttgacgattcacatattctgttgtacccatcatcttcctgaatcagtgtcttggattctccctcactaatactctcctcagctgaaacatacatattcattcacaggttacttaagaatctttgatctttggtgacaagaatgtacaatgaaggattcaagtaacaatcaatagattaaagattgtacctttgtgctcagacattccatctgagtaaaccaagcacagatctttgtaacaaggtatagactttatccgaaaagatctcgaatcaggatgaatcttcaataacccaaaagcaaaaacaaatcaatccctgagaagaagacacaaaatcacaagtaaacaaaacgcaaaacgcaccttaagatactcatcccaaacgcagttatcagcaacaaccatctgtctagtatcatcccaactaaaaccatcttctatcaaaagattattcacagatttaaacaagttcctcaatgtcttatgcctgtttttcaaaacatctttgccataaagaaacttgaacttggcagtgaaggaacaagacatgaacttccaagctcgtttactaaacaaatgatcttcaaatctgttgccttttctaacttgttccaccataagctcgatgaaatactgatccatttcaggtgtccacactgttcttaatctctcattgccgtttctactgctcattatctatttctcccttcttctttacctgcaaaaaaatcgattgcaagaacacaaatttgaaatcgagaaatcaagttataaaatcagaaatcagattctcgtaagaaactggatcagacccataatagagattcgactaaattagctaaagagcagagaatcttcgcttacagagagtcagagctccggtgaacgggagttggagtaccggtgagattttaaggataaggttgtccgggataaggttatacttttattcgtaaccaatttagaaacctttatgggcttatattactttattgggcttagtctattataggcctatgttaaacgacatcgtctattctagggtttgtttttgggccagagtgacgtttgttttcctttcgtcgtcgtcgtcgtcgtcgtcttcgtcttcgtcttcgtgaaagatgtttacaaaattttgctgtttaaattgatagaagaagattcgacctttaaaggctatctgaagaacatctccatcatcgcctggtgttgtaagtttcttttggattttgattcttgttgatactgactagtgagctcatttttaacatttgttcgtaccaattctgggatttgtaattagctgagtattgagctctaaatcttgaaaaattagtgagtttagtattttgcgaaagacccattaacagattatgatttgtgcgttgtttcttgccaaatacttttgagaggtttatgaaacagagtaaaaccctagaattcaattcctttgctctgttatgcagtcttcatttcatcaaattcaacacagaagattcg

SEQ ID NO: 6257 - DNA, 3000 bp, Unknown
  misc_feature (1)..( 3000): cDNA_ID_1810073_gDNA_ID_1621085_Annot_ID_170514 3000 nt of promoter + ATG
aaatagaggatcctaagttgtctgactgtatagttgaacccagacaaactcttccttgtaacttaagctcgagtcacacgagttctcacaagtgtacaccacgattgttgcccaatcgagagattccctctcgttcttcccaccgaagaagaacagtagctgcggcatcacctgataaaaccgccatcgaaatgatcaagaacagagccaagcttccaatatgcaagaacagagaaatgaaatggggaaaattgtgtgttttattggtttaaagttgatttgattcagctaaaattgttggccaattcttgactggtttataaaataagcaaaagaagtgactaagaccaagctaatacaagtttataaagaagagaagaaagaattacctgaaattcaaaacaacgaggaccaccacaagatttgcaactgggaagctcagatttagagactcgtccgcttgctattggccaaaggggtttagcaccagagctccgggaatatctgtatcaatacgtatttcacaaatcgatgttatgggagaatcaagatcaaaagtatgcagaaaatcataagcgtttgaatcacacctcagaacttgttcaggggctttgtctacgcgttgctggaaattaacccaattctttttatcagcatctccctgtacaagcatggaaaatgagaatcatttgaggccttttgaagtttgcaaaaatggccatgacaagtgaactgtttacctcaaaatcgttcattagcgatttcatttggtcgtcaacttctctctttgagaccaaaggtttagctacttcatcatctcctgacatctcagtatcatactcactttcatcctcattgatcaatacaaattctttccataaactcttactcgcaactgcacaaaccgaaaaattcatatcactagttatacaaagtttcagggctaggaaaagtttgtgaattcagctaacctttctgcttttcagttggagcaaccccattattgacagggcctgagtcagatgtttcgctaaccgttcgaagctgttggcattcggttttatgacccaagcgccaatgcagggcctggaaattagaaacaacacagattgttcaaatttgctcaaaagagcagaatctagcggaacaaaagaaactacgatgcacatatgcacacacctggtgtttcggtgaacagtatcgagcatttttgcagccgctacatagtttatctcctttccatgttccacaccaagtgcaaagcggagctaaagtgaaacaaacaatatcaagaattgacaattaaaagagaattctcggcattcagtcaaacccatcaatcagttcataatacctccatgacccaatggcttgtctgttccatcgtgctttggagcctcactcgagtaaaaaggattagctcgaggcaattggcaacggaaaaccttcgtacttcaggaacaaaaaaaacagtactttagtgtaacaacccacttggagaggagacaaacaatacaaagatgcaatatatagtaagaggtttctttctacctccgcatagccttctctggggcacgtttccattgttcatgttgatcacgaaggagacaagacatagatggacacatgaagagaaacaatgtccgatgaaaagctgattccttgtctgttaaaggagcataaagctgccaaatttccacaacaaatttcataaataaaccgacaaaaaacatgcaagaaacaacaaaatagtttgtatgaaacttacttgaagtacaaattgcataggttcttcacatagatcacatagaattgacttccctgatggtaaattaactggatccaaccatgcctatattgacaaatatcaacccaaagaatcaatacctaagaacataaagaagaaacagtttttgattgcacaaattgaaagatgttttaacttagtaccggaacaccaccagctaaattagggaacagttgacgaagatttgaccatgcgaatttaggactctcaacgaaacctaacatcacaggttcataatcttcatcatcttcctcatcatcatcatcaaattcatccatatttataggttccaccgcagtttcatcatcgtcatcatcatcaagctgagttattcggaggcctttgaaatcatccatggagtctccgttgaagctactcatcgaatcttctgtgttgaatttgatgaaatgaagactgcataacagagcaaaggaattgaattctagggttttactctgtttcataaacctctcaaaagtatttggcaagaaacaacgcacaaatcataatctgttaatgggtctttcgcaaaatactaaactcactaatttttcaagatttagagctcaatactcagctaattacaaatcccagaattggtacgaacaaatgttaaaaatgagctcactagtcagtatcaacaagaatcaaaatccaaaagaaacttacaacaccaggcgatgatggagatgttcttcagatagcctttaaaggtcgaatcttcttctatcaatttaaacagcaaaattttgtaaacatctttcacgaagacgaagacgaagacgacgacgacgacgacgacgaaaggaaaacaaacgtcactctggcccaaaaacaaaccctagaatagacgatgtcgtttaacataggcctataatagactaagcccaataaagtaatataagcccataaaggtttctaaattggttacgaataaaagtataaccttatcccggacaaccttatccttaaaatctcaccggtactccaactcccgttcaccggagctctgactctctgtaagcgaagattctctgctctttagctaatttagtcgaatctctattatgggtctgatccagtttcttacgagaatctgatttctgattttataacttgatttctcgatttcaaatttgtgttcttgcaatcgatttttttgcaggtaaagaagaagggagaaatagataatg

SEQ ID NO: 6258 - DNA, 3000 bp, Unknown
  misc_feature (1)..( 3000): cDNA_ID_2139462_gDNA_ID_1621085_Annot_ID_170512 3000 nt of promoter + ATG
cggtgcaggactacttggcatcctccaatggaccggtatttcattgatctgatgttggaccaagcgaggagaggaaaccagattgaaggtgttttcaggaaacaagcatggactgagatggttaatctcttcaatgcgaaatttgagtctaactttgatgttgatgtgttgaagaaccggtataagtctctgagaagacagttcaacgcgatcaagagtattcttcgatcagatgggtttgcttgggataatgagcgtcaaatggttacagctgataataatgtatggcaagactatataaaggtaacttaatcgctctgatctatgctgtgtggttagttacagtgttttcgtctctgttttgatgtgtgttcttgtctgaattaatcacaggctcatagagatgcaaggcaatttatgactcggccaattccgtactataaagatctgtgtgtgctctgtggcgattctgggatcgaagaaaacgaatgctttgtagctatggattggtttgaccctgaaactgaattccaagaatttaagtccagtggtactacagatttgtctatttcagctgaggaagaagatagcaactctcttttgtttgaccccaagaacaaaagagatcaacttgctaatactgatacaagccctataaacccgaaaaagcctcgagttgatgaaacccaaaccatgtcaatagaggacacggttgaggctattcaagcgttaccagacatggacgatgaacttatattggatgcttgtgatctgcttgaagataaactcaaggcgaaaactttcttggctctagatgtgaaactacgcaagaagtggttgttaaggaaactccgacctcaagtgacttgaggattatgagctgtaaagaagcaaagtagaagtttgacgataaacagaagctcattggcttatactacagagtacagactactttgcgagagtttcatatacaaagacttatgctcttagaagttgtaaatgtgatcaaatatggctgatgatattaaaccttgtacaaactctctcttctttgccttctctagtagctctgtatctgacaagggagacggcgattcccagtctctgagcacacagaaatacgaaatgtatctttagacaaggtttaagaagatgagataaagcaagcagaatcaagaaaatgtcaaagaattacttacttttctgttgaatcccttattaagctattgtcttccatgcttgcttcactagatgaatcaggttgtacaagcttggacttctttggtgacggcggattgtatataaatgataataatgggtccagaacacttttagatgtatgattagtagacaacggctcatcgattagagactgtaagtatttcctagtccctggagaaaatgctgaatatgactcatccttgtaaagtctctgcttttgttcaaggtaagtattcgtcaaggaacacaaatgtcagataaccgatataaaacataccaagatatagaataagcacaaaaagacttacaagttttctactaaatggtaacgaaagcaagaagagtaaataaaaaaggataccttgaagacatctctatgctgagtggtaatgtgatcaaccatatgcatcttcactcgtctgctacaaaccggacatatctacatcacaaccaaagctgaatttgtgagaagttattacattcatcatcaccaaaagactgttttcatttctcacaccaaacacttcacaactacaaaatggttcctcatagcatcaagcaaataatccaagtgaactaaaatccaagaagtccctaccaactctccttacagaatcacaatcctgcctactaaagtaaccattagagtacaacaatgaacatcacacgataaatagtctaaatttacaactaactgcttcatgtaaaaactcaaatgtatagtttaaagaacagtaactgatttgggagatggatacgagttgcaattaccccattgttggcgtctagttgatgctcctcatcgatatggtgacacaattcaactaaatcataatcatctgagcaaaacgggcatggataatccactgccatttcatcatcatcttcaaactcaatacatgaacctaaacaaaaatttcaccatcacaaaacttttatcaattacataacataaagtttacccataaagtgacaaaatttaaactcactagaccttaagggccaaaagaattgaaatttgataaagaaattaaaaccacctgcatataaagcataaaccctaaaacaaagctaaatgcaattgggaaaaagaatggatctttacactaacccgactgatacttggcaagttcttctaatcgatatttcttcgacgaatcaaacccacaaatgcccaacaaatcttcttccattttgattctgaatccacacgaacttgaattgaaaaatctcagataataattaaaggagcatattcttcctccgtgtatttattagcatctgtcagtactttgttcagcctgaaagtgcgaggaaacacaccaaaaaggcaagacctttaaatgtggtctttttctctggcgacatgagggaatccatggacacgaatctattgagctaaatccaatgaccaaactacccctaaccggtcactatagcctcttttaccctgaaccaccaacgtccctctgttgacttttagccgccacgaatctacgggcattttcgtctttgcgccaccgtcttaaaacgtgtgctccacacacttatattgaccctatcgcgcaagtggactataagcccaatatataaatgggcctaaaaaggcccaaatacttctccttcgttgctaagtctgtaacacgcgctaatgagaaacgattttgcgattcagattcgtttgcttttgccgacgacaaaagctccgattttgtttattttctccgggaaattttactttcgagattctgttgagaatcaattgatttggtattgatg

SEQ ID NO: 6259 - DNA, 3000 bp, Unknown
  misc_feature (1)..( 3000): cDNA_ID_2999876_gDNA_ID_1621085_Annot_ID_170506 3000 nt of promoter + ATG
agtctttgcaccacccaagccttgttttataaaacaaaatttctaagcgccgttttgacatgtattttataaaaacataatatagtattttatgatgtttatgattggttaaatttcctttatatcaggtattgtttaattttctattatgaaatataatcactgaaacatgaggaaagaataattcttaatcatccgttagggcaaaaaaacaagcattattcaagtgatccataaacagggaaaatctctttttcttttatttctatcctgagctcatgaaactaaaacttttattctattaactataataagcaatataaatatttagttcaagtgaggcaaaatatttgcatcaccaattctaaattcatttatataagtaatgtaaaatttatgtacatcaactataactgatgttaatattcaaattaagcgatgcagactatatttattttttaagtgatagttcgtgtaagtcgtgaatgagcctcggaagcttgatgcaaataagcaaaggtttgttatacgcttccgaactatatccacatttaaaaggtaaataaaggaagcaccaacttttgaacccaaaaataaaataaagaaggaagcaattaccaaaataattagctgttctttaacttcttgttcccgtaactaacgattaacacaggaagagcacgctgtcttttctagttatgacgtgaaatctctcttaagagacagcttttacttccaccattaaacccaaaactcttcatatcttatagttttcacccaatactttaaaaatagtggttgcatgtatttattttcataagtataaatagacttggtttgtatgcaagaaaccttgggatcttctttcaaaatctttcttccctgctcatcgcagggaaaagtctccccatcttgaatatccttttgatcaccattaattcttatatatggaaattcaaaatcagattaatggtggccaagaagagatcaagaatatgaagaagaagaaacgatcacgtggttttcacgtgatcggtgtcgttttatacatgcttcggcgtcggaggaggagcaagccgcttaataacgggttttggcggcgagttgtcgagtcctttgggcagttgaaaaacgacaatgttacggtacttccatcgtcgtctaatattacgatactaccaccatcatcttctccggtgacggatgaagttccggcgagtagtgacgatcaggtatcggagatggttgaggttctcacggcgacgtctagttcttgctcttcgggaatctcgggatatggatcagcaaagtcgttgcgagatatggattgtcttgatgaagatgatgatgatgatgaaaattatggtaatgatgatggaggtgatgagatgattgatgcgaaagctgaggagtttattgtgagattttatgaacagatgaggatgcaaaatcaggcttatacagaacgttacaaagctaaagagatgatgatggtctaaatcgcacattgtaattctattcactgaagcataatgtcatattacatgagtatacatatatgcatggagacgtgcacagagtttgtctttgattatttcgatgatttttttttttcgtctattatttcgatgatttaagtaatgatatatatattgtattcagttagtcttgattgtatacttttatagtagacgatgaatttgtacgcaaactatattaaaatatatttataaaactgatgtcattttggtttactatatatcatcttcaagtcataatgctagaaccaaattgcagctagcttcttgtgagtgatatagtagatgatgaatttgtacgcaaattatatacatgactctgagcttctttggcagttttcctagggtgtcatatacatgactctgagctacaagcctttgttgttgtcatatttcaagcaattcgtttttttcttttttttcttttgaaccaaaaacccaataatgagttaagtagaagtttataattcacttatgggtacaatccaatataatttagaattttcctattggtttgagaatccaatttgcttgaagagaaaatcagagacatggaagctaaagaagagagattagaagtttatgatgtggagagtaaattgaatcggttgcaattcggtttattatactagatttttggtttggcattaggtttatgacgttaacctaataataaactacaaaatttggttttgtggagactaaattctctaactttcgatttaggaggatataataatttaccttctattttgtgttgactgtaaacgaagttctaaatctgtgtagttgtggtactatgtgaaactgcgtaggggaatagaggtcgttcactcaagtttataagatggcacaaatagaaagaaatcaatttagttgttctctcatttgaaaggaattcaagcaatatggttgttctcgtctttccaagatgcattgaatagtaaagcatctaattagtaaagttctcataatgctcagttgctcacattgatctttttaccccttttaattagagtacagtcttgtaaattacgttgttttagccaagtttggcctatgtaataatttatttgggctttaaaaagcctcttcaaattagagtattgctgctgcagaaaaagaaaagaatatttgcgtggagaaaataaaggaaaacaaatccataattagtagtcggtgtatacatacctaaaaaggcagagagacgttaagattcaaatttcaaaaaagaaaaaaaatatgagtggcaggttcgttattaatgataaaacttaggggcaatattggattaacaacaagtctcctgaatcgtggcctcctaagtacacgctcttgtataaatacactcgcatcaaactccaaaacccttatcactctctcattaatcgaacttggcgtgtttaaataatcttccgatcgttaattctcttccgatttcgattcgattttagcggcgatg

SEQ ID NO: 6260 - DNA, 3000 bp, Unknown
  misc_feature (1)..( 3000): cDNA_ID_1394744_gDNA_ID_1621085_Annot_ID_170505 3000 nt of promoter + ATG
tgtttttggtcatagattttgtatttgattgcaaaaacttgcgatgtgtatgtgttgtttggtgagagtatttgttactaatgtctgtttaattgactgggaatttgagcggtgttgaatttgacatgtaaagagaattagggttgatatctcaacggagatcatcaaatttactttagctagaggagatttttgactatgatagtgtctcttcgtgttacagttaaaagataatctacctgctatggttgctggaatctggtcagaggatagcaattcacaattggaggcaacaaatctcttgcggaaactgctttctattggtttgtgatttatgttattgatcgttactagtagtacataacaatcagtgttttggttagagtctttagcagttgttttttcttttgtagaacaaaatcctcctatcaatgaagttgtacaatctggtgttgttcctcgtgttgtgaagtttctttccagggatgacttccccaaacttcaggtgagtcgcagctgcagtcgtttttttttggatatattgatagttactagtttgatgtatttgttaacttgcttttgctgtttacttctgcaatgtgttttagtttgaggcagcttgggcgctcaccaacattgcttcagggacatcagagaacacaaatgtcatcattgaaagtggagctgtcccgatattcatccaacttctcagctctgctagtgaagatgtccgcgaacaggtatatgtttaaatcctcactgttatcgttattgtcacagaagaaacacttagacattaggatcaagtggaaattcattgagactgttaccattctgagttctggtctttccctgactgagtataggctgtttgggcattgggaaatgttgctggagactcaccaaaatgccgggatttagtcctaagttacggtgccatgacacctcttctgtctcaattcaatgagaatacaaagctttcaatgctgagaaatgctacatggacattatcaaacttctgcagagggaagcccccacccgcatttgaacaggtttccttaaatatacacactttattgaatctccacaatattttttaacatgcttctgatattttgttacttaaaacatttttcgagcagacacaaccagctttaccagttcttgagcgccttgtgcaatcaatggatgaagaagttctcacagatgcatgctgggctctgtcatacctctcggataattcaaacgacaaaatacaagcagtcattgaagcaggagttgttcctcgcctcatccagctcttagggtaagcatctgatagtgatcattttaatttttattgccaggcatgattatgttatctgatttatgtgcttcctctttctccgtatagtcattcgtcgccatcagtgctgattcctgctcttcgtaccattggaaatattgtaaccggggatgatctacagactcaggtgcatataatacattcaccattcgatttcgagttttcagaagcaaatgtctctaacttattttcctaacacagatggttctcgaccagcaagcgcttccttgtcttttgaaccttctaaaaaacaattacaagaagagtatcaagaaggaagcttgctggactatctccaacattacagctggaaatgcagatcagatacaagtgagttttgtttataatatatggcatttaacaagaaagtcgaaaattgaagtttcctgtgtctgattttattcgaacccgtatgtgcaggcagtgattgatgcaggtataatccagtctcttgtttgggtgcttcaaagtgcagagttcgaagtaaaaaaagaagctgcttggggaatatcaaatgctacttctggtggcactcatgatcaaatcaagtaaaaccataaaaaccgaaacgaaatgtttccttaacaaagaatggtcatttctaaaacacgtctgtgtttattgtttgtttcttctcaggtttatggtgagccaaggctgtatcaaacctctatgcgatctccttacttgcccagatctgaaagttgtaacggtttgcttagaagcactagagaacattctcgtggttggagaagcagagaagaacttaggtcacacaggagaagacaacctctacgctcaaatgattgacgaagcagaagggttagagaagattgagaatcttcagagtcacgacaacaatgatatctacgacaaagccgtgaagatcctcgaaacattttggactgaagacaatgaagaagaaggcaacgacgagaatcatgctccacaatctggtttccagttcggaagcaccaatgttcctcctggtcaattcaactttatttgaaaggtaaaatagttgaattgggtcatagaagttgcttggacttttaagtaagccacatatcgaacgaaagtggtaacatcacaaagatgaaatatcaatcttctctatctcttcatgcccactccttaactcgtggacatgaactatgaagaaacatagtacgattttcttttctttttggaagtttgtctcaataactaaatcatttggggaagagaaacaattattctgtgttagccatcatctcgtctttcaacaaagttcccttttttcatatattagtgccattacaaaatcgtagttatgccttaactaaaccagaaacatttttattcaatagttaatcatttttactcgcaattttagaaaacagagaagctagaaatagtaatatacgcttgtggaggtttgaggcaacggtcaaaacttcaagagcaatatacgcatgtggagtttttattgggtactttggtgtctaattacaaataggagagattagtggtgattaagtggttattatcatggtcataatttctatatgcgagaaattagggtttaggctatgtgactaattcgtgtatttaaaacactctcattgttttatatccaacagacaacaagaacaacaacatagccagatataatg

SEQ ID NO: 6261 - DNA, 3000 bp, Unknown; identical to SEQ ID NO: 6254
  misc_feature (1)..( 3000): cDNA_ID_1808549_gDNA_ID_1621085_Annot_ID_170496 3000 nt of promoter + ATG

SEQ ID NO: 6262 - DNA, 3000 bp, Unknown; identical to SEQ ID NO: 6252
  misc_feature (1)..( 3000): cDNA_ID_1813879_gDNA_ID_1621085_Annot_ID_170491 3000 nt of promoter + ATG

SEQ ID NO: 6263 - DNA, 3000 bp, Unknown; identical to SEQ ID NO: 6251
  misc_feature (1)..( 3000): cDNA_ID_3090935_gDNA_ID_1621085_Annot_ID_170489 3000 nt of promoter + ATG

SEQ ID NO: 6264 - DNA, 3000 bp, Unknown; identical to SEQ ID NO: 6249
  misc_feature (1)..( 3000): cDNA_ID_3090939_gDNA_ID_1621085_Annot_ID_170488 3000 nt of promoter + ATG

SEQ ID NO: 6265 - DNA, 3000 bp, Unknown; identical to SEQ ID NO: 6260
  misc_feature (1)..( 3000): cDNA_ID_1394744_gDNA_ID_1621085_Annot_ID_55368 3000 nt of promoter + ATG

SEQ ID NO: 6266 - DNA, 3000 bp, Unknown; identical to SEQ ID NO: 6259
  misc_feature (1)..( 3000): cDNA_ID_2999876_gDNA_ID_1621085_Annot_ID_55369 3000 nt of promoter + ATG

SEQ ID NO: 6267 - DNA, 3000 bp, Unknown
  misc_feature (1)..( 3000): cDNA_ID_1813855_gDNA_ID_1621085_Annot_ID_55372 3000 nt of promoter + ATG
ggaaatggaacacggtttcgtggaaactagaaactacaataaggagacagccgcaacaacatgattcaacggcacacaactaaactaatcaagccttccttatctcccaagttttttttactagacctctaattacttttaattatagtccttctttaattaatcataatgaaagttccatacaatatttatgtatttgttttcttctaagaaattaattaccttcgcaagttcagtagtgatccagcttaccagattattatagagttgcaactattcgtttataatattattcaaaatataattgcatttcgtaaaagacaaaacaatttaaactctttctagtcagtcataaattctcttaactcttttgttatttcttggttgtaggcttgtagcatttacacaatttggtaaaccattatgtaacgtaattaacatttatatttcaataacaatttttatatataaacaatatctaaacgtaacacatctggagacagaaaacgtgaaactaataattaggtgaaaccaacaaagaatactaaagatgttgaacgtatttacttttaaattaaaaagcacaacagacgaaataaatcgaaaaatgcgtaattgagaaacaaaacggctaaacacagctaagatatggtccacgtccagccgtgacccacatgaacttatttgtaattttttcgtaaaatattattaacaaatatttttttcttttgaaaaattatgataaacaaatttatatgatgtattatacataattaataatacatattgaagcatgtaaggtttaaaaaaaattcggatattagtgtctatggaattttattactttttaaatcaactataaaactatctttttaaaataattcatacaaagaaatactttaattaaggattaaataattaatgtcagtcacgtaggatattatatatttttggagttaaatgtgataatttatttttatttgttactccgcgttgggcaaaattgcaaacagcaagcaaaaagctgcatacctttgtgtatataatacacatacacacacaatcatttcatgaaccataagcaacacacaacaaaaacttcatcatcaaggaaaaagaaaactcatctctgatcaaaaatcgagagtataataaatcatcaatggcggattcgtctcagaagaaaatcagaagaaacgcgataacacataaagcatggagtctcatgaagatggctcttctatggggaagaaaaggtggagttttcaaaaaatggccattgttcgaactacgtagcttgttcttcaagcatctcaaagccctagctcatcatcatagtaacggtgaccgttattacggagaacgccagctttcctttgatgaaacgccgttatttaacgtcaagaagaagatgcattgtcctacttcgtctatgaggttcctcctcctcccctgctttgctcctcccgtagattttgactatgactttgaaatggacggtcaagattattccgacgaggtacaatcgtacggttacgatgaatcttgttcggaagaagagaaaggggtggatgtgagagcagaggagttcattgctaagttctatgagcagatcaagttgcagagacaagtgtcttatttgaaatacaaacaacacaacgacgccgtattattatagatttatgatgatggttttatttactaatatgaatgaatgcagcttgtttttgtagataactgagtctatatatcatctaattacaacaacaaaaagatgtttcatttttgatttcatatgtacttcattttcctttttttttatgaatttccttttaccgtattgttgtttcaaacaaatattaatagataagtagtacattgtttgttaactggaagtcagtacccaatttgccccaaaacctaaaatattagtcaaatgcagtacgatgcaatcttaatagtttaggataggtgggcgcaatctagattgaatcatccaatccaatcatatatataatttaattcaagtttttttttcaatcttcctacacaaaaaataacaaatattacccgttttggtaatttaatatagagagttagggcatctccaaccctattatattttagagtaaaaatgcaagattcttctccaaccctactttataattgactcagagatttctgcagattgactctatatatagagcaactttatttttgagttcaactttttttatttatactttaatccctcaaattcaaacttttttatttaatacatatacacatagttttataaacttaacaatcaaacaagtactaaatttaaaataaacaacataagaaaactaaaacataaaactaataatttaatagtccggtaaattgtttgtagatccgccaaacatcatttttttttgaatcttcaaatgatcttttcgttgtgcacttgtcttctttagttcttctaaaagtttttttatttccttcttctaaggtgttgataaccgacgttgttatatgatgtaattttttcttaataaataattagtgtttaattcaaattatatcaaattttatgggaattttgcaaatctataatatatgaggtcaaattgtaaattatataattaaaaggtattagtatataaagtaaaaatagaatatttttaagaatattattttttagagtagaaatcctaactctattttaaagtaagatataaaactatacatttgagatgttcttagatacgaatttacaaaccatcctaaatatcaaaactagttaaataattaaaattttccaaggtacatgtcactataaaaacagccaaaagcttttctacatgctagtgtagaaactgacccaagaggtatcattaggggaatccaaattcaaaggggatacattcatcaaaagcagttggtgagcctccgttttttctagcatcatcggtcttctttgcgataaaagatgcaatgagatctagagccgag

SEQ ID NO: 6268 - DNA, 3000 bp, Unknown; identical to SEQ ID NO: 6258
  misc_feature (1)..( 3000): cDNA_ID_1813847_gDNA_ID_1621085_Annot_ID_55374 3000 nt of promoter + ATG

SEQ ID NO: 6269 - DNA, 3000 bp, Unknown
  misc_feature (1)..( 3000): cDNA_ID_1808414_gDNA_ID_1621085_Annot_ID_55375 3000 nt of promoter + ATG
cgtttttgttttatttttttctcccttgcacaaaaagatcattttcaatttttcattatgagttgattacttgatttccttcatgtgttattgaatttggaggactagtgattcttgtagtgattatcacattttcccactaggtagtttagtgtcagtttatttcttaactatagtgattttaaccatttacggtttacacaaaatacttctacagatttggtaaaacgattggaaaagagaattcaactagaaaaaagagagggttactgtttgttacaaacaagacaagctgtttttcattctaaattgttggcatatgactaaaacaaaatattcttaagaattaaaagaacaatcatgatcaaacagagtacaaggagtatagttgcacatttcaccattgctccttctctttgtgttctctccgcctatttaaaaattgaaatgtctttgtgagttccatacggtgaaaaatctgtagtactcacaaaatcttatgagttttgggtaaagaatcaaaccttttgtagttgtttatagccttcctcgaccgatgtagaaacgttttggacattgtagtctatccgatcaacaatcgtgccctaattgatacaagaatataagaaaactaattgttgagaagccagcaaaaactttgtatctagccagttatgtaattcataagccttttaatgactaagctaggcacctggtcaatcacaagggctgataagtctttcattatctgtgcaaggtcattcacggaacccagaacctagacagaactctgaagttaatcgccatcgaaaatgtgaagcacgcagcttcttaaatatggtcgagtaacaacttccattacctgttgtatctctcgttccctttccgctgagacatgttgcccttccttcaacttgattgtctggtgttcatcgaaaccctacaatttattgaagaccagcgattctcattatggtattggcagagtaaggacgacaaggttctgaagattgattaaaaaaaatctgactcgtcctagcatgataaccataagaagtgtttcttaaaaatgtaaggaagacaaggataactgattaaaaatctgaattgctctagctagataaccatattaagtccttattaatttgtcaatgatatatagttttacaatacaagtaagcacttaccatcccaccaagttcatcctcttcatccagtctcgacatctttccattcacattaaactctaaatctacttcatcctgaccctatgattagagaagccaaatacaaataagaacatcatattacggtacatgcatgtctcaagaatcaacactttttttgtttatttcttgaaaataaaggaaacatacctctttctgctgctgcagacgttttaagtaagtagactgttttctgcggagctccatggaaaggttctgaagatctgttgcaagagaacgctgtcaaaagcagtatgccaaaaagtaggtcaagtccattggagagccccactatacatgtacacagaactttatcctcatgctacaaactcaaaacatagaataacccaaagtacattatatagagggaaaaaaaaacacttcatacattttgctgactgataatgtcaactagataggtagtcaaaacatatgagagtgatttaacccaaaattcctaactttcttctctaaaagcacaaaagaaaaggtaatgaccatgcattctttattgttaacaagctcgattctgaaaaagtgtccaacaacctacctgcacatttttcctgagatttgattcttcagaaggccctctagtagataacatctgcaatctcttttctgacttcctcaacaaatctgtgatctcatgagtgagcatctcgacttcacgatgaatccctttgttatctccaaatgtaggcataagagcctttgaatgtgcctttgctagttcattcattttgtctcgcaccttttgtatattaaaagttatctcctcagaatcatcaacccaagctggtggcataccaattgtgaaggcatcactactgcaaacattcacaacaacacttaaatcatttgctcattctgttacctaattcgtttagggttctaattctgtatctcaaatcaatcccatgattacaattcgtttctatatataagttcatagaatttcccaggttttgcagaatcaaacaacacattatattattaccttgatggaccaggatcataggaattcaaaggagcataagaggagtgattggaccgggaaaatgaaccgctaaccatttcgatcaccggaccaccgaacgaatcagacgccgataaagataatggagcacgcgcgctcttacacgcatccctgtgtttccggtacaccgtcgttcgattcctcgtcgccatcaataccaaatcaattgattctcaacagaatctcgaaagtaaaatttcccggagaaaataaacaaaatcggagcttttgtcgtcggcaaaagcaaacgaatctgaatcgcaaaatcgtttctcattagcgcgtgttacagacttagcaacgaaggagaagtatttgggcctttttaggcccatttatatattgggcttatagtccacttgcgcgatagggtcaatataagtgtgtggagcacacgttttaagacggtggcgcaaagacgaaaatgcccgtagattcgtggcggctaaaagtcaacagagggacgttggtggttcagggtaaaagaggctatagtgaccggttaggggtagtttggtcattggatttagctcaatagattcgtgtccatggattccctcatgtcgccagagaaaaagaccacatttaaaggtcttgcctttttggtgtgtttcctcgcactttcaggctgaacaaagtactgacagatgctaataaatacacggaggaagaatatgctcctttaattattatctgagatttttcaattcaagttcgtgtggattcagaatcaaa

SEQ ID NO: 6270 - DNA, 3000 bp, Unknown
  misc_feature (1)..( 3000): cDNA_ID_1810073_gDNA_ID_1621085_Annot_ID_55376 3000 nt of promoter + ATG
ttccttgtaacttaagctcgagtcacacgagttctcacaagtgtacaccacgattgttgcccaatcgagagattccctctcgttcttcccaccgaagaagaacagtagctgcggcatcacctgataaaaccgccatcgaaatgatcaagaacagagccaagcttccaatatgcaagaacagagaaatgaaatggggaaaattgtgtgttttattggtttaaagttgatttgattcagctaaaattgttggccaattcttgactggtttataaaataagcaaaagaagtgactaagaccaagctaatacaagtttataaagaagagaagaaagaattacctgaaattcaaaacaacgaggaccaccacaagatttgcaactgggaagctcagatttagagactcgtccgcttgctattggccaaaggggtttagcaccagagctccgggaatatctgtatcaatacgtatttcacaaatcgatgttatgggagaatcaagatcaaaagtatgcagaaaatcataagcgtttgaatcacacctcagaacttgttcaggggctttgtctacgcgttgctggaaattaacccaattctttttatcagcatctccctgtacaagcatggaaaatgagaatcatttgaggccttttgaagtttgcaaaaatggccatgacaagtgaactgtttacctcaaaatcgttcattagcgatttcatttggtcgtcaacttctctctttgagaccaaaggtttagctacttcatcatctcctgacatctcagtatcatactcactttcatcctcattgatcaatacaaattctttccataaactcttactcgcaactgcacaaaccgaaaaattcatatcactagttatacaaagtttcagggctaggaaaagtttgtgaattcagctaacctttctgcttttcagttggagcaaccccattattgacagggcctgagtcagatgtttcgctaaccgttcgaagctgttggcattcggttttatgacccaagcgccaatgcagggcctggaaattagaaacaacacagattgttcaaatttgctcaaaagagcagaatctagcggaacaaaagaaactacgatgcacatatgcacacacctggtgtttcggtgaacagtatcgagcatttttgcagccgctacatagtttatctcctttccatgttccacaccaagtgcaaagcggagctaaagtgaaacaaacaatatcaagaattgacaattaaaagagaattctcggcattcagtcaaacccatcaatcagttcataatacctccatgacccaatggcttgtctgttccatcgtgctttggagcctcactcgagtaaaaaggattagctcgaggcaattggcaacggaaaaccttcgtacttcaggaacaaaaaaaacagtactttagtgtaacaacccacttggagaggagacaaacaatacaaagatgcaatatatagtaagaggtttctttctacctccgcatagccttctctggggcacgtttccattgttcatgttgatcacgaaggagacaagacatagatggacacatgaagagaaacaatgtccgatgaaaagctgattccttgtctgttaaaggagcataaagctgccaaatttccacaacaaatttcataaataaaccgacaaaaaacatgcaagaaacaacaaaatagtttgtatgaaacttacttgaagtacaaattgcataggttcttcacatagatcacatagaattgacttccctgatggtaaattaactggatccaaccatgcctatattgacaaatatcaacccaaagaatcaatacctaagaacataaagaagaaacagtttttgattgcacaaattgaaagatgttttaacttagtaccggaacaccaccagctaaattagggaacagttgacgaagatttgaccatgcgaatttaggactctcaacgaaacctaacatcacaggttcataatcttcatcatcttcctcatcatcatcatcaaattcatccatatttataggttccaccgcagtttcatcatcgtcatcatcatcaagctgagttattcggaggcctttgaaatcatccatggagtctccgttgaagctactcatcgaatcttctgtgttgaatttgatgaaatgaagactgcataacagagcaaaggaattgaattctagggttttactctgtttcataaacctctcaaaagtatttggcaagaaacaacgcacaaatcataatctgttaatgggtctttcgcaaaatactaaactcactaatttttcaagatttagagctcaatactcagctaattacaaatcccagaattggtacgaacaaatgttaaaaatgagctcactagtcagtatcaacaagaatcaaaatccaaaagaaacttacaacaccaggcgatgatggagatgttcttcagatagcctttaaaggtcgaatcttcttctatcaatttaaacagcaaaattttgtaaacatctttcacgaagacgaagacgaagacgacgacgacgacgacgacgaaaggaaaacaaacgtcactctggcccaaaaacaaaccctagaatagacgatgtcgtttaacataggcctataatagactaagcccaataaagtaatataagcccataaaggtttctaaattggttacgaataaaagtataaccttatcccggacaaccttatccttaaaatctcaccggtactccaactcccgttcaccggagctctgactctctgtaagcgaagattctctgctctttagctaatttagtcgaatctctattatgggtctgatccagtttcttacgagaatctgatttctgattttataacttgatttctcgatttcaaatttgtgttcttgcaatcgatttttttgcaggtaaagaagaagggagaaatagataatgagcagtagaaacggcaatgagagattaagaacagtgtggacacctgaaatg

SEQ ID NO: 6271 - DNA, 3000 bp, Unknown
  misc_feature (1)..( 3000): cDNA_ID_1813843_gDNA_ID_1621085_Annot_ID_55377 3000 nt of promoter + ATG
catttagtagaaaacttgtaagtctttttgtgcttattctatatcttggtatgttttatatcggttatctgacatttgtgttccttgacgaatacttaccttgaacaaaagcagagactttacaaggatgagtcatattcagcattttctccagggactaggaaatacttacagtctctaatcgatgagccgttgtctactaatcatacatctaaaagtgttctggacccattattatcatttatatacaatccgccgtcaccaaagaagtccaagcttgtacaacctgattcatctagtgaagcaagcatggaagacaatagcttaataagggattcaacagaaaagtaagtaattctttgacattttcttgattctgcttgctttatctcatcttcttaaaccttgtctaaagatacatttcgtatttctgtgtgctcagagactgggaatcgccgtctcccttgtcagatacagagctactagagaaggcaaagaagagagagtttgtacaaggtttaatatcatcagccatatttgatcacatttacaacttctaagagcataagtctttgtatatgaaactctcgcaaagtagtctgtactctgtagtataagccaatgagcttctgtttatcgtcaaacttctactttgcttctttacagctcataatcctcaagtcacttgaggtcggagtttccttaacaaccacttcttgcgtagtttcacatctagagccaagaaagttttcgccttgagtttatcttcaagcagatcacaagcatccaatataagttcatcgtccatgtctggtaacgcttgaatagcctcaaccgtgtcctctattgacatggtttgggtttcatcaactcgaggctttttcgggtttatagggcttgtatcagtattagcaagttgatctcttttgttcttggggtcaaacaaaagagagttgctatcttcttcctcagctgaaatagacaaatctgtagtaccactggacttaaattcttggaattcagtttcagggtcaaaccaatccatagctacaaagcattcgttttcttcgatcccagaatcgccacagagcacacacagatctttatagtacggaattggccgagtcataaattgccttgcatctctatgagcctgtgattaattcagacaagaacacacatcaaaacagagacgaaaacactgtaactaaccacacagcatagatcagagcgattaagttacctttatatagtcttgccatacattattatcagctgtaaccatttgacgctcattatcccaagcaaacccatctgatcgaagaatactcttgatcgcgttgaactgtcttctcagagacttataccggttcttcaacacatcaacatcaaagttagactcaaatttcgcattgaagagattaaccatctcagtccatgcttgtttcctgaaaacaccttcaatctggtttcctctcctcgcttggtccaacatcagatcaatgaaataccggtccattggaggatgccaagtagtcctgcaccgtgtgacactgcttccttttgagttagacctgactgttgacgattcacatattctgttgtacccatcatcttcctgaatcagtgtcttggattctccctcactaatactctcctcagctgaaacatacatattcattcacaggttacttaagaatctttgatctttggtgacaagaatgtacaatgaaggattcaagtaacaatcaatagattaaagattgtacctttgtgctcagacattccatctgagtaaaccaagcacagatctttgtaacaaggtatagactttatccgaaaagatctcgaatcaggatgaatcttcaataacccaaaagcaaaaacaaatcaatccctgagaagaagacacaaaatcacaagtaaacaaaacgcaaaacgcaccttaagatactcatcccaaacgcagttatcagcaacaaccatctgtctagtatcatcccaactaaaaccatcttctatcaaaagattattcacagatttaaacaagttcctcaatgtcttatgcctgtttttcaaaacatctttgccataaagaaacttgaacttggcagtgaaggaacaagacatgaacttccaagctcgtttactaaacaaatgatcttcaaatctgttgccttttctaacttgttccaccataagctcgatgaaatactgatccatttcaggtgtccacactgttcttaatctctcattgccgtttctactgctcattatctatttctcccttcttctttacctgcaaaaaaatcgattgcaagaacacaaatttgaaatcgagaaatcaagttataaaatcagaaatcagattctcgtaagaaactggatcagacccataatagagattcgactaaattagctaaagagcagagaatcttcgcttacagagagtcagagctccggtgaacgggagttggagtaccggtgagattttaaggataaggttgtccgggataaggttatacttttattcgtaaccaatttagaaacctttatgggcttatattactttattgggcttagtctattataggcctatgttaaacgacatcgtctattctagggtttgtttttgggccagagtgacgtttgttttcctttcgtcgtcgtcgtcgtcgtcgtcttcgtcttcgtcttcgtgaaagatgtttacaaaattttgctgtttaaattgatagaagaagattcgacctttaaaggctatctgaagaacatctccatcatcgcctggtgttgtaagtttcttttggattttgattcttgttgatactgactagtgagctcatttttaacatttgttcgtaccaattctgggatttgtaattagctgagtattgagctctaaatcttgaaaaattagtgagtttagtattttgcgaaagacccattaacagattatgatttgtgcgttgtttcttgccaaatacttttgagaggttt

SEQ ID NO: 6272 - DNA, 3000 bp, Unknown; identical to SEQ ID NO: 6254
  misc_feature (1)..( 3000): cDNA_ID_1808549_gDNA_ID_1621086_Annot_ID_55381 3000 nt of promoter + ATG

SEQ ID NO: 6273 - DNA, 3000 bp, Unknown; identical to SEQ ID NO: 6254
  misc_feature (1)..( 3000): cDNA_ID_1808549_gDNA_ID_1621086_Annot_ID_170530 3000 nt of promoter + ATG

SEQ ID NO: 6274 - DNA, 3000 bp, Unknown
  misc_feature (1)..( 3000): cDNA_ID_4254415_gDNA_ID_1621088_Annot_ID_55409 3000 nt of promoter + ATG
agaacattgtatctgaaacgttacgtctgtaccctgcagcccctatgctgcttcctcacgtagcctcgaaagattgtaaagttgggggatacgatatgccgcgtgggacgatgctattgactaatgcatgggctatacacagggatcccctgctatgggatgatccaacgagcttcaagccagagaggttcgagaaagaaggagaggctaagaagctaatgccgttcgggctaggaagaagggcatgtcctggatccggtttggctcagcggctagtgaccttgagtctcgggtctttgattcaatgttttgaatgggagaggattggagaagaagaggtcgatatgactgaaggtccaggactcacaatgccgaaagctagaccgttggaagctatgtgcagagcacgtgactttgttggtaaaatcttacccgactcctcttgagtttttgtatgtaaaatgctaatacgttgcttagcaacggtaacgaattaaatgaaacgtattagcataataaaaatcagagacaaaaatcatattctaatttccaataacccattgttaattatgttacagtcttacaaatatgaatgttcagtgttatcaatcaaacaaaattctaggtgtgaaaaaaaaataaaaaaatctaggtgtggcattgctatgctaaatgtcatataattagctaaaataaataaataataatgattaggtatctaaacgactaatgggcacatgtgatttggccgaaataagattctgttttcgaagtcaacgtctatggagtagttcaagcagattttgcaccacatcatcctctgttacaacccctgaagatccttgaggaagaagaagtcaaatatggaaggtcaaaccctaattttcacattccttttcatatctctttctctcacgtttatcatcggaagaatcaagcgaagacctaaccttcctccgagtccgtcgtgggcgttaccggtgatcggtcacctccgccttctcaagccgccactccaccgagtttttctatccgtctctgagtccctaggcgatgctccgataatctccctccgtctcggcaaccgactcgttttcgttgtctcttcacactcactcgccgaggaatgcttcacaaagaacgacgtcgtactcgcgaaccgcttcaactcccttgcttcaaaacacatctcatatggctgcacaacggttgttacagcttcgtacggcgaccattggagaaatctccgccgtattggcgctgttgagatattctcggctcaccgtctcaatagcttttcatctatccgccgagacgagatccaccggcttatagcttgtctctcacggaactcttcactcgtaagtttgttctttgttctttgttccaattttatgctaattagcaaaatttattataatcagaatccttagtccctagtcaatctctgcttataggtgaatttcagtgaattgtagcaaatatttaacatatgatatacaataaattttgcaggaatttacaaaggttgagatgaaatcaatgttttctaacttaacattcaacaacattataagaatgttggctggaaaatgttactacggagatggtgcagaggatgacccggaggctaaacgcgtgcgggagcttatagcagagggaatgggttgttttggtgctggaaacactgctgattatttaccgatcctgacttggatcacaggttccgagaaacggataaagaagatcgctagtaggcttgatgagttcttgcagggattggtcgatgaaagacgagaagggaaggagaaaaggcagaacacaatggttgatcacttgctttgtctgcaagaaacccaacccgagtactacacggacaacattatcaaaggaatcatgctcgtgagtaacattttaagttcattagtctattgtcacatttggtatgggattaattagttatgtttgtttttttgtgtatgcgtccattgtgttgaagtctcttatactagcggggactgatacatccgcagtaacattggaatggacattgtcagctttgttgaaccatccacagatactaagcaaggcgagagatgaaatcgataataaggttggcctcaacaggcttgtagaggaatcagacctctcacatcttccttatcttcaaaacattgtgtccgagtcgttgcgcttataccctgcgagtcccttgttggttcctcacgtagcatcagaagactgtaaagtagggggttaccatatgccacgtggaacgatgctattgactaatgcatgggcaatacatagggatcctaagatatgggatgatccaacgagcttcaaaccagagaggttcgagaaagaaggggaggctcagaagctattggggtttgggctaggaagaagggcgtgtcctgggtccggtctggctcaacggctagcgagcttgactatcgggtctttgattcaatgttttgagtgggagaggataggagaagaagaggtggatatgactgaaggtggaggaggagtcataatgcccaaagctataccgttggtagccatgtgcaaagcacgccccgttgttggtaagatcctcaacgagtccgcttgagcttagacttttgtactaaatgctaatttgtgttttttgagtaacggttacttttgtactacttttgttattatgtaaaaagaggaaataatttcgaggtgatacatccaaataatatattaatacacttatattttacttttaagaaagaaaatcttgagaagaaatctagaattataatttcgtctgcttttttaaaaggtttttcttaattagagtccaacgttcgaatttgaacttgtgacaatagtacattatcttttatagagcataatttttaaaaataatatatttccttgaccacatgtatatatctccaaaacaatagtaaaaaaaagagagacgaaaagaaagaaagagagagagccccacaaacaaacaaa

SEQ ID NO: 6275 - DNA, 3000 bp, Unknown
  misc_feature (1)..( 3000): cDNA_ID_1814056_gDNA_ID_1621088_Annot_ID_55410 3000 nt of promoter + ATG
tatagagcataatttttaaaaataatatatttccttgaccacatgtatatatctccaaaacaatagtaaaaaaaagagagacgaaaagaaagaaagagagagagccccacaaacaaacaaaatggatttgaaccaaatcttgatcctctcatttctctctctttttaccttagccatattcttgctcacaagatccaaacggaaactaaaccttcctccgtcgccggcgatctccttgccggtgatcggacacctccatctcctcaagccaccgcttcaccgtaccttcctttccctttccaaatccatcggaaatgctccggtcttccatctccgactcggaaatcgcctcgtttatgtcatctcttcacgttccatcgctgaagaatgtttcacaaagaacgatgtcgttctcgcgaaccgccccaagttcaccataagtaagcacctcggctacaacgccacctacttactctcggcatcttacggcgatcattggaggaacctccgccgcatagccgccgtcgagatattctccactcatagactcaattcgtttctgtatattcgtaaggacgagatccgacggctcatttcacatctctctcgtgattccttacacgtatgatctccttcaattctttttatttattatttgttctgtattcattactttatctttggtttgtcaactaacaaatttattatttattcattactcgtgacgactactttcatatagtacatacttttatatttattgtggtgataaattgtccatgtgactagtttatttttttgaagcattgcgtgtatattacgatactagctatttattcacgaaagtctgatcactatattcataaatattacatagtttattcacaaattacaaatgtacagaaaagcttaattttaaatttatagaaaaagatgcagtgtaggttttaattgtcttaagttggttgaataattatttggttcaaaataaacacattgttctaatatgttaaggtggcgaatatggaaatgcacaaatttttacatacttaccaaaactcttatctgtttactaatattgtattcgtactctcagggatttgtggaggtagagatgaaaacattgttaaccaatttggcatccaacaccaccatcagaatgttggccgggaagagatatttcggtgaggacaacgatgacgctaaactcgtgaagaaccttgtgtcggaggcggtgaccagcgccggtgcaggaaaccccattgattatctttccattttacgttgggtctcgagttatgaaaaacgaatcaagaatttgggaaataggtttgatacgtttttgcagaaattagtcgacgaaaaacgtgcggagaaggaaaaaggtgaaactatgatcgatcacttgcttgctctccaagacattcaacctgattactatacggatgtcatcatcaaaggaatcatacttgtaagtatcaatcaataagaaagtttttatatatatatagagagagtttaatgattgaaattttgtttagaccctgataattgcagggacagatacgtcatcagtaacactagaatgggcaatgtcaaatctgttgaaccatccagaaatacttaagaaagcgagaatggaaatcgatgaaaaagtcggtttagaccgattagtagacgaatcggacattgtaaatctctcttatctccaaagcattgtattggaaacactacgtatgtacccggcagtcccactactactacctcatttgtcatcagaagattgtaaagttggaggctacgatataccaagtggaacaatggtattgaccaacgcatgggccatgcatagagatccagaggtatgggaagatcctgagatattcaaaccagaaagatttgaaaaagaaggagaggctgagaagctaatctcatttgggatgggacgaagagcttgtcctggagccgggctagctcatcggctaataaaccaggctcttggaagtttggttcaatgttttgagtgggaaagagttggtgaggattttgtggacatgaccgaagacaaaggagccacattgcccaaagctataccattaagagccatgtgcaaagcacgttctattgttgataaactgatataaatgttttacgttgaaaaatgtattctatttaatgacatgtttttaattatgtgttttggtcttcaattcgtccttcaatcttttgttgtatctttgaatcttgcttaatatcatcgggtcaatgaagctgggcttgctcaccgggttagtgggctggctcttgcgttgttggtccaatgttttattgattgatatattttttaatgtgattgcattatagttaggttaaatatagtgtttttaatgaagttgtaaaatcaataggtcacgttgagtcgttgacccgtattttatacttgacccgtattctccagtaaaacgtgaagaatcgtaaaaaaagaactatcatatagtataaaattcacatcacataaagtcactacagattcgataataaatgcattgagtcttgtgattctatattttctattcatcgcccccaattaagctacgtaataacagggacataaattgtctttttaatagattttttaagtcggcaagtactgtcttttagatatttcggttgtcctatgtagaaggtagatatgtaaagggtagattaaaaaaggaaatttaccttctacatcctatttagtatatttactatactaaaaaaggaaatttacctaactttctcattgaaaattagttattaccttctctttcaaaaagcagatcaaaatctctatccaaccatttccaaaaattcaagtctctttagttttcagtcaattaattttcgtgttttaaaggccacaaagtacccatctggtccatctcgatcccacacacgacacaactttacacaaaaagaaagaaaaacccaaaaacaaaagaagcaatcaacaagaaa

SEQ ID NO: 6276 - DNA, 3000 bp, Unknown
  misc_feature (1)..( 3000): cDNA_ID_1814052_gDNA_ID_1621088_Annot_ID_55411 3000 nt of promoter + ATG
agtctctttagttttcagtcaattaattttcgtgttttaaaggccacaaagtacccatctggtccatctcgatcccacacacgacacaactttacacaaaaagaaagaaaaacccaaaaacaaaagaagcaatcaacaagaaaatggacctcacccaaatcctactcctctcctttctctttctcactatctccatcaaactcttgctcacaaaatctaaccggaaacctaatcttcctccttctccggcttaccctttaccggttatcggccacctccacctcctcaagcaaccggtccaccgaacattccactccatctctaagtcccttggaaatgctccaatcttccacctccgcctgggaaaccgcctcgtttacgtcatctcctcacactccatagccgaagaatgtttcaccaaaaacgacgtcgttcttgcgaaccgtcctgatatcatcatggccaaacacgtcggctataactttaccaatatgattgcagcatcttacggcgaccactggaggaatctccgccgcatcgccgccgtcgagatattttcttctcatagaatcagtaccttttcttctatccgtaaagacgagatccgacggctcataacacatctctctagagactccttgcacgtacgtaaccaccttcttatttaactcattatttatcttttatttactttggcattactaaaatttaccaaaaaacaaaatatcaaaaatcaaaatttttatttatcgactattgcggttgaatttgtccatgtgagtaggattttccactttcaagccgcccttctttattatattaacacgcatatttaattatttgtcgcttattggctggaaaataatatatttatcagttaggttacttgtatgcatcaaatttgtcacgacagaaaataaaataaaagctctcagtcgtcatagatggaactgaactatacacctttgatatagatctattaaaaattacacaatgtaataaacttgactagtaatcgtcccactgcagggatttgttgaagtggagttgaaatcgttattaaccaacttggcattcaacaacatcatcatgatggtagccggaaaacgatattacggtaccggtacagaagacaatgatgaagccaagctcgtgagggaacttatagcggagataatggccggcgccggttctggaaatttggctgattatcttccgtccataaattgggtcacaaactttgagaaccagaccaaaatcttggggaatcgactcgatagagtcctgcaaaaactggttgatgagaaacgtgcagagaaagaaaagggtcaaactttgatcgatcatttgctttctttccaagaaaccgaacccgagtactatactgatgtcatcatcaaaggaatcatactggtaagttcttattaactaatattatcctccttatatgtggagtgggtttacttattagagatatatatatacacaggctttggttcttgcggggacagatacatcttcagtgacgttggaatgggcaatgtcaaatttgctgaaccatccagagatacttgagaaagcgagagcggagatcgatgataaaatcggttcagaccggttagttgaagaatcagatattgtaaatctccattatctccaaaacattgtgtcagaaacattacgtttgtatcctgcggttccactactactccctcatttctcatcggatgaatgtaaagtggcgggctacgatatgccacgtcgcacgttgttattaacaaacgtatgggcgatgcatagagatccaggtttatgggaagagccagagaggttcaagccggagaggttcgagaaagaaggagaggctcgaaagctaatgccgtttgggatgggacgacgagcttgtcctggagctgagcttgggaagcggttagtgagccttgctcttgggtgcttgattcagtctttcgagtgggagagagttggtgcagaacttgtggacatgactgaaggcgaagggatcactatgcctaaagctactccgttgcgagctatgtgcaaggcacgtgccattgttggtaaaacgatataattgacgtatgtaggatctattgtgtagaaacctatatagtttcttacattccacgtgttcatggaaaataaaagtattctgtggtcaattagttggatgcagagcaatgtcacggcttctatagaaagttcaacagaaccaaaatttcactgtttccatctctccaatgttggtttcttgaaatttagaattggtttggtgacttggtcatgtagtgggcatgtgttgggcctcgtcaaaatgttgtctttctctgcattttaaattaaatacccattaacaaatctgtatacatatgttcttcactgtctgaactagtaattcagcataagctaaaagtataatattttttttttaataaaaggactgttgttaaaaacgaaaagtttggatttcatgttagtgttggtaccgaatctgccacgttttgatgattatagttgtagaaaatgtcaaccaagcaatattattgtaaagacaataatggatggaaatctaagaatttcgattgaatttttatcttatcgagaactttcaacaaaaccttttggattgatcaaatgaaagagacataagtggttatacattagacttgttcacgacactccaatgtagtatgatttttctgtttgtttgtcaaattcattgtttacttgtcttataggaattttccttattttacaaaaacaaaagaaataaaagaaaagaaaattggtgcttgtttttccaaattagtacgctaattttatcactattgtatgcactattttgttatttgactttgtaaatgcatgaattaaagagtgtttaaaaatcagtatcttatactatattatttaatagcgcacggaggagaaaccaaaatatacacaaagttagagaaaaaaagaagagaaaaggagttatat

SEQ ID NO: 6277 - DNA, 3000 bp, Unknown
  misc_feature (1)..( 3000): cDNA_ID_4254989_gDNA_ID_1621088_Annot_ID_55412 3000 nt of promoter + ATG
taaatctatataaaagcaaatctttaatccattcaaatagcagatatgtatctctagggattaaggtagtatacaactataacatctcaaaagaaccaaattgtgactgcacaatgcaatatcataatttgtatatcgaaaacatgatatgttcacatggttcgtccataaacagtacttatattcatatttgaccactaaatatttcacattaaaaaatcgaaattagaaataattatggatttagttctgcaaactcgattttttttaaaaaagattcgaagatgcaagattgataatgaaataaaattgagggtacatcatacatgtgggggaagtgacgtttaaaaacaaaaaggaaaaagaggaagaagatagatgccaatattgttatcatgacaactatgaagcagagttagagtccgtccgtccatacaagtattttgtgtgagtaccaccgaatttgtctgtctatgttatctcccttctttttctcatgcccacgaaccaacatgacaattatgttttgttcgttttttgaaaaattctagagttttcatttattaattatcgttgagttatgatttagtatgattttggtttaaaaattccacttcttaggactcattgtttgatctttgtgtttcttatttatttctttgcacagtactaaaaatcatgcattagttcttaccattcacaaatcttcaaaacttaattagaaaaagaaaaaaaaaaatcgatcaatacaatgaaaacgttctcctatgcactatgcagaacaagtctcgaggattcgtatggtcaaatttattccgatcaaattattcgcgaaagtgtgagaaacaaatacgtactttatttctcttacctcctcctacgtcacttctacgcattcgtgccctaccttcatcagtactcttccagtttctaaaggttaaaaccgagtcgatgatccacgaccgtagagttaaatcaagtaatcaacttaagtcattgtaataagaaagcctccgctcaaaaaaaattctacaatattagtttgacataaaacttcaaatgatagaaatatgaaatcaaatagttgtagacttgtagtctagtactttcatttggctcatttggcaattgcaaagtttacgtggtgattactaaactccttgtcggtataaatgtttttgatcatgaaaccatataccgaaaatattggtatatatagtcctgcctaactccactaacaaaaagtcaggatttttaaattaccaactacaacttgaattgtcatttggaagattgattcattggaatattgtgtatcttaagccataaacaaatcccataatttaatagtgtgccagaattttgtattcatattttaagcagtaaaaacaaaaacaaaatacatatatatattctcaatcaaactataatactttagatttaaagctattaagaaaaacatttagctagtcaaaaaaaacaattaacacttttcgaaaggtccatttccaaggaagctagagaccgtccttttttactaattcgcctgcaccatccccttgtatcgagggtctaattctacaccttattccattttatattccctaacaatttttttagtttttttttttatattactttaattctaatgaaaactcctatcttccttcctctccatcctttttcatctacctttgaatcttttgacacttgtatataaagctttacttcctcctttgttactccttttctatcaatcaccaaaacacattcattgtcttaaaccctaaacctcaagaaccgaacaaccacaccaaaaaatgagaccggttggcttgatctttacggtcatgttcttggtctcggccttttcggaatcaagaaccgcggattgcagagttctccttggtggttcgacggaggaaatcgatcaatctaaaattcatggggtcgatttacgaagtgaagacttattaggggtcgtgatacatggttataagaagctaaggtggctctcatcggccggggagaggatgcatacaatggcttcaggaccgagcaggagaggtgctggtcactaaaatacgaacccaaacaaaacattatacttcgatatttgtttagctcaggtcatagaatcatatttttcattttttatagattattatatttattcagtcgctaaagatccatgtaaagtttagaagggtgatattctttgatcatacaatagtcggtttccttctcataaacaccaatttatagtacgtgcccattaatcgatatttattttagtttaacaaatttcaattttgagatctacgttaagccatcaaccatgcaaattgtatatgagtcaataatatagattgaggagatatgttatcggccattctggtgcaacttaaatgatatacagccacatgattatctcttttcctttttggtaaggttgataccacatgattaattataaagaagacattgattagttcatgttttaccacataattggaattaaaagtggtcgcaaattataatcaaacgtggtcgcaaatcgaatttcgatgagatgcaaacgttttttcagctgtaccttttaattcttttcttatttgttcgaaatgttggcctttggggaattaaaaggacatttcaaaaataatttattgtctttccataggagccggaaatggaaaagcttcaatcttcatgcacactatgttttgagtggacccaatttcgacaatctttttttaaatgaagaagataaaagttgttttttttggtaataatgtcgagtatttatagttttataccatgtttagtgagtatattgcagtttcacgttatgaaatttgtaatgagaaaattaaaggactaaaaaggcccactaaaagcccatatacattttcttttaaacacaactaaaaaccagtgagcaaatcctttctctttttgcatgtgtgtgttgtaaagcagtggacagagacgacgatg

SEQ ID NO: 6278 - DNA, 3000 bp, Unknown
  misc_feature (1)..( 3000): cDNA_ID_1814049_gDNA_ID_1621088_Annot_ID_55414 3000 nt of promoter + ATG
aactctagaatttttcaaaaaacgaacaaaacataattgtcatgttggttcgtgggcatgagaaaaagaagggagataacatagacagacaaattcggtggtactcacacaaaatacttgtatggacggacggactctaactctgcttcatagttgtcatgataacaatattggcatctatcttcttcctctttttcctttttgtttttaaacgtcacttcccccacatgtatgatgtaccctcaattttatttcattatcaatcttgcatcttcgaatcttttttaaaaaaaatcgagtttgcagaactaaatccataattatttctaatttcgattttttaatgtgaaatatttagtggtcaaatatgaatataagtactgtttatggacgaaccatgtgaacatatcatgttttcgatatacaaattatgatattgcattgtgcagtcacaatttggttcttttgagatgttatagttgtatactaccttaatccctagagatacatatctgctatttgaatggattaaagatttgcttttatatagatttaagtaaataattgaaattcttttgtccaaagatatttgttcaagaattatattaatttcatgtaattggaaggaatacaaaagactggaatcttgataatgaatttattaatgcagaatttgattccattattaatggactaccacgtccgaactatacatagttaaacattttttcttcttgtattattctggcgtggtcttacgccacttataaactatattattttggccaaaccaatatttataaaatcgaaataaaacattaaaccgggttttaagtactttgtttgtattattcaataattggttattaaactaagttaataatttcaaaatagtgatttcaccttaaaatatgggaaagagtttcctgatgctctggaatttggtttctttgtcttatactctaactgcggataaaaaggagcgattttgctataaaaaggaacagtttgagatgatattacactttattccggtaaattatttggctaccatcaataatatattcttcaaaactatcaatcttcctttttttttagaaaataaataaatttcatcacaactctgtttgaaaaatcgtttatgaacttgagacggaaaaattatcataattcaacgtcatatagcagcaagagttgaaataaaaattaatggttttgtcttttcataggatagatttcttatttctacctaacaaaaactaaaatttggatgttgaattttgagtagtataaagtttggttgttcaatgttttttgcaagaaaaatcacgtgagaaggaactatttttggtcgtgcaagaaaaataacaccaaagtgtttgaacttttgaagcattgatgattaggtttggtgtatctaacaatattataaaacaaacacatgagatccgactcatagtcaatttagcttatgtcactccttaaatcagctggtttaaccgaaccagaaaccctaaccaaatttttaaaaaaaattcaagttatctgattttaaatttattttctatatataaaaaatttggctgaaagttgaaacgaaaccaaagctagagatgtacattttctagtaaagtaaaataaagtaaacaaattcaatctgaaaccaacaatataccataatatacttacgaaaaccaaatctaaaccggctaacgatatatgtgagtgtgactttatatacgttgcgagtttgaaattcaagcattatttttggtctacacaactacaaatctaccttaatatttagctgccgtctgctccaaacaatgaaacttcatgtttggtctacgatattaaattctttatttctaatattcaattccttatccttttcttcattgatggctttcactattttgtgttcaataaatacacacaaaattgaatgctcaagaaacaagttggtattttcccaggaagcagcatactaactaatttcaatgatcacattcttttcaattcaaacttagtcaagaataaaaattcaaactttgcatctccacgaacactactatatagtcacattctcaactcacaaaacactcacaacaaaattcattatctgccaaagagaaagaaaaccatattttttataaacagagttaaattgttcttaaacatgatgatgaacaaaaacgttctgagttcgattctgttcttcatgttgattggttcggttcttgtcgagagtcgtccgcttggtctaacaaagaccgaggagaagttcgtggctagtttattcgatggcttatcacttggttcgatcaaagactcaggtccaagtccaggcgagggtcataaggtcgtggacaggaaggatacgtttcgatttgttaagcactcaggtccaagcccaagcggaccgggccactaatgtttcaatctttagttcaaaccgggccggttaaagtgcccatacccatctaggtcgagaaaattatttcatttttttgttccagtttcattagtggaaaatattatacatgtctcatgtttctgatcgatacataggaagaagaatggcaaaaacaataattattgtctcatttttctatatttaggattattgttttgttagtgaaataaagttacttgaaaagtatacaaataaaatgtattaatcaatttttttatatttatttgaatgtaataatagttaataaacatcagtgtccaaagtgaaatatgagtccaactgctcaacgaccaataaaggcataaatttttttaaaaagacaatgctttataaatgggcgacgagtatatttaaaaggtttaagagatttaatcgaactattgtgaaagttaagggactcaattgaaaaactattcgcaacgattcagtcattcagcagttgtcgtagattcatttatctagacggttaaaggggtgccttgtgatgtgaagatctttgcctctcgctctcgctttcggtgaca

SEQ ID NO: 6279 - DNA, 3000 bp, Unknown
  misc_feature (1)..( 3000): cDNA_ID_1814045_gDNA_ID_1621088_Annot_ID_55415 3000 nt of promoter + ATG
cgtcgaaggaagagacggcgagtgacggagatacggcgagcggtggcgcctcaccgtccaacgacggcagactcttctcggagggcgagcgtgttctcgcttaccatggtcctcgcgtctacggagccaaggcaaataaaaaacctctctctctctctctctttctctgtgcatcgtcagatgttcgcataatttgaattctagagattatcttgttcgtgttaatttagcaattcttgtatttcacgtgggttttggttgtatccgactacggaattaactggtttcattgaattgagatctctctgctagatttggcttaggggtttcttggtagatttcggtttcaagttacgacgatccgaaagatgaacccattgagattggattcgagttttctttttttggtaatggattcatgtagcattagagctttttagattggaatgatcataaatgcttagtcgtaatagatgcaaaagaataattcacttgccgttggagcaaggaattcaataaattactcggaaaatagggcaagctaatctacttgcatgtttattttttcaatcatatattatataggtcactggattgagtctcattcatatcaaatgtgtgtcgttgttatgctaaatcttcatagttttgaaaaaaatctgttattgcatagtgttttcagtgtgtgggcagacctgatagattattgacattccattacaggttcaaaaggtcgagcttcggaaaaaggagtggaaatactttgtgcactatcttgtgaggcctccttcttctgagctattatagtttcattatcctgtttcatgtactagctattttcattttggtttgcagtaataagtgatacagcgatctttgtctgcagggttggaacaaaaagtgagtatctctctctgctctcatgtcgattctggtttatgtagcaaaatcagtagattgggacccatgacatgattgtcttgccaacagttgggatgaatgggttagtgcggatagattgttgaaacataccgaggagaatcttgtcaaacagaaagctctagacaaaaagcaaggagttgaaaaaggtaccaagtctggccgttccgctcagacaaaaactagaagctctgcaggtgagttgttgcctccacattgaccatgctgagagtacatgatacatattttggtcatccaggctaagaaactaactatttctttctgatcttgcacttgcagacacaaaggctgataaagatgacaccaagaccaatggtaggcaacatattaatttacgctccctttgtagttcagggttctcccaacaatttccaaggaaatgatttggtagactgggtgcaacttaaattatttaagctggtgtatagatgattacattttctgttgcagctgcaaaagggaagaaacgaaagcacgagtcaggcaatgaggtcaggcttgcaaaaacttagagatgtatttggttcatacctgttaggtctttgttaagattatattttacagtacaatagatggctgatgtgttgttatgcatatacacacatacgaaaagggtcaatttttcaggtcttctaatatcgataaggtttttgttttcatttgtaatctatagaaggataatgtaacggcggagaagctaatgaagatccaaattcccgcatcacttaaaaagcaactcactgacgactgggagtatattgcgcagaaggacaaggtatcatcaattttctctattttgtgcacatacttttagcactattagaattgttattgaatcagctagacttgaaagttaagagacataagtgtgtatttgtagtcgaatgaattgtgtataccaaagtgaagggaaattgatgtttggtaatctgtcttcaaatgattatataggttgtgaaacttcctcgttcacctaacgtcgatgagatattgtccaagtaccttgaattcaaaaccaagaaggatggaatgtgagtcttttactcgaacacagagtttgatatatttgaatcttttccgaaatccaacgatacaaaattttgtgtttctgtttttgtgcagggtaactgattcggtcgctgaaatattgaaaggcataaggagttatttcgacaaggcattgccagtgatgctcctatataagaaagagaggcgacaataccaagaatcaatcgtggatgatacttcaccttcaactgtttatggcgccgagcatttgctccgtctctttggtaaaatctcattaagttcttatttggacagtaaaattcgatgttctgaaattttatttttgctttttttaaaaatctgcagtcaagttgccagatcttttttcatatgtaaacatggaagaagaaacatggagtcgcatgcaacaaacattatcagacttcctcaagtatatatctaatctctctgtttcatcactaccattttgatttctcggttttaacggttaaattcacaatttctggaaaaaaatctttacaggtttattcagaagaatcagagcactttcttgctaccatcagcatatgattctgataaggtttcagatggtaaaggcaaaggaaaagacgactgacatctccaggaaaaaaatattgttgtaatttagaattccttcatttttctgatgaattcataattgtaagatttgcagctgaatatgaaatattttacaggcctttgaagttaactatttggttcatgtaaatttctttaagtggtcaataaaacatccggaacaatggaaccttggttggtagaaggcaacaaaaaaaatggaaaaaataaaaaagtgtatgagatgagattatttatgtggctaatgtcatcggaataattacattggttctccttctctgttattattctttcatctttttcaccaagacgaacgactcttacacgcagagttcgcgagatcagaatcaatggtggcatgaaaaacgacgcttgagctcaaattcgtcgacc

SEQ ID NO: 6280 - DNA, 3000 bp, Unknown
  misc_feature (1)..( 3000): cDNA_ID_1814041_gDNA_ID_1621088_Annot_ID_55417 3000 nt of promoter + ATG
ttgtactttaagtctttaagatacattatgcttaaaaatgacagttaaaatttggtttgtatactacttagacgaattctttgactgttaatattcaaatatatttgcattctctgttatttcattcatatccaataaatatatatattatttattatagtatgatataaactaacacataatatatacatagatatatttcgtttaaagatgtggtgtcaatcgtattttttatagagcaaaatttcgaggtaaattagttttttcaaacatctacagtttgtacatggcattggacttaaataaaataatgtcacgtagctatcgacaaaaagaaaagcatctgatgtagctatgaaatttacaaccactgctaaacaaattgtccacttaataaatagtttatagataatttgggaataaagctgacaatgactgtgtcggatatcgttattcgccgaagctaacattcatataaacgaataacgttttttgttttttttggtcgaaataaacgaataatgtataaaatgaaattttgtttacaccaaaaaaagatccaccggtaacaagaaaaaatcttagtgctctgaattagaagaataaattaattatcacaaaaaggaaaggccgtagagaagattgtaagctttaaaaagcccaatatttttggacaattttcgtttggttacctgtccccgttcgtcctttcaagtacatcttcttctctctcgatttagcttgaggtataaccagtcaaccgccacatttccttgtattacaatgaataattgggcctttaaagcccataaattggcctctaaacgtttcattcggttaagtcccttgcattttaagatttcatcttgtcatttcacctacaattacaaaacaaaattacaaatcatctctctgtttcagagtcaatggttgaaggaaaaaaaaaaaaaactcactgtacttttatttttatggatcaaaagtgagttgttctatgatttactttttgtttcacaaacagataccgttttgtttctttaatacaagtttaaaaaaaaaaatgtaatcgtcattatgatttaagtttattatttccataactgtatactgtatagtgtgttgagaaaaacatatgatataaattttagatgttttcttaaaacgagggaatttaaatcatttaatagcatatcgtaagtttaaagtcaactagaggagtgaatggcaggctaattattcttcttcttctcaacccaactcgaggaaatttagctgaattagcataaacaatacgtaaggaggaacatgatccattgattaggcaaaaagtttaggttacaaattcatacatttgcatcttacttaaaaggagcaatagaattcctagttccaaggtcaagagtcaatttacatttccattttttaaaaataattttgtttgatgttataagttataacttaagtaatagatacaaatcatggggacataaacatagatgagcttttcttatggttgaaagaaataaaaatccaaatggcgaaggatcaaatggccgactagcattgattgaattgctaaagcgagactttaccttttacattataaatcatttgatttgacctcatttgtgacttaagttatctaatagcgattttttctctatgtttttttttataataagtttttggttgaagattaagatgtagatcataattcagggaaaagatcatctaatgaaaattcatggtccaccacaagactaacaaggctgggtttgtggcttttactattggactcattatagttgatgaactttattgaatctttttcaacccaaattttgtattttataaagaagtgggtagagatcacctccaacctttacaaaagaaactgtttaacagttataaagaatgcaaaaagggaataataagagactaaaatgatgagttatggagtatggaccatgtgtgcactcgtatatctaattattgaaaacctttacacttttttttccagggatgccttaaatacaatttacccacctcatgaatcatgcttatccaaactcaaacatatccaaaaccatgtaactgatcttcaatttgttaccattttataacctcgaagtaaatgcgtatttttttgcttataatattgacaatttcaatttccttacatataatcattcatataaagaatgtgaagctcttttaaactcatggagtgttatattattttccctccaattaatcatatgtagcttgaagacaaattattatttcgtacagaattgaatgcagaatcttccggacgactgaaatagctctacttattacaaaaaaaattgtaatcaaacgaataaaaacaaatgataataagcagcacatggaaaccatttacagagtaaaatacttgtaaagcatccataaacaaaaaaaaaatccccaaaaaatggaaaacagcagagacattcgaaactatattctaaaaacaaaaaccaagaacatgcccttatttttctaaaattcaaaaacatccattatattcgatttagattccttcgagctatattggttgtgtgaaccaaaaacagaagaatatcatgtaaaagtcaaatttacaactttagctatagatgatataaatgtcttgtagcttactgattctaagaatctatctactcgtttcttcggctcactaaagaaagagagagagagagagaaaaaaagaaagtacaatttcataataataaatgaagaagaccgtaacaagaagtgtgtagtcgtattgattatagaattaaagaaactctgcaatatttttgcagagagacagagacacaaagaaagagagagagagagcatttagggagcaggaagtggagtgtttggttacgtgagctgttttctctttctctatctttaactcccttcacacctctccctctctcttcttcatatctctctctgtcacaatagtgtgatgatgcaatgaga

SEQ ID NO: 6281 - DNA, 3000 bp, Unknown
  misc_feature (1)..( 3000): cDNA_ID_1807333_gDNA_ID_1621088_Annot_ID_170554 3000 nt of promoter + ATG
aatctttcccgaaattggtgttcacagttcccatcctagaagagctcatttcagcagcagcaggaacaaccttgtcactggcatttggcttagctgataccatgcccattagctcagcaagaacctgctttgggttctctgcttgttgttttaaatcctcaagctgcagaaaaaaaatgttggacattagtatgggtttagagatattttaatgaactgataggtttagtttacttgccttcttttctagatcttcagcgagaccagctaagtctccgatctcaacttctttgtctgaagcagatttatcaatgtaaggaacattggatgattgttggatgccttcatctatttcagagacggttgaggaagttgctgaaccagatgcacctttgatttcattactgagcctctccatccgagctttgcatattaacaaagctttttgacaatatggtattgcttccttaggctgacatccagtctcaagacaaatgcagatgcggaagtttctgaaacgttcaagttaagatataatccaacaactgaattgacagaaacgaaaatcaggtacaatttaagaaaccacaaggatacaattcagctgtgcgtcgactgtcgggctcaaccagtctctctaagatggataatgcattcttgtagtcagacagggaagactcaatgtcctctgcatagtaaacaacagaactcaaaaccaaccaatagctgacatgagaaaataagacaatgcaaaggtgaaaggaagaaaaaatacctctttccaaggacacttcagcaagcgaacagagtatatccactttttccattgtctcagtagactgtttgtcagtaataaccctagcaatgtccagcattttccaggccatatccaaatcagactcatcttcatcagcatcaccatcagcatcagataggtcatcatcttgacaatcttcaccatcctctccttggtctttaccaccagaacctatacatgagggagaaaagaagtcagcaaacaaagaagcagaagcatctatacccataagcttaacctaagacaattcccaataatccataccttcttgcccacttgaactcccttgtctctctgggtcacctgaaacaacagaaggagccagcgattcaccattgctggactcttgctgaacttcaccttctttcttaggcatgttcccaagtggatcagcttcagcttgagcctttgccaggagagctaatccatatcgatagtatgcgtttatacactcagcatcaagttcaccataatgtgcaaccctaaccataccattaaaacaagcaatgttttcattagatcctttgataaaaggaccagatactaaagaattcagtcgagagaacacacaattgaaactcaactaaaaattcagaaccatgattagatcattcgagcataaactagattcagaaacatctgaaaccctaaacccttgattgagaggttctcgactacaaattctcaaatgaatctcccaaaaagatacctgatttcgagagcacggctgaagcaatcgacggcttcagcgaaatcgttctctttcaaaaacacagagcctttctccgtcaattcctcagcgaactcaagcgtcttctcacgctcctcatcacaaacctcagtagcagcactgtcagcggcgttgttgttattagcgtcgttgttacaagtcgattcagtgcctccctgaacaaccgattcgacggtggcttcgattgaggctaggttaggttctagggtttgcgcaatctccgtcgccggctcggttagggtttgtatcaccgaagcttccgacgcagaagctgattcttcaaccatcgcggattgagattttttctgggtgaatttgaatttcgaagaacaaaaacgtcaaatttgttgagaagagtggaatcgtattaaaaccctctcttcgctttttttggcggacttgaaaatgaaaaccaaaattaaagaattaggggaaaaaatatttttatgttttaattaaaatattcacggtaaacactaaaatatacgaataaaaaatgcgtatgttatcccactaacggttagtctagctaaactgctccgcttttgttcaagctatttgactcatgacgcacataggccataggaaaattgttacgctgtaaaaaaatatatgaccgttgtaacggaaaagggtaattttgtcttaccgaagttgtcttaccgaaaagggaaaattgttagctaaaagtttttctattatataaaatatttttattacaaaaatgtttttaaacttaaatgttaaatttaaatactggaacggttagatttaacatcccgtcttttaggtatgtaactcgtgcgttatcataagttcaacatgttttctcatatttaaatttaattttaagattttttcaaaaataatctgttttgatattttaaagctaaaagtttattaacaaaatgttttcaaacttaaatgttgaaatttaaatacttgaaagcgtttagcatcctgttcttttagtctgtaactcctgcgtattataagttcaacatattttcacatatttaaatttagttttaaggcttttttaagaataatattgtaagtaatccgttgatttttttttttcgtcaagtaatccgttgattaaacgcaaattttaattatatatattctttttattcaaaacttaaatgttaaatttcaaagatgtacaaactaaacttgatattctgtccttagaaaaaattaccacttagctttataaatattaaagtttatcaaggtaaaaaaaaacactttaagtgtatgtggaatataaagagtgactcatttcatattattttgtaacaaagtttaaatctttgtaacaaaaagcgtgtggctctaatagcttggttagacgaagaagctactactccttcgataataacgatctgatgagtagcagttttgtcatctctctcactctctcccgacg

SEQ ID NO: 6282 - DNA, 3000 bp, Unknown
  misc_feature (1)..( 3000): cDNA_ID_2105093_gDNA_ID_1621088_Annot_ID_170553 3000 nt of promoter + ATG
ggggagccatgggatcagatgtggttagggcctggggatttgggagagaagaattgcaggaaatgagggagaatctgtcaaaaatggtatctgagctgaatcctcagtttttcgaatcttcggattcagattagttatgtcttaaaacgaatatgttgtatcatctttaaagattttttctggtttggtttgaaactttatggtcaaacccgttgttgattgacttatcttctttgtgtaagtcgcttgagagagttgatattggaggcataggagagaagcattgtcaaacaagaacaaaccgatatcaacatttatagttccaatgggattcttttgatcaatttgaaacattgctactttccgactttcctttcctgtctactttttttgtgcactatagagttagaaacaacttctatcatctgccagaagcatgatagtgatgccactctctttatccatggcttaagggatcagtaacctgatgcaccttacgagactctgagcttgagtactgtcccacggctcgggcataaggaattgattgtttcccggctgcaagcgcattcacattttcaactaaatactgtcttgggagcctcccgaccacattaccttcttcgttcccttctctatcgaggaaggcgaaatgaggaataccctcaacaccaaactcatccaactcttgctcccatttcgtgttgtccacatttagcatcacaaagttaactttgtccctgcgaaatcacaacaccacaagtaaacatcaactttagcctacaaaacgtcaaattagtgtctaaaaagctccatgttccattaaactaacatgagattaatggtttgcctctgcaactaaaatctcaaagctctacctttttcattagcgtctatctacatagccaacaatccaatcctaaagatagttccctaatccattaaaccaacacaaaataagaactcttctgcaactagaatctttaaagctctagctagttcattagctaaatccattccaagacaagattccttaatccatgtttttcgaagctctagcaatgctcatcttaatctccagacaagttccctaatccgttctgcaactagaaagctctagcttgtctttcatctatatataaaggcttcattttgaaaggagattgattttgatcaaaaatcacataaaagacgattcattacttgtattgctgctcgattttataaacatcaggagctagttctcgacaaacttcacaccaatctgcatagaactcaacaacagtcggcttcccattcgataacgcctaaatatccattcacaaaactcattaagcattctatgagaatagaaacacagatgaagaatccaaaaacaaacctcctcgtaaggcaacgcagaagcggttaaatccttcaaagaaatcccaaaatcgagccttgtcgatacaaataacgacaaagccgcgattacagtaacagccgcaactcttctattgatatccttattgggagattcagggaatcccgaagaagaagaagaagaagagtcagcaacagatgatgatgattccacttccttcgatgcagatgaagtttcaccattatctattaccaatttctcctgaatcaggtaaaggctaaaactttagctaatttgccttcgacccatttcaaaaagaatcgaaattttcacctgtttggtttcggaagattctgggtttggtttgcaacgaacagcgcgaaatcgtggagctcctgtttgggtaacgaagaaagattgaagatttcgaggactgagattgaatccatgactagatggaaggtttaaagaaaatactaagcgagccatcgtcgggagagagtgagagagatgacaaaactgctactcatcagatcgttattatcgaaggagtagtagcttcttcgtctaaccaagctattagagccacacgctttttgttacaaagatttaaactttgttacaaaataatatgaaatgagtcactctttatattccacatacacttaaagtgtttttttttaccttgataaactttaatatttataaagctaagtggtaattttttctaaggacagaatatcaagtttagtttgtacatctttgaaatttaacatttaagttttgaataaaaagaatatatataattaaaatttgcgtttaatcaacggattacttgacgaaaaaaaaaaatcaacggattacttacaatattattcttaaaaaagccttaaaactaaatttaaatatgtgaaaatatgttgaacttataatacgcaggagttacagactaaaagaacaggatgctaaacgctttcaagtatttaaatttcaacatttaagtttgaaaacattttgttaataaacttttagctttaaaatatcaaaacagattatttttgaaaaaatcttaaaattaaatttaaatatgagaaaacatgttgaacttatgataacgcacgagttacatacctaaaagacgggatgttaaatctaaccgttccagtatttaaatttaacatttaagtttaaaaacatttttgtaataaaaatattttatataatagaaaaacttttagctaacaattttcccttttcggtaagacaacttcggtaagacaaaattacccttttccgttacaacggtcatatatttttttacagcgtaacaattttcctatggcctatgtgcgtcatgagtcaaatagcttgaacaaaagcggagcagtttagctagactaaccgttagtgggataacatacgcattttttattcgtatattttagtgtttaccgtgaatattttaattaaaacataaaaatattttttcccctaattctttaattttggttttcattttcaagtccgccaaaaaaagcgaagagagggttttaatacgattccactcttctcaacaaatttgacgtttttgttcttcgaaattcaaattcacccagaaaaaatctcaatccgcgatg

SEQ ID NO: 6283 - DNA, 3000 bp, Unknown
  misc_feature (1)..( 3000): cDNA_ID_1814035_gDNA_ID_1621088_Annot_ID_170552 3000 nt of promoter + ATG
cttgaacaaaagcggagcagtttagctagactaaccgttagtgggataacatacgcattttttattcgtatattttagtgtttaccgtgaatattttaattaaaacataaaaatattttttcccctaattctttaattttggttttcattttcaagtccgccaaaaaaagcgaagagagggttttaatacgattccactcttctcaacaaatttgacgtttttgttcttcgaaattcaaattcacccagaaaaaatctcaatccgcgatggttgaagaatcagcttctgcgtcggaagcttcggtgatacaaaccctaaccgagccggcgacggagattgcgcaaaccctagaacctaacctagcctcaatcgaagccaccgtcgaatcggttgttcagggaggcactgaatcgacttgtaacaacgacgctaataacaacaacgccgctgacagtgctgctactgaggtttgtgatgaggagcgtgagaagacgcttgagttcgctgaggaattgacggagaaaggctctgtgtttttgaaagagaacgatttcgctgaagccgtcgattgcttcagccgtgctctcgaaatcaggtatctttttgggagattcatttgagaatttgtagtcgagaacctctcaatcaagggtttagggtttcagatgtttctgaatctagtttatgctcgaatgatctaatcatggttctgaatttttagttgagtttcaattgtgtgttctctcgactgaattctttagtatctggtccttttatcaaaggatctaatgaaaacattgcttgttttaatggtatggttagggttgcacattatggtgaacttgatgctgagtgtataaacgcatactatcgatatggattagctctcctggcaaaggctcaagctgaagctgatccacttgggaacatgcctaagaaagaaggtgaagttcagcaagagtccagcaatggtgaatcgctggctccttctgttgtttcaggtgacccagagagacaagggagttcaagtgggcaagaaggtatggattattgggaattgtcttaggttaagcttatgggtatagatgcttctgcttctttgtttgctgacttcttttctccctcatgtataggttctggtggtaaagaccaaggagaggatggtgaagattgtcaagatgatgacctatctgatgctgatggtgatgctgatgaagatgagtctgatttggatatggcctggaaaatgctggacattgctagggttattactgacaaacagtctactgagacaatggaaaaagtggatatactctgttcgcttgctgaagtgtccttggaaagaggtattttttcttcctttcacctttgcattgtcttattttctcatgtcagctattggttggttttgagttctgttgtttactatgcagaggacattgagtcttccctgtctgactacaagaatgcattatccatcttagagagactggttgagcccgacagtcgacgcacagctgaattgtatccttgtggtttcttaaattgtacctgattttcgtttctgtcaattcagttgttggattatatcttaacttgaacgtttcagaaacttccgcatctgcatttgtcttgagactggatgtcagcctaaggaagcaataccatattgtcaaaaagctttgttaatatgcaaagctcggatggagaggctcagtaatgaaatcaaaggtgcatctggttcagcaacttcctcaaccgtctctgaaatagatgaaggcatccaacaatcatccaatgttccttacattgataaatctgcttcagacaaagaagttgagatcggagacttagctggtctcgctgaagatctagaaaagaaggcaagtaaactaaacctatcagttcattaaaatatctctaaacccatactaatgtccaacattttttttctgcagcttgaggatttaaaacaacaagcagagaacccaaagcaggttcttgctgagctaatgggcatggtatcagctaagccaaatgccagtgacaaggttgttcctgctgctgctgaaatgagctcttctaggatgggaactgtgaacaccaatttcgggaaagatttagagtcgcctacagtctcaaccgctcataccggtgcagcaggaggaggagcagcatcaggtgttactcacttgggtgttgttggaagaggagtgaagagagttttgatgaatacaacctcgattgaatcaagtgcatcaaagaaaccagctctagagttttcagacaaagcagatggcaactcctcttgaaaccggaaaaaggtataaaaattcctgttactagtgaagtatctaacctaagaaaactgagaaaaacatttggtatcttcctcatgaatcttccaagactagattttcaggttcatgttttgtaatggagtccgtacttgctacttttttaaatcgctgagatattttttactttttattcttgtttaatcagtcttattttttcaaagtgttttttagtttaggcacaaaagcagaatcttattatcacattatcagttgataatcatctgatgagaaatagttctttggagatcttttagggaattttataagtaataattaagggataattggatatcctttattaaaaaatgtaggctacttgtagaattaaaaactggaatcttataatatgattagtataataagattacgctatatctggattctggagatatcatagataagctctgtctatgaaaacgagacccttggggaagccacgtgtcaaatctatctctgtcaccagcgaagcctacgtggcgagcagctcctagaatatccaaattcacaacagtatttttttttctttcgttctgattcaacagttgtcacaaacagccaaggtgttttgtgattggttataaatactctgctatgtgagagagtttactacattcacaaacaaactaaaacttaaaaatg

SEQ ID NO: 6284 - DNA, 3000 bp, Unknown
  misc_feature (1)..( 3000): cDNA_ID_2155693_gDNA_ID_1621088_Annot_ID_170550 3000 nt of promoter + ATG
tctgctatgtgagagagtttactacattcacaaacaaactaaaacttaaaaatgggaaggggtgagtttttggccatgaagactgaggagaacgcggctaacctgatcaattccgatatgaatgagttcgtcgccgctgcaaagaagctcgtgaaagacgtagggatgctcggcggggtaggttttggcacgtcagtcctccaatgggccgcttcaatcttcgctatgtgagccaaaagacaaaaccatataacctctctggtttttgtttgaatcatatattgatatgatggttcttattgttttgctttgacagttatctgttgatattggatcgtaccaactggaaaaccaaaatgttgaccacccttttagtaccatacatctttttcacacttccttcggttatcttccagttctttaggtaatcaagaaaaactgttctttaacatgatgttatggagttcttttgaaaatataatccatattcgatataatttcacagcggagactttgggaaatggattgctctcatcgcgatcatagtcaggcttttcttccctaaagaatttccaggtcagaaccagcagttttcatgacttaacattagtttgaaactttgatcttgaaaatcttctttcttttttgcatataaatgtagagtggctagagattccggtagcattgattcttattgtggtggtgtcgccgagccttatagcttggacactaagagaaagctgggttggagcagtcatatgtctagtaatagcatgttaccttttccatgaacacattaaagcttcaggtggattcaaaaactcttttactcaaaagaatggaatctccaataccattgggatcgttgccctcctcgtttacccggtttggaccatcttctttcacatcttttaagtcaatccgacccattggtttgtagacacattcaacattttgtgtcttcaattcgttttcaaggtttgaattttataaggagcatttgtgtttgagaaagtcttgaatataaaaaagaagtttcaatcgtgcactgctgacttgtaagattgttttttttttcttgtaaatgtgtgacttgtaagatatataaataaatttgcatattggttgatttgttgaatcaatcttgaatattgtagactttttaattgatcatgactaatagttgttttttgaaaattgtttttcatttcattaacaccaaacaataaagcaacacaaatttctatcacctcctagcattgaactacgtgccgttgttcgtatccaaaagtgtatattcttgtaatcattcaccgtcaaagctcaagtagttagtagcaccacaccagatttccaaagcacaaagctcatgactagccttacctacacactcgatgaaatcgaaggccctttcgaagttgattacgcagcagtgacagtacacaacttcctggtggggagcgtgtaccgttcttgttcacgatcaagcagctcgtggcatcgcagaggatactttggtcccaagtcgatcccttcagcattcacccaaggccacgttggaaataaatctgatcgtaaaacacaacatctgcagattattatcaataaaaattcagaaatcaataaaattcactctgaaaacgcagaaaatctaaggtaaattcataacgaccttttgaatttctagtgtcgaagctgtattgaagaagaagaagaagattccgaagctaacaaaggagaagacgagagtggattgattgctcctctctcctctctgatgatattcgtgcttctacactcacagagatacactgtttattattgttttcaatatatgagaggaggagcttccctactatttttagttttttagccaatgagagagctccacttcataccccacttttaccaatcgtgcgatttcacagccactctcacccatgtcgcgttgagcgcgtgtctacgatttctaaaggggttattaatccacaaaatttatgcctttttgaatccacgcacctcgttcttaaaaacccatcgcgtgtcttatttgttttggttttcttctctaaaccaaattaaaccgaaccgagatcaatttgaatttcgaaaccaatgtaaacccatcgctgtgaaaacaaaaagctcggccacaaaaatggagacgacacaacttggaagagaaatcaactcgaaatagccaagagaatgttcgtaaaccccctcaaatccgatgcttcctttgattccaacctccaaaagcccatctgctcaaatccgaggagtattacaaggtacctctatagaatatcaaggctatgacaatgcggttgcattacctgctagaggaaacaatgaggagctagctaaggagaacaacaagatcacacttagtgtaacaaagagtaatcccgagagcggtgaagtgattggtgctttcgagagtattcaaccttcagacactgatttgggtgctacgactcctaaggatgtcaagattcaaggaatctggtattgccaacttgatgaataaaacatagagaatctgtttgttttctttttctgtaaatgttgttatgattaaggaatattgattccagttcatagtacatgtggtactccatttggtaacactttgcacttttggctttaatcagatactaattattgtgattaaaagactaattattgcggattaagataacatatttgtagatctgtataattgcttgtaacagcaaagatgatttctggttaagaagtaagaagagatttataattaagcaaaccatttgccttatgaccccattgttgtcacatccactttgtcttttcaccttccctgtctcaaaaaacagaggacccttgctctgtttcttaaccctgttttatctcctactcaaagttcaaatcttttgcgaaacccagtaatggaagatcaaagcaggtgaaaatgaggagaactagagacgttaacaagggctcttgttcaaggagatg

SEQ ID NO: 6285 - DNA, 3000 bp, Unknown; identical to SEQ ID NO: 6280
  misc_feature (1)..( 3000): cDNA_ID_1814041_gDNA_ID_1621088_Annot_ID_170546 3000 nt of promoter + ATG

SEQ ID NO: 6286 - DNA, 3000 bp, Unknown; identical to SEQ ID NO: 6278
  misc_feature (1)..( 3000): cDNA_ID_3093606_gDNA_ID_1621088_Annot_ID_170541 3000 nt of promoter + ATG

SEQ ID NO: 6287 - DNA, 3000 bp, Unknown
  misc_feature (1)..( 3000): cDNA_ID_4254989_gDNA_ID_1621088_Annot_ID_170538 3000 nt of promoter + ATG
gtcacactcacatatatcgttagccggtttagatttggttttcgtaagtatattatggtatattgttggtttcagattgaatttgtttactttattttactttactagaaaatgtacatctctagctttggtttcgtttcaactttcagccaaattttttatatatagaaaataaatttaaaatcagataacttgaattttttttaaaaatttggttagggtttctggttcggttaaaccagctgatttaaggagtgacataagctaaattgactatgagtcggatctcatgtgtttgttttataatattgttagatacaccaaacctaatcatcaatgcttcaaaagttcaaacactttggtgttatttttcttgcacgaccaaaaatagttccttctcacgtgatttttcttgcaaaaaacattgaacaaccaaactttatactactcaaaattcaacatccaaattttagtttttgttaggtagaaataagaaatctatcctatgaaaagacaaaaccattaatttttatttcaactcttgctgctatatgacgttgaattatgataatttttccgtctcaagttcataaacgatttttcaaacagagttgtgatgaaatttatttattttctaaaaaaaaaggaagattgatagttttgaagaatatattattgatggtagccaaataatttaccggaataaagtgtaatatcatctcaaactgttcctttttatagcaaaatcgctcctttttatccgcagttagagtataagacaaagaaaccaaattccagagcatcaggaaactctttcccatattttaaggtgaaatcactattttgaaattattaacttagtttaataaccaattattgaataatacaaacaaagtacttaaaacccggtttaatgttttatttcgattttataaatattggtttggccaaaataatatagtttataagtggcgtaagaccacgccagaataatacaagaagaaaaaatgtttaactatgtatagttcggacgtggtagtccattaataatggaatcaaattctgcattaataaattcattatcaagattccagtcttttgtattccttccaattacatgaaattaatataattcttgaacaaatatctttggacaaaagaatttcaattatttacttaaatctatataaaagcaaatctttaatccattcaaatagcagatatgtatctctagggattaaggtagtatacaactataacatctcaaaagaaccaaattgtgactgcacaatgcaatatcataatttgtatatcgaaaacatgatatgttcacatggttcgtccataaacagtacttatattcatatttgaccactaaatatttcacattaaaaaatcgaaattagaaataattatggatttagttctgcaaactcgattttttttaaaaaagattcgaagatgcaagattgataatgaaataaaattgagggtacatcatacatgtgggggaagtgacgtttaaaaacaaaaaggaaaaagaggaagaagatagatgccaatattgttatcatgacaactatgaagcagagttagagtccgtccgtccatacaagtattttgtgtgagtaccaccgaatttgtctgtctatgttatctcccttctttttctcatgcccacgaaccaacatgacaattatgttttgttcgttttttgaaaaattctagagttttcatttattaattatcgttgagttatgatttagtatgattttggtttaaaaattccacttcttaggactcattgtttgatctttgtgtttcttatttatttctttgcacagtactaaaaatcatgcattagttcttaccattcacaaatcttcaaaacttaattagaaaaagaaaaaaaaaaatcgatcaatacaatgaaaacgttctcctatgcactatgcagaacaagtctcgaggattcgtatggtcaaatttattccgatcaaattattcgcgaaagtgtgagaaacaaatacgtactttatttctcttacctcctcctacgtcacttctacgcattcgtgccctaccttcatcagtactcttccagtttctaaaggttaaaaccgagtcgatgatccacgaccgtagagttaaatcaagtaatcaacttaagtcattgtaataagaaagcctccgctcaaaaaaaattctacaatattagtttgacataaaacttcaaatgatagaaatatgaaatcaaatagttgtagacttgtagtctagtactttcatttggctcatttggcaattgcaaagtttacgtggtgattactaaactccttgtcggtataaatgtttttgatcatgaaaccatataccgaaaatattggtatatatagtcctgcctaactccactaacaaaaagtcaggatttttaaattaccaactacaacttgaattgtcatttggaagattgattcattggaatattgtgtatcttaagccataaacaaatcccataatttaatagtgtgccagaattttgtattcatattttaagcagtaaaaacaaaaacaaaatacatatatatattctcaatcaaactataatactttagatttaaagctattaagaaaaacatttagctagtcaaaaaaaacaattaacacttttcgaaaggtccatttccaaggaagctagagaccgtccttttttactaattcgcctgcaccatccccttgtatcgagggtctaattctacaccttattccattttatattccctaacaatttttttagtttttttttttatattactttaattctaatgaaaactcctatcttccttcctctccatcctttttcatctacctttgaatcttttgacacttgtatataaagctttacttcctcctttgttactccttttctatcaatcaccaaaacacattcattgtcttaaaccctaaacctcaagaaccgaacaaccacaccaaaaaatg

SEQ ID NO: 6288 - DNA, 3000 bp, Unknown; identical to SEQ ID NO: 6275
  misc_feature (1)..( 3000): cDNA_ID_3072305_gDNA_ID_1621088_Annot_ID_170537 3000 nt of promoter + ATG

SEQ ID NO: 6289 - DNA, 3000 bp, Unknown
  misc_feature (1)..( 3000): cDNA_ID_1813961_gDNA_ID_1621088_Annot_ID_170591 3000 nt of promoter + ATG
accttctcacaagttcatatttttgtgaatatattatatttgattttttcttatatccattatgacacatccaacatgatgcaagtggactactaccggaggacttagatagctaagattggttagaagctactggtgactttcgaaaaataaaaaatctttgagatgaagacattggaaaagatacttcgtgagaaagaaatgtgaagaaagttgataaaacaaacaaaacagaatcatagaaaaaaacagaggaatttaaagggagagacaaagactgcaaacagatttataactgaaataatggaggaagataaggcggttttgtcagaagatcacatgtcttctttaaccacttttttccttttttcgttttttttttctttttcttactaatttattgtcgtcgtaacaatgggttcgtgtcctttgaccattttacaattcatatcggtatgagtcggtttcttcggattaggttttttgaattcttaaggaagaatcaaccaagccataaatgttcccatgcttcgtgcgtagcttagctagcttcccatacaaaatgatatcccaaattgaacagaactataaagaaacagaaacggtcacacctttttcctctaaacgaaacggtcacctttagttgtcacatgtcagaaacacgagcgagacacttttgtttctttaaccttatcaaaagccacttccgtttgaaacttggttaaagacacctctttgcctcccatttcctccaatcccaatttttctcttcttttcaagtttcaaaaaatatgaatgaatcacttatatatcaagtatatgaaaaattccaacggtcaggatggggcgccgcctcatgaccaaagaagctgccgtgaaatgggaacatctcatccacccatcattcaagattccattctctttcttatttcttctatgaatcttcttcatagagatctacagccaaaaatgaattatttcagacgtgaacttattaaaccagactacagtttcttggaaactgttgtaacgttttgatttcagaagttctcagacatctatacctagttaaactcttcacaaaccaatgtcaatatgcttgcatgtatttggattaaacttttcgacttactaaactcctctgaataaataaataaaaaagtttaacaaaaaaaaaactcctatgaatatacatgcgtatataatgtgaataattcgacgtaaataaatgagatcactaagaagatactcgtaaatattttcaagtgacatcattctgttttaatggtattcaagttcccatgtgtatggttagtagccaataaacgtttgcctgattgactggaatcaacatatcagagggaacaataactacataaggcgtaagccatgacagctttttttgaatatttgtatgtgaattttgattgggttcaaaaagatcaaattagattgcgcgaccatgaaaaataaaatcattttaaattatttgaaataacaacgcaaagctgttggggggagagcaaaaaaaaaagggggtttaatataccacaatcaatatcgttttgctaaaactcaaaatgagagtgtttgtacgtattatacgctatatcttctacaataagatagttatgtacgtcagatatgaataaatatgcgatttttaatgaatacgcaaattaaatctctcgtgatatgctgatgtaaacaacaaaccacggaaaagtaaaaggaacaaaccatcttataatgtgcattttaatatgtatgaaaaagtattacagtataaaagataattcagtcaaaaagttagaagagaatagtaaactatttgaattacaagcgaatagtttgaccccacacaaatcttcgaagtttgatcgagttatttttttggtgaaatatatactcgcaagggaaggggaatttgtttcttggtcgactatctcacgaatctgcttagacgacatgtgctttattctaagttgttatgttgtattccatacaatcagaatggttgatatttaatccactttcttataatattcttttgcctaaattcttttatgtgcatatgaactaatttaggaaataagacgtttatatttgttgatcaagtaaaaaaaggtaaactgaataatgaataatattcaaacgaaagtgtgaagactgaaatcgatttttcaatgacatattattagtatcagataatcagataaatggtacgtaatatatataagtatgttatgtttttcttgattctatttttattagtgcgtcaaggtatttgttggcgttggaatcgttggatcatggatggcaaaaaccgtttaaatgtacatatgaactttacacagtataattcataaatactatttacaagtaaaattagtgtacaaattaaaggttaatcatgtgtaaaactaaaactttaagtacttttaagactcaataatttaacttggttgagacttactttcctctggagccgacgtccaacattgaaacgaaaacaaaatctcttctactcttctaccatagctttgatgcatgtgaggatgaaatgcaagtaaacaattagtgatataaggttaggacagaaatttaagatatactaaaactcgttttggagaaattgtagatccataagatgcattataatctcgaaatatattatttagttttaaaactaataaaaacagataaatatctcccgttatatagtattttgtgcaatatataatgttctttaatgaaaaatttgatgatgttatagataaataatgggaaataaaaagtattcaaatttcggattaaaaaatccatcgaaccgtccaccatcttgcatgtccatcattcccatttatttgtaatagaaaagtataccaacttgaaatattaaataccaaattttttgttataaatagtcccacagttttctcatcctccagaaaaacaaatcatcccaagtaatcctaactatacaaaacacataacaat

SEQ ID NO: 6290 - DNA, 3000 bp, Unknown
  misc_feature (1)..( 3000): cDNA_ID_1383434_gDNA_ID_1621088_Annot_ID_170588 3000 nt of promoter + ATG
ttcgactcgagtaataatggccaaaatatgaaagtaaattagaaagaaaaaaaaagactcaatttaaaaaagaaaagcaagagagaagaatgttttaagatttttcaaaatgaagttttaagttacaaggcttaacttatcaaagaaaaagataaactgtcgaattagagacatatgattaagaatttggatgatgatatttatatatgtgttagtacaaagcggatttacgatatggcttggggacaaatgaatactcagggttaaattattgagaagggaaaaaatctaaaggagatgacaaaaaagggacaaaggggaacacgttaatgtacaaatatagtaaggagtcaggaacttaggtacgatgtccatacgttttgcggtccaaagactttccatttttgtaaatctttgaaattaaccccacttggttcccaaacatccttcgacaccgacgacacacacaaacacaatttatttcttttaattaagttttactttttaaccttttttggtactatatatcgaaaccacacccaaattttagtacggtcccatttgcaataattcacgttagttaatggagggaccaacgaattattccgacttttcaagttttcatcaatatgggaatcatttccatttttcactttaatttctgctttaaaattgtttcgatgtttcagacaaaataaattaatttataagatgatggacgataggtcgggcctaactgaggcttaggtaagagatacattatgattcttcggtttcaagcttgaagaaaatatctcattatggttagttgacaagaaaacgacagcgtttgatataccattttattttttagagtacatattattatagtatgaaagcaccaaagactatatagtctaatttttagttgatctatagattttttaaaaagtttgcagtcaaaactgttgatatcggaaataagataacacacgaaaccccgaacgttagtcatgggaatctattatcaccaaagtaaaagatggaatgaagtttagtcggaatgatagacactgagacacccaacgatggtattataatagattaagaccttgaatgttttgtacattttgtaagagtttttgggttttgtttttcaaaaacttattttcataccaatcaagattttaaaattttggtttctctatagtttagaaaaactattttgttgtaatttttcattcctcattttagttttttttgttctcttaaaattttgaaaatctagtttatactcaatcaacgttatttttttcaaaaccaaaaatcatttttttgaaattttttaaacaaaaatataattacaaaaatctaaaactaaaatctaaaatctaaatccaaaaactgaatcgaaaatcaacctccattcagggcctaaattgtcctcttacaatacatttttctttccatatgtgatatcataacggataggtaaaaatgaataaaataaaaactttggtaaatggtaacaaaatatcatcaaaattttaccatttaccataccccaaaaagcaacatagcaattaaaaaacaacaaactatcatcaaaggcattataagagaaccctttgagtacaatgaaaggttcttgaatattgaatgcacgaatcaaaaggacaaaatgctaagtctatgtaatttttatgtatttacatttaagtttgaaaacatatcgttaataaaagtattttgtatgataaaaaacttttagataaaaaatataatagcgatttacttaaaactttgaaaaagtttaaaattaaatttaaatacgtgaaaatatgatgaacttatgacaccacaatacttacggaccaaaaggacgggatgctaagtctaaccattttcacgtatttaaatttaacatttaaatttgaaaatattttttattttacaatattaattaccaaacagcttttatttattttgaaactgaaaatttaaaacaaaattattatttttagtaaaatcaattgttatctataacgttaattaataaagaaaccaaaaaaaatatttttaaaaaaaagaaattaagaaaggaacatacctcgtgaaatagggagacgtttgtcatcagggattgttgtttgctaaaaagcccatacgctgttttgcgaagcccatatcatattgggccaagattgcaaattgtagatgagagatctgagtcatcttcatcttctctcctagggcgagtccttaacggtctgattctgagtcattgaaactccaaacctactcgtcggttgttgatgagagtttctttgcgcttttcagaaagaaaagacaggtccgcataagatgcatccatggttggctagaaatcaacatcgattgatcaaacacgagagaccactccaagtggcgttggtatggatatgatctctaaccagtaaccttgtcggattaatcctccatgattgatcagagattgtgaaatattagagagacctctctcgacatggcgttggtaaagatcggcgacgtatatggatcatcaatttcacggtttcgaaatcgacgatcgtctttgtaaaacagtagcagagaaaagaagaattttgtttttttgtctcttaaagaaaaattatgatttcccaacacaagacagatgaatatttataaggaaaggctcacgcaaagaaaaaaaggaaacatcaggttgttttccttttttcatatttggaccttaacaaaaaaggaaattgaatcgcacaattaaggagcgtttacaacggtcttatttttctaatctcaatttgcagatttcgttaaaaggccacgtgttcgatttttttttaacgcataaattgtattgtaattccaaaactacatcgttttgaggtttagccattaaagtcacagtcacactttcgcttttcccaatacgaacaagcggtgacgcatatctcctgtatcatcactcttttacttccggcgatctctctccgacggcca

SEQ ID NO: 6291 - DNA, 3000 bp, Unknown
  misc_feature (1)..( 3000): cDNA_ID_1807542_gDNA_ID_1621088_Annot_ID_170586 3000 nt of promoter + ATG
tgttattgcatcatcccactcaaaatatgtacaacgtgtcatgtaaaaagcttttgaggagcttagatttttagatttcattgaaagtttcactgatttttcttattttattttcacattcatatcgtcctactctattttcctctaattatttttttgtttcctacatcaactaatttgatgtttaattacatttgaaacatatcttatgttcattgaaaattatttaagattttgaccgacatatgggattagtaaaatatatcagcagctttagttatgatatgataaatccactacatggaaatatttgatgagtttggaatacactgaaaaaagacacagaattcttcaattcctcattcattcctttagaataaatcattgcaataaactccaaaaaaaactcgatggtaaaatcacaaagtggatagtgacgtggcaacctcaaaaattttggtttcaatttttttgttagcccatctttcttcttggacccaacaaatacacgaaaataaaattattcatgtttccctttccgacacaagtccatctccttcatctttcattcgattatttttgtggagatttttcagttagtaatagttttaatatctataaagattaaaaaaatattatggtgatgtaaaggatgacgaatttgctcacaaacaaataaaatacgaatctaacaatccaaatcttataattatataaaacaccaaaatgtaataacagttggctccagcattctagtcagaaaccaaacgtcatctcgagtcgtatctcgtgttcctcacgcgcgtttataagaaagggtgataaacacgcgggttttagagcgcctgaagatgaaaatacgaggtatagagagaaacgaaaggttattggtggatggaagagggaaaaagtggaccccatagtttgtccgtactaaaggattgatcttttctggtaacattttcctttttctctcataattcctttttccttttttcgatacctcttcctctctctaataacaaatcaacgtttttttgttttttgagtatttacgtttatatcctcgtagtcctctcatattttcagattaacctcaagggttttatatgggccactcattcttatgtaatctctccctttcttaatcgattttttaaatcttttactgggcattaccgatcaagcccgattataataaacccaaatagaataattagtaatctggtttggtgtatatttcaaattagaacaaacaaaaacaaaaagcaaaaagtttcattaaaccgaaccaaatggttgtaaatcataagaattgaatgcctaacctaaagcaaagcaatgcctcattttgcaccaaattagatggaaactagcttatgatatctcaaaattagtttgttcctagcaagttgatgaagcaacttgtgagctatttccactacgatttcgttctcttgagtgttttggttgtaattaattttgattaggtctaaaatcttcgtgtcacatgttctgcatgtacaactgtatttttcttgagaaaaaaagccattgcacaaacttcagttcaaaacattttgtgtttcttctatcaattattactatatagaaaaagtttctctcttgatatttgagtttaaaatctggtaatcatcaatgaatattgtcaacagttgttaaaatcagcaactttactaaatatgaacagagaatgcaaatggtggaagtttcacattatattggcaagtgtagaaaaatgtctgaaagtatatgggcgactgggagttatcattcattaagaaaacaaagaaatctagatcgttaaattctacggttaagaaagactttttattatggtaaagaaaaatagtcaaataaccaaagtaagcaattaatatagtttgatcaatgagttcaaaagcctttggttggaataactcattaagaaaacagatagtttaaaatcaattgaattatgatttcagacatagtataagtttgggcaaagtattttaatggaaatagaatacaaacttgataacaagttattgccatttagaaaatgttataactccttatatagtgagaaccctattgcttgcttgtgttcaaggaattgctgtttatggaactccactttaaataaacatataaataatctatttagtatcaaaaacttaatatcccatctactttgaatttgcccgatcatgaaaacacctatttattgtacataaatatacatctttaacaaatatagatctatgcgtgatctatttgtatttgtatcttattaccttttattcatatagaaaaaggaaaaaacaaacaaaaagctttgttccaagagtttaaagtatatcaaaattggcaaaattgtggggttttgaagtaatctactagattattcattttcttgcaaaaaacacctttttatagaattgcttaccgaaccaagccgtggacttcactttcttaaaacatgaaattacatattaaaggaatcttttgattaatcaaagaagatgtttgtatacatagataataaatgaaagtggaaatatttttttaaaataaaaataaaaaaaataaagaaactccaatacgaggaattgtttcgaatataatcttttttccaaagaaagcaagtggttagagagagaataatattattttattaaatttttacaaaaaaaacagtgacaagagaagagagagagagaaagggcagtggaagtaaatataaaggaaaggataaaaatgaaagctttcgtagaagcaatctatcaaatttttattttattttcttctctctctctctttagctcttttttttttgttttcattaaagtttttattttattttctaccaaccaaaagcttttctctttggtttctcttatttagcttctaaccttgaggagaatcataccagaggattgaagtttgaaccttcaaagatcaaaatcaagaaaccaaaaaaaaacaaaaaaaatg

SEQ ID NO: 6292 - DNA, 3000 bp, Unknown
  misc_feature (1)..( 3000): cDNA_ID_3093527_gDNA_ID_1621088_Annot_ID_170583 3000 nt of promoter + ATG
tttacgactagtttgaaaaaccgtgagctgacacaagctcattgctaatgctacagtaacagctaccttcacttttaactaaatgacagaccaatcattttaacctctgttttcttagctggcgcgtgacagacactctccctctctccatgcccataaaatctcaaagactgtttaaaaaaaaaaatgttttagctttaactgctttttttttgttgttggtgtaatgatatcacagagagaagaaagagaagagaagaagcagagagtgatgggagataagaaattgatttcatcttcttcttcttcctcggtttacgatactcgtatcaatcatcatcttcatcatcctccgtcttcttccgacgaaatctctcagtttctccggcatattttcgaccgttcttctcctttaccttcttactactccccggcgacgactacaacgacggcgtctttgattggtgtgcacgggagcggtgacccacatgcagataactcgagaagtctcgtttctcatcatccaccgtcagattctgtgcttatgtcgaaacgtgtcggagatttctctgaggttttaatcggcggaggatcaggctcagccgccgcgtgttttggtttctccggtggtggtaataataacaacgttcaaggaaatagctctgggactcgagtatcgtcttcttccgttggagctagtggcaacgagacagatgagtatgactgtgaaagcgaggttttttctcaatctctgttttttatcttttgcatgttttaaaagttgattctttgtctctttcccgagaaaatgtttctacagagatttctctttaacggatctgtactttattttcccccttaaaatccgcaatttttttggttgtgattttgagtgaagttttgtcatttgtgagtgtaataatgaatgcacaccgagtgtttgataatttgcttcaatgaaaatacaggaaggaggagaagctgtagttgatgaagctccctcttccaagtcaggtccttcttctcgtagttcatctaaaagatgcagagctgctgaagttcataatctctctgagaaggtttggtttagagtctctcccaaaagtagaaactttcttatttgagatttatgtttatctttcttgtaacagaggaggagaagtagaattaatgaaaaaatgaaagctttacaaagtctcatccctaattcaaataaggtaatgatactatatatagagagacatctacatgaatcattctattttctgtagattctttttgtgtctgattattgcaatgtgtttattggggaagacggataaggcttcaatgcttgatgaagccattgagtatctgaaacagcttcagctccaagttcaggtcactaaagataccttatgtttatcattataaccaaaatcctaaaaccagtctatattctgacataagtctttttttgttctgatatttgcagatgttgactatgagaaatggaataaacttgcatcctttgtgtttacctggaactacattacacccattgcaactctctcagattcgaccccctgaagcaaccaatgatcctctgcttaatcataccaatcagtttgcttcgacttctaatgcaccggaaatgatcaatactgtggcttcttcatacgctttggaaccttctattcgcagtcactttggacctttccctctccttacttcacccgtggtgcgtagttgaattacacatttttcattctataaccataaagctagtttgcttactaatttttttttgttacttaaggagatgagtcgggaaggtgggttaactcatccaaggttgaacattggtcattccaacgcaaacataaccggtaaagtcttgttgttttggaatcctaaggaagttttaggacatttacaatgttaataacgttacgatatttggggatttgcaggggaacaagctctgtttgatggacaacctgacctaaaagatcgaattacttgaacagtgtcccaacttcgggatctctatgtgttcttgtttcttagaacgcaagccataaagctgtctgacaatggagatgcatttaactgtctttattttttctaaggttctatttaaaatcaattgttggtgacacgaattctagagtctaatcttttggatctaatagctatatataaaaaggactgaaattttattacaaagtaattgactaattgttagattgttgtatgtttatggtggatgtaaattttctagatcatcttcgtattgtatttgagagtttgatactcgatggctttggatatgtaaattaccccgataagcttctagagaagttttcgattctacaagatggatttggtatctttaaggttgaccatgttcttttggtatctcttgttctcaaattgatcatttacaatacaattttttaaaatcttttacccttcacatttttgtacttacatttggtatattagtaatttcatttgtaagtgtcttttaaaagtttttcatttataagtgttgttttaagatcttttatgataattaaaaaatgcttaaatatcttattaacccttaattagtatacttatagctttagttctccaattaatctttagtaagtaaaagggacagagctagaactttatttaaaattggattgaaaatacataaatcttatatttttttcaaaaactagtattgaacatacaatttatttattttattttatttgtaaaacaacaataaaagtaaaatcatacaacgatatattttgaaaaaaggaaaagtaattaggattctctttcggtgaaaatatcagagaacaaaatatatttgaatgcgactgtagttgaaacttgaaaaaaatttagatactaaagtttcgtcattctctttttgttaaagactcagtgacgaccctctcctaaaaaacactcataaataaactcgctggagacgccggaaccaaaaacagagttctaatg

SEQ ID NO: 6293 - DNA, 3000 bp, Unknown
  misc_feature (1)..( 3000): cDNA_ID_1808519_gDNA_ID_1621088_Annot_ID_170579 3000 nt of promoter + ATG
taagaaagactctgcaacagaaacggctaagaaacgagaacaggagcgacaaaggctggagaaactagcggaaacaagccggttaagtcggaataggcagcgcagccgtagtaggagtattagtcgatcaccaccaccgaggttgttaataaagttatcatttttgcttcgtgattaaaatggggggatttgtgaagatgagaaggaagttttcggttctagagctctgattggatccgctctcttgatattcactaacacagttgtcatctctccttctcccgtttgattttctttactaaaatgttttgtctacagaagacacaggcgaagcagaagcagaagcggaagcaggagcaggagatcacgcaggcacagttcaaggtcacggtctaggtccccatctaggtcgttatcacgctctccgaaacgtcacgcagacgctctccatcttattcgaggtctcccaggtaagaacagatggaaagcattacatgtacgtcgaaaatggtgtctttgactctttgctttacctttgcctatataacatattgagttgttgtgtttgcaggcgaagaagcagcaggtcaaggcactgaagagaggaaactctaattgttgcggcagctttttttgttgcctctgttcattttttttttttttctgtgtgttttcgtatccttacgattcagtggtaaaatatggttttgtgggtttacatgggataataacaacgttttcatatgatgttttagaaatttataagatgttataaaaaaataattattttagtagttgaatgtgaagttttatggttagctttgtttgttggattagttaacaaatgtgtgtgtttgtcgtctctgtgtgagacgcagcgtaaccatctccatgcgttgcatcgttcgtgaaagtaaaacctttcataaagtttctaactttgaataatcatccgcaatctttataagatattttcagctaattggaattgcaaatacacaatttcaaaagtcttggttctttccaagaaataatttgttatagagagattgtcatactttacaactacatttagaaaaaatagttaaggctggtcccataaaaacaacttgcttaaccatgttatttgcaaaaacaaacttttataatctccatagtatagatttcactcaatttaagtaagaagaagaccatgaatatcaagcttggggcttgaattctcgcgaaaaggaagcatttaaatggttataacaacaatggaaacaaaaaacgtgacattagttgaaaaatctatttctctgatgtctatatgtatattcttcattttcttcttgtgatgaatatatagataaggacgatttggatgaaggagaataaaaaaaatcaaacgttgaatgtggtaggagcggagtcactataattcatgcgtcaatattgaatattggatacatgacatggtttccattaattggacccattctctgattttttggtctgtttattgaagcagaattatttattattattgttataattgatgcctttgttttgttcgaaaaatcaatgctacattaaataataagagagactagtgtgtgttgtcgtgtgtgtgcttgaccatccccatgcgttagttagataacgtgattataactccgtattactttaaactatactaacaatttgaaattttgtaacttcatctataatccacattctgatgagattttccagctctttggaattgttaagtactaaaagccaaaagtcatgctaaaacaaatcatttcaatgaaattctaaaacaaattgtattttctctcgttaatcaaatttattaaatgagattaaaacggacacctagggtttacaataccatcgatcaataagaatcgacagttaacacttaatccaataaagttggaatacgtagttctttaattaaatagatgtccatttatagatgatacaatattcctttatttgaaataactcccaattgattgtctattaaattttatatcttacccaatggaaatactatgaaagagagtgttaatagcctatagagtgctagctctcaataccatttgttcatctctcaaccatactagtatttttctgcatttaattaagaggtaaataaagtaattttcctcaatttcactgtatattctaggaaattgtttgactaataaaattgaataatttcattgaataatctcataattgtctagctaccaatgagaagtactagtaaagagcggaaactacatagcagaaagagtcttagggtctacgatcctagctttttaggcctgcagaagctaacagttacaaatatctgtaaaaataacctcaaagtgaaaaggaaagaggaaaaaaagcagaagctagttaagagaaacgacaaaagagtctgaatttatcgaaagaacaaaaagagcagaaaaatgtcacatggcaatagtcgtggcttctgtaataacggtacagagtaatcggatgaagaaaattaccaaaaacaaacaaagagaaagctctaacgtcagttaaatctgtttcttttcaccaattttttttttttttctctctcacaatttcatgaagaaaaaaataagattaacacattgaagagcgtgtaaaagaagaaactggtaaattgcattatcccaattcccaaatagagatttgtttggcttttcctctatttttcattattcggacaagccacgacacttgtcttaatgccaccaaaaaaaaaaaaaaaatcactcacatcatctctcttccctcaaagttctcaccttttgagattattacaaagaacacaaaagtacagtttctttattcccttttttgaacactttaaacatcatcactcttgaaacacttcaaatctccggtcaacaaaaaccatgacttcaatttcttaaacaaaaagtttcaatctttttccaaacaaaacccatttcagattttgttctttgagaaaccaac

SEQ ID NO: 6294 - DNA, 3000 bp, Unknown
  misc_feature (1)..( 3000): cDNA_ID_2106105_gDNA_ID_1621088_Annot_ID_170578 3000 nt of promoter + ATG
tattattgttaaaattattagatgtcaaattatattttaatctatagttgagtttataaatcatttaatatatgcagaaatatgtaaatgctaaaatatgttgagtcgccaatcaaaacaatgttattttaaaacaaacacgcacgaaaagagaaaattatatacttgtgtttttctagaaagttttaaaattaacagatttgtaattttttttttttcaaatatgacgggagacggaaagatattttatacaatacaaattgcgactttgttaattagttttgtttctattatatttctttttgtatatttaaatgtgttcacctaacacatttcggcttcatttcacatttaggcaccaatgagcttcatttaccttttctttttcaatatatgtgtgtctttagactaaacaattcggataatatattttaacgtgtgagtcgtgacaaattcaagttcttaaaatacccatcgacatctacgtcttcattcttggatttatttccaacacctttggcttttatccgcatttttattatcattcattgataacgccacggctaagtatttaatatcaatcaaagacagtaaaatcttacctaaatagttggcatggttgaagaaaaaaggtcttagagagacgagtattcatagtttacacaaattcaagtctccattggagaaagacgatatcaacgtgtgaaaatgtcgatagttgcatgcacatctccatatatatggacctcatcatacaaatcgtctatttttaaacgctatataattgagtcagtatacttattttgcaagttatagtagaatttagagctaattatatatctatataaatgattcagtattttgtgaaccaaatactcctttggcattgataaatgataaatatttgcgacctttttcatgtcgatagagtttttgttttttttcttaattcaagctagttgaggtatctcattttagacttctatacttcacatttactaacagcgaattgtttcctcttcttttacaagaaattacattctgttaaattgtgcacaatgatagaattttttttctccacatagaaaagtcggaatgaacaattttgacttcgtgaaatactattcaagttgatagtaaacaagaaacttctttaaaacatgcatgtattatgaactacattgttttttttttgttttttttacattagtttttactcaaaaatcatctaacagcttaaacggaaccatttactgtattttataacaaagaaattacagattctgactttatgttgggataaataattaatataatgcggatggtaacacatcgatgacattaacacaaaccactatcttatatagtatgtagtatttgaaaaaaaaaaaatggaaagaaaacaaattagaaaactatcggaccaaaagcataattactccgactttcgttatcataaaaatcttcacccattaactcgaattcaatgaactaatggcttaggtcctttttaaaacaattttggaccatttattcagttcttctatggaaagttcgaactaatttctagggtttggacctttggtgacatgagaaaaaaaaagaccacttgaccaaactcactgaagtcagagtaatggtgagtactctcgacacgcgtcaagaaacatccattttttttgttataaagaaagaaacatggatttgaaacgtaagtctattattttccacgaatctttttgatggaacttgaaagatgagtcatggtaataatataattgcgtttgttgagtattagaatgtttgagttccattccttgttcccatcatgacttttaaactttactttcttccatattctcatcttaacttttgagtcgacaaaaactgttcataaacacattcaaaatccaatataaactaacattgtaatatgttttacggtgaaaagaaaacattatacatacgaatattcaaatgcttatatcaacacattttggggttacagaagcaacgataaaaatatacatgaagctatatcctattatccatatctaagtaggatttgtgtcaaattatatcacttaaagctaaacttcttttactactactttaacaatacttggctacttggctacaatgaacgcgttaaaattttttttttttttagatttcacattttttgaagattaatatgattttagtttgaaaattttcagtatctagtttttagtgatcactccgattcaaactaaaaaaaacataaatgttcttctcatgacctcaaatcaagtggtccaactaatgggatatgatatatgaattaaatgcaatatgattattatgattaagttcatgtaattattatgtacgccatatgttaacgtcatacgttgccactacactcacctcaaaaacaaatgatcaatcacagcttcctgaatgtttggtcaccaccactaattcatttttttctctctcaatttgcagttctataagcgaagacaaataaataaaaaccatttttgcattataaactaattacttaaaaaatgaaaagaaaatatttttaactcgtgacacagctctttcaacaaccggattaaggctttaaacaaaatacaattttttctctaaaaaactatataagtaatttttatttttctgaatctcattattggctttttactcgatcacatgcaacatgcttctaccattttaaaagttggtgtggagccataaaaacacacacacacacacacacaaaactacatactaaaaaatattaaattgagtaaaacttctacatgaatcagaaggtttcattaaaataggggacacgtggaaaacctagatctattttcgctttacatcggacggtccaaattctctgtaaactagtcgtcggaaatataaaattatcgccaaaattcgcctgaaaattttcccaattcgaagagctaattagggtttcttctgagcttagagagcaaggacaag

SEQ ID NO: 6295 - DNA, 3000 bp, Unknown
  misc_feature (1)..( 3000): cDNA_ID_1813986_gDNA_ID_1621088_Annot_ID_170577 3000 nt of promoter + ATG
taatcataataatcatattgcatttaattcatatatcatatcccattagttggaccacttgatttgaggtcatgagaagaacatttatgttttttttagtttgaatcggagtgatcactaaaaactagatactgaaaattttcaaactaaaatcatattaatcttcaaaaaatgtgaaatctaaaaaaaaaaaaaattttaacgcgttcattgtagccaagtagccaagtattgttaaagtagtagtaaaagaagtttagctttaagtgatataatttgacacaaatcctacttagatatggataataggatatagcttcatgtatatttttatcgttgcttctgtaaccccaaaatgtgttgatataagcatttgaatattcgtatgtataatgttttcttttcaccgtaaaacatattacaatgttagtttatattggattttgaatgtgtttatgaacagtttttgtcgactcaaaagttaagatgagaatatggaagaaagtaaagtttaaaagtcatgatgggaacaaggaatggaactcaaacattctaatactcaacaaacgcaattatattattaccatgactcatctttcaagttccatcaaaaagattcgtggaaaataatagacttacgtttcaaatccatgtttctttctttataacaaaaaaaatggatgtttcttgacgcgtgtcgagagtactcaccattactctgacttcagtgagtttggtcaagtggtctttttttttctcatgtcaccaaaggtccaaaccctagaaattagttcgaactttccatagaagaactgaataaatggtccaaaattgttttaaaaaggacctaagccattagttcattgaattcgagttaatgggtgaagatttttatgataacgaaagtcggagtaattatgcttttggtccgatagttttctaatttgttttctttccattttttttttttcaaatactacatactatataagatagtggtttgtgttaatgtcatcgatgtgttaccatccgcattatattaattatttatcccaacataaagtcagaatctgtaatttctttgttataaaatacagtaaatggttccgtttaagctgttagatgatttttgagtaaaaactaatgtaaaaaaaacaaaaaaaaaacaatgtagttcataatacatgcatgttttaaagaagtttcttgtttactatcaacttgaatagtatttcacgaagtcaaaattgttcattccgacttttctatgtggagaaaaaaaattctatcattgtgcacaatttaacagaatgtaatttcttgtaaaagaagaggaaacaattcgctgttagtaaatgtgaagtatagaagtctaaaatgagatacctcaactagcttgaattaagaaaaaaaacaaaaactctatcgacatgaaaaaggtcgcaaatatttatcatttatcaatgccaaaggagtatttggttcacaaaatactgaatcatttatatagatatataattagctctaaattctactataacttgcaaaataagtatactgactcaattatatagcgtttaaaaatagacgatttgtatgatgaggtccatatatatggagatgtgcatgcaactatcgacattttcacacgttgatatcgtctttctccaatggagacttgaatttgtgtaaactatgaatactcgtctctctaagaccttttttcttcaaccatgccaactatttaggtaagattttactgtctttgattgatattaaatacttagccgtggcgttatcaatgaatgataataaaaatgcggataaaagccaaaggtgttggaaataaatccaagaatgaagacgtagatgtcgatgggtattttaagaacttgaatttgtcacgactcacacgttaaaatatattatccgaattgtttagtctaaagacacacatatattgaaaaagaaaaggtaaatgaagctcattggtgcctaaatgtgaaatgaagccgaaatgtgttaggtgaacacatttaaatatacaaaaagaaatataatagaaacaaaactaattaacaaagtcgcaatttgtattgtataaaatatctttccgtctcccgtcatatttgaaaaaaaaaaaattacaaatctgttaattttaaaactttctagaaaaacacaagtatataattttctcttttcgtgcgtgtttgttttaaaataacattgttttgattggcgactcaacatattttagcatttacatatttctgcatatattaaatgatttataaactcaactatagattaaaatataatttgacatctaataattttaacaataatataaaatatgagatttataaattacgaatataaatattcaagggagagaaaaagtagaacataattcaaaagataagactttttagacttttttaacaatatttttgatggataaaaattattcaaaagagaagaaagtaagaagaaaagatgtttctgagaatttctagaaacagcatccgtttttataatttaattttcttacaaaggtaggaccaacatttgtgatctataaatcttcctactacgttatatagagacccttcgacataacacttaactcgtttatatatttgttttacttgttttgcacatacacacaaaaataaaaaagactttatatttatttactttttaatcacacggattagctccggcgaagtatggtcgtcgtcttcatcttcttcctccatcatcagatttttccttaaatggaagaaaccaaacgaaactccgatcttctccgttctcgtgttttcctctctggcttttattgctgggattgggaatttctcaccgctctcttgctttttagttgctgattctttttccttcgactttctatttccaatctttcttcttctctttgtgtattagattatttttagttttatttttctgtggtaaaataaaaaaagttcgccggagatg

SEQ ID NO: 6296 - DNA, 3000 bp, Unknown
  misc_feature (1)..( 3000): cDNA_ID_2999338_gDNA_ID_1621088_Annot_ID_170576 3000 nt of promoter + ATG
agaaaaggtaaatgaagctcattggtgcctaaatgtgaaatgaagccgaaatgtgttaggtgaacacatttaaatatacaaaaagaaatataatagaaacaaaactaattaacaaagtcgcaatttgtattgtataaaatatctttccgtctcccgtcatatttgaaaaaaaaaaaattacaaatctgttaattttaaaactttctagaaaaacacaagtatataattttctcttttcgtgcgtgtttgttttaaaataacattgttttgattggcgactcaacatattttagcatttacatatttctgcatatattaaatgatttataaactcaactatagattaaaatataatttgacatctaataattttaacaataatataaaatatgagatttataaattacgaatataaatattcaagggagagaaaaagtagaacataattcaaaagataagactttttagacttttttaacaatatttttgatggataaaaattattcaaaagagaagaaagtaagaagaaaagatgtttctgagaatttctagaaacagcatccgtttttataatttaattttcttacaaaggtaggaccaacatttgtgatctataaatcttcctactacgttatatagagacccttcgacataacacttaactcgtttatatatttgttttacttgttttgcacatacacacaaaaataaaaaagactttatatttatttactttttaatcacacggattagctccggcgaagtatggtcgtcgtcttcatcttcttcctccatcatcagatttttccttaaatggaagaaaccaaacgaaactccgatcttctccgttctcgtgttttcctctctggcttttattgctgggattgggaatttctcaccgctctcttgctttttagttgctgattctttttccttcgactttctatttccaatctttcttcttctctttgtgtattagattatttttagttttatttttctgtggtaaaataaaaaaagttcgccggagatgacggctgtgacggcggcgcaaagatcagttccggcgccgtttttaagcaaaacgtatcagctagttgatgatcatagcacagacgacgtcgtttcatggaacgaagaaggaacagcttttgtcgtgtggaaaacagcagagtttgctaaagatcttcttcctcaatacttcaagcataataatttctcaagcttcattcgtcagctcaacacttacgtgagtttcactctaacgaaaactcatttactctcaatttaatgcttcatttaattcgtttggtgaattgaatcattcttttgtagttggttagccaatttcgtaattttctcataatttgggggttggtgagaaaaccttctagaagctgagaatgttcttgttctttttttttttttttttttggtttagggatttcgtaaaactgtaccggataaatgggaatttgcaaacgattatttccggagaggcggggaggatctgttgacggacatacgacggcgtaaatcggtgattgcttcaacggcggggaaatgtgttgttgttggttcgccttctgagtctaattctggtggtggtgatgatcacggttcaagctccacgtcatcacccggttcgtcgaagaatcctggttcggtggagaacatggttgctgatttatcaggagagaacgagaagcttaaacgtgaaaacaataacttgagctcggagctcgcggcggcgaagaagcagcgcgatgagctagtgacgttcttgacgggtcatctgaaagtaagaccggaacaaatcgataaaatgatcaaaggagggaaatttaaaccggtggagtctgacgaagagagtgagtgcgaaggttgcgacggcggcggaggagcagaggagggggtaggtgaaggattgaaattgtttggggtgtggttgaaaggagagagaaaaaagagggaccgggatgaaaagaattatgtggtgagtgggtcccgtatgacggaaataaagaacgtggactttcacgcgccgttgtggaaaagcagcaaagtctgcaactaaaaaaagagtagaagactgttcaaaccagcgtgtgacacgtcatcgacgacgacgaaaaaaatgatttaaaaaactatttttttccgtaaggaagaaaagttatttttatgttttaaaaaggtgaagaaggtccagaaggatcaacgcaaatatataaatggattttcatgtattatataatttaattagtgtattaagaaaataaaacagatgttgaagttttattgttgcttaatttatgtcttcataatgtaaaaaagcatgtgaaatacttggtctaaggtcatctacttagttgaaaacttgtgaaagaggaagaaattttacttttatgtttgattgattttctttgcaagtagtagtaggtggtttccgtgtttttacgtaatccgttgaatatttttccctcgaaattgtctttataaaagtcacagaaacattttctagaactctttatcaggaaaataaaaataaagatgtcttcaaggaatcgaaaaaatacagcaatatactaaatagaaaatgctatgaaattaaataaaaatttagtaaggttccaaagacactacttaactagagagaaaaataattccaactagctctacaacaaacaaatcatttacttgtttaagaatcgaaaaatttagaaatttattcttattatttgtttgcccaattaagtcgctcttggcccaatacttgcatcacttgattgagtagaagaagatcacttaccaactctcaaaccatttaaaaattaaaaagcatagtttattttatttaaatatgtgtatgtaataattcaccacaagaaatatattacaaaccacaaaactataatcccggtaaaatagtaattaatttcttcaaaagtgtaaataaaaaagaagagacataatttagtcatagccacataaaaaatg

SEQ ID NO: 6297 - DNA, 3000 bp, Unknown
  misc_feature (1)..( 3000): cDNA_ID_1813957_gDNA_ID_1621088_Annot_ID_170592 3000 nt of promoter + ATG
tgtaaatatttctttataagtttgtgatttttggtagcaaacattttgttttatggactcattgtctttgctttcatgttttttgtttttcgtaggaccaaatttataggttatacattcatctaaaaccttaaaaaaatcaactaaagatttacattcttactgatcatagcaagtaaattagtctcctttgtgttgtcgaaatgactcaacctcacaacatgatcacactttctgatccaagagctatccaaaatacaccggttacattaaactacgaacacatttcaatgataatgaacagttaaacacattacatagctttggttataagacgcagaaattaaaaaatcaatcaaaatattcgatactatgaaattgaatgttcatgtgaggtcgaaaagcggaaacgtgtcgaaataaaaatgaagagactaataaatatgttgaaggttagacaattgacaccattgaagatatgataaagcagaggaaaaaggatccattacaagttggctttggtgggtaaagagtataaatgcctaagaagaagatcctctccacacgtacgaaaaaggaaggttcggcacgtaacagatagttgtgcatacgtgtgaaaggagggtgggattcacgtgagagagattgaaccatttctatttcagaaaggaaaaaatagaaaacgagaaaaaatatcggtaggaaggtagaaaggttaagctgtcaattgtcattccaggttttgtagttggaacataaaacttttgtagctataattttaaaataaaacctgcaacgtatttttatgaaattttacgtttctagggaatattaaaatggaaaaacagagtgtttttattttattttattttaattactactccgacatgaattaactgtgtaaaaataaaaaataaaaaataacagaatttgcgtgctgatatgattttgacatgaaagattcccacatggtgtcacacaataaacaaaattcaatgttattatataagtggagttacacttgtgctttcgacatttccattaattatttatcccaatatggacttatgcctacggtgcgatatctaatactttctctaaccatttgtgggatatgcaccaaaactcgaatttgggaatgctatttttttagcaagacagacgtgatacgaaatatgtcaccgctttaagaaagaaattccgatatctatatattaaccatggaattaaaaatatagtctagccataccaaaaaaagaaactcaagtactcgaactcaaagctgttgaaccaaaaaaacggttatgtgtcgatttcatcggttttctagattatcccccacataaacctaattaacattttgagcacttgacttctgaaccgtcctcctacctttcacacgttccaaaccacaactcccgctcgtgcgaactctcatcttttattgtttatttgatacaccaaacaaaaaaaatgcacaccgaatttcattacattatccttcaagccattcatagttacatcgtactcgaccctcaagtagtaaaatttaatttatgatcacaagatcgatggccggaaaaaatagtttgaatatatactttttctagcctttgcattattttgcatgagtattattacttcggccatgctaattgttagaaaatacagcttacattttatttaacactgtattggtatatatgtatgtgggatatattatgttatcattagaaaatgctaattaatatgtaactaatttgtcatttccctgaaaagtcgattggaagggataattaacttgtggttagaacttaaaatcaattgattatatgagattaatttgttgtggtgttgtgattacgaccagtcgtacggagttttagagagtcatattctcgcataaagtaagtaaattcaattttgatgtagtagaaaaaaaaaattaacaaacgttaagaagattttttttttttttatgaagttttttatttacgaagatcttttagggtattccaggttaagataatagagatatgctacatttaaaataaatgtgtagactttaaattatgctgatgaggactggggagctatgcaccaacaatgaccagttacgtaaatatggacttaattgaccctatctgcgagtcagtccagtgaaatcagaagaatgacagatgagggtattatgggaaatataaatatggcagtattttaaatattatatatgttttttttttttgtcacgatagtattactaaaatttatggtggtggttcgtatcattgagatatgaccttgtactcacttaaaaaaaaaaaaaaaaaattacgaaaataaacatcttcaaattgttaatggcagaagacatttacgtgaaaaaaagacgcatcttagaaatttctatccttcaatcctactattaaccttttcaactaaatctttcataagaaaccatagtttaaaaaatcaccgattttttttttgcacgagcagctttatatatatataggaaaccaactaataaagaagattggtgggctaaaaagggtgacgaagaagaaagaagagtgacctctctctcgcatatttttctttccgatatatatatcttttataatatttgtgaattctgaataaactcttagtaagaaagaaaaggagagtccagaaaaagaaagcgagaaagagagagagaaaacgatacctaagctcaattatcttctctgcaacaaactccaaaggtattatcttcttatgctctctctttgcatacatacatatatatagatacctacatatatatatctctatgtctttgttcatcatcagttatataggtgatgtagatagatggacaaaaaaacagcgtaagacctagtttctgacttacatatgttttaaattctttgtctgaatcattacaggatccgagagagagagctctggaacgatattaacatatatcatgaagaaaaagattgaagtattgatatg

SEQ ID NO: 6298 - DNA, 3000 bp, Unknown
  misc_feature (1)..( 3000): cDNA_ID_2155718_gDNA_ID_1621088_Annot_ID_170573 3000 nt of promoter + ATG
tgtcttttttttacgtacgttctatatcggttattggtcaatttttttggttgtttcggtttttagtcggttatttcggttttggtttatttatggttaccaagtttaatatccgaaccgttcctcaaatatccaaatggtttttatattactataagtgaaataaccgaaatcatgcgcaaccgaaccgaaactgaatggttaaccgaatgcccaggcctaattcaacttgtttttcctattattatgtagatttagcattccagtttttaattttgaatttttaaaagttgttttccatattttgtttttttttttccggattttaaaaaccttttttgtgtttgtttttttttttaaatttatttgcttgaattttaaatttatataatgataggaaatctaaccaaattttggattcaacattaatcgcgatttcagacattcaacatttatttcctattattatgtagatttaatattcaagtttttgattcagatttttataacgagcatctttgcaaatgcccacaaaggaccttttatgtttacaaaattaaattttaaatttaagggaaatttacaaaactagcctttttttactatcttttgcattaataccctattgtgttgtccatttttaaaaataccccttccattgaacagaatgaccaaattaccctcatctaataggaatatttaattggaaactgaaattttcccgccaaattttctttttcccgctaaaaaaatattccgccaaactttttcccgccaaaaaaaagttcgtgacaaattttttttcagcaaaagaaatgcttttaaaaatccttgtaaattttttttggcgggaaatagatttacaagggattttaaatgatttcaaagatttataagagattttaaaagggttcaaaaatatttacaagaaattttaaagggctttcaaagatttataaatgtttttaaatgatttttaaagggtttaaaagtgttttaaaagatttacaaatgattttaaaagggttttataatatttacaaaggattttaaaagtgttttacaagatttacaagagattttaaaaggttttaataaaatttacaagagtttttaaaatgttttcttgtaaattgtttaaaaatcttttaaaaatccttgtacatcttttaaaactcttttaaaatttcttgtaaatctttaaaaccgttttaaaatcccttgtaaatcttttaaaacgcttttaaaccctttaaaaatcttttaaaaatctttgtaaatcttttaaagccctttaaaattctttgtaaatattttaaaaccttttaaaattccttgtaaatgtattaaaacccttttaaaatcacttgtaaatcttttaaaacccttttaaaatcccttgtaaatattttaaaaccttttttaaatcgcttgtaaatctttttaaattcttttcaaatcccttgtaaatctttttcccgcaaaaatatttttgaaaaaaagttttggcgggaatctttttttcaaaaaattttggtgaaaaagtttttggcggaaaatttttggtgggaattttattttggaatattttaggcgaaaatattaatatttcattttgttaacataaaataatttctaaatagggtaaaatggtaaataaaaaattaaagagagtaaaaataaaaatggcaaatagaaaagggtagaattgaaaaagggtagtgtgcaaaggacattatcagcaattattctaccaaatttaaatacataaaaacaaaccagacttaatatttcatccttaaatccgtaagtcttgtggtaccatattttaacatatttttacataattaaatttaacacttaaatgctttcacaaatattgtcctaaatatttttaattttatttttaaattgcaaactttcgtgatcctttactatttttgtaaaatataaatgtttatcggttttcattttgcgacgaaatttcctttagaaggtcaaaccgaagcaacacatttttaaaaagcattaactaaaaaagggcactccttagttttgactttgacaatgagtttgtcgaatgcacacctttgatccccaactgctatttacatttctttatttggattggaaacaatgaagattaaaatataaacacaacgatttaattcctaggatgtcacatatatacagaagaaaataatcaaatatgatatagttcattatcgcatcatgaaaaccttaaaatacaatgaatctatttcatccgtcttgggtataaatttgatgtcaaaataaacgagtttatgtgatttttcatcattcttattaaaacaaaaaggaaaaacgatttgtttgaatataaagagttaacgtacttttgtatcatatatttggtagttgaaatttttgagtttggatggaggatctacttagcatgagaatttttttcttttttttaaaaagaaatctaattagcatgagaagtaacattaatgacaataaacgataacgagattaattctagagtgactaaaaccataaattcagactattcatttagtatgtataatgactttatccaacataaaaaaaatcagtaaaaataatgaatacaacagtaacattcagagaggcacatagtttgcttggcacgccattaataatatctgcaaccaattccaatgacgtctttacacacgtctgaccactttttcttcaacaatttctcctatcaactatatataacttattcatggaacattcaaataaactataaaaaaattctctcaacatttttatctaatgggttctcgccttctcggtgtttgagtctttgcgtttcttgtcaattgtcatcacccctttgtctttttcctgatttcatctcttttgtagacttggacaacacgcctttctctctctctaatttttccacagctataaaatttgtaaaaattgatacaaaaatatctgagctttcctttccggaagactatg

SEQ ID NO: 6299 - DNA, 3000 bp, Unknown
  misc_feature (1)..( 3000): cDNA_ID_1027467_gDNA_ID_1621088_Annot_ID_170572 3000 nt of promoter + ATG
gctgtctgaagatttcttatgtcatctttgccttttgttctgctttctttctcggtgctatcaaaggtttcaatttttcttctttgttttggctctgttttcctctgtttctaactttctatgattgattcttcatgatgggttcttttgaacaaaacaaagtttgattttttatatatatttcctatgcaggtttgatcgtaggtccaattgctggattaacattaatagttgggaatgttggagtgattctttgtttgttccctgcacatgttacttggactatttacgctgttgcaaagtaagaaaacttcaacactgttttctcaaaagatttccctgcaatttctttcttaaaggagaatcaattttataaacatgtcttcttgtgtattttctaactttcaggacaaatagatttgacattcctctgaaggtagcaatcttagtggcacttcctgcattgtttgggatatggttaggtctaagtctagcaattagtgttcttgttggtgttggctatggattcttcactccttggatctctgcttttgaagcctttagacaagacactgaatccaacaagttcttccactgtcttgtggtacttacataacttcccccagaagtttctttctcttaagcacttgttagtgaatcatatcacttgactgctctgtatattaggatggaacttggggaaccatcaaagggagttgcattgtggttactgattttgcagatttttgttaccattcttatccactttacttaaaggagttacgcgaatccccggtttcagatgagcttcaaactcttaggtaaagtaaaaacttttgtcctaaactattccaaaagagtttttgctgattcttgtgtctcgtcttgcaggttgattcatgttccaggatgcatcattgttgggattctaggattagtcattgatatccctcttttcactgcaatcgcggttattaaaagcccttaccttcttctcaaaggctggtaccgactagctcaagacgcgattaatcgagaaggaccatttcttgaaatagcttgtataccagttgctggtttgacagtactgttatggcctatagttgtcattggttttattttggtgaccatcttctccagcatctttgtaggactatatggagcagttgttgtatttcaggtacaccatgatcatattgaccgaatgattcgagaaaaatatcgggtttcttactcattgttgaatctctaatctgcaggaaaggtcattcagaagaggagtctcttatgtgattgcagtagttggagaatttgatgagtacacaaatgattggctttaccttagagaaggaaccatcttcccaaagtatgtctctctttgatttccatctttttacattccctttctttgcctccattatcctaacaccgcgaaactgtaatccgtgacacataggccaagatatcggatgggaagaggatcgttttcaagtgaagtatctgtgatcgttcacccttcagatgtaacaagagtcaatagttctggttctgtcgatgctccagcgatgctagtaccgagcctagttcactctgtatctgttagagaagcaatacaagaagtgagaatggttcaggtatatatcaaaagttttcattgtcgataccaaatctctcacgtttctactgagttttaaatatttgaaaatgtatttaatagatttgggagcatatgatggggtggtttgagatgcaaggcaaagagctactagatgcagaagtgttaacaccaactgatctctatgagtctttaaagggcagacacggaaacgaatcatcgattatcaatgtcgggcttccttcttacgctttgttgcatacattgcttagctctataaaagctggtgttcatggtgtgcttttgcttgatggctcggaagtgacacatttgaatagaccacaagacaagttcttggactgggtctttaatccaataatggtattgaaagatcagattcgagctcttaaacttggagaaagtgaagttaaatacttagagaaagttgttctctttggaaaccatgaacaaaggatggaagcttgggataatcacagtaacccgcctcaagaaaaccttcgaactgctcaaatccaaggaatcagcagaaggtaaagattgaaaaaacttctcttacaaagaaaagttcaatctgtatggcttctttggttctgcctgaaacttgtttgtgttaattaatctcattaagacaatgatggttttatttatcttgaatgttctaggatgatgggaatggtacggagcgtatcgaagcttccgacttatagaagaaggttcagacaagtggttaaggctctaattacttattattcagagaaacaaggcttaaatcgaaccggttccatgagctctggagatttcattgaagagggttaacctaggactaggagcaattgttgtagtctttctataatttttagatgtgtttttcatttcttgtagtacaaggtgtaaaaaagaatgtacagaagttgctaagtttgggactcaagaaaacagagcatttaaaaaaaaaaatgatttcaaagattgtgacaaagaaatataaaacaatagtctaatcttgatacgcgggccaaacaactcagaactatctcatctggcaaagaagaaaattcagacgtagacggataagacgacatcttcaatttcttcgtacacggtggcccttcgtcggcgccggaattcgacatcgggttttgttttaactctgttttgtttgagagagcataacgaaggcagactcaaactctgttttgttttaactctgtttttatttaaagttacggctcaagtaaaaaagcccatgtttgtttaagttttggcccattaatagcccaatatcacaaacggaagcttgtgaaattgtgtgagacgaagacggcgaagcggataacgaaaagctcgccgagaaagcacaaatg

SEQ ID NO: 6300 - DNA, 3000 bp, Unknown
  misc_feature (1)..( 3000): cDNA_ID_1399210_gDNA_ID_1621088_Annot_ID_170569 3000 nt of promoter + ATG
aatcttttcgacgtgaaaaatattattctaaattatttatcgcaaatatgtttccttttactcttatatataaaccatgagctttttaaacccaaaatatgttagatatccatctctatttccaacgtcggattataagtccatgttttcatattttacatgataattcgactctagacaagttaggctggtgacattggactacttcactaccatgacaaagaaatatatcccataattttgaacaccactaagaagataatgtcatcaatatcttctgttgtcatttaattttccactcttaatgaaaatatattcaaaatacacaattacaaacaactttacaaactaatgttgaaaggttttaactcattaataactacccaaaccaaaaagggtactataaatatagttaatcatctaatagtttctccaaaattcttatacgatcatatatgatatctatagatagatgtaataaatatattagatgacacataattgtcacctctgatcatctagcctcttcccatcacatgccattaatggacctatgcggtgctgatagtaacgtataaccatgacgacgtctgagactcagaggatcttactctaacataattaaaaacataaacttgcactagtgaatttgtaatttcatataaggaaacattttggagcaataaacattatatccttttttcctttccctgtatattgccacatttatgcacataaaatcagctcatatccatcgatcggtccccaatttttcaatgattagtcaattttttcttccttttgataaccgctgtggtccaataagacaagtgaatagggtccatttagggctagcgtacgtggtacatcgcatgttcactatcacttatgagcgcatgcaagtgaaattacatgtcaaaaaaccttacgctatatataagtgtatatggtatctgtcaacattactatacaaaacaaatcttttatttttattgatcacatattttgtcaaaaagtatttgttttgtatcattaggcccaaagaatgtttttgtgtcagttttcttttcctaataaaacagaagaaataaacaataagattcaacttttcacagttaatacagtatttgtaaaaattctgaacaacagattttcaaaactacgacatttaaaattagaacgaagattaacacgcattagtgagtatcaaacgaattcaaaaacttatgtaaatataccaagaatatgtaattataattaactaaacatttttaatttttaaattaaaatgttaaatttcaatgctatttagaacattttggttatgattattaaaatcgtgacacgatggatagtaactaaatgaaagaacaaataggttgaaagctatagggaaataaataaatgaacggtttatagtaacatctttatcataaagctggactgtctcgttgtgatataaaacaacgaagataagtaaggagatttagtactgttgtcattcgccaacgtcaacttcactaatgatcactagtccttttagtttttagagagtttccatcagaatttgcaaacgtaattacaaatattgggccttaatttgaaacctacatagagggccgagtatttgatgaagcccaatcgtctaaagtcgaaaaacatgtaaatagtcaacacacagtgaaaatataaacatatgtaaatacgtttgtgatccaaattaaattacgatgataagatggaacaacagaagctaaccctgagatcatcttctatgacaggtgttacttagaactagtctggatagggagggagatatgtgtcctagaaacttcaaataattcaaactctattatcaaaaaaagtcagaaataaatatagtcttgaatcagttatgcagatctcgtttgttatgtttttggacagtcgacgaaagaactcctagttaattaatattatctattacaatatattctcgcaaaattaagcttatatgtgacagctagagctcagcgttgatattgcctccacacttacattatataattctaacgggaattatatacataaactataatcatgattagcacgaaatgtacgaagaaaagtctgaccaattagttttatcctacacgtgaagacttgaagttgatatgtattaccaatatatcatcaaattattgatataataataagttgttgtttggtcgagaaagcgtgcttgcatgctataatgctaattcatatttaaatgctttgttgctttgattcgctaattaacccaaaattttgaaaatgactcaaaacaaacatacagtttttacatatactattctgttgatcgtgcatgcagagataccacagtttttctgaaaacttcaatattccgctgacaaaactaatatttcacgtgttagtttttagttttttactaattaagacactagactaactgattcctactaataggttttctaatgtaaacaacataagagactctagctagaaaagagaggaaaaacaataaaagcaaatcttgagatcttctcagtcaattgacagatgtctttagaacaagtctaaatagtggattgagaagggaaatgtgtcacagcaaatccaaaaaatccaaactcatcagtttttgaaacttttggacgcaaaactcgcttggctgtgttattcattatttcaaagtccacgaaagaaaataattgtctcgtaaattaattaattaagcttatgacagctcaaggtcgacgacataattgattttgttccttactataaattatctattcaaaggaaaatatatactagctatatatataatccttattcgtacgaaatgtatgaagaaaagtctaaccaaatatttttttcgtttttttaattaaatctatacgaaattgtgcatttatatatcttgacctctatatccaaaactttaccaaaatctcgatttataatcttaactcaaaagaagatcgatcaactatt

SEQ ID NO: 6301 - DNA, 3000 bp, Unknown
  misc_feature (1)..( 3000): cDNA_ID_2155710_gDNA_ID_1621088_Annot_ID_170567 3000 nt of promoter + ATG
tttacatgcataaaatatatggagaaccaataatatataaacaagtacagctaaaaaatacatgcatatgccattagttgttgttttgttttcatctatgtaattatgaatcaagtatttcgaaattcttttgatataaaaagaaataaatttgtatcactagaatgtaaatgacatggaagaaaggtgtattccgtaactaagtactaaagtcatgaatacaaagatcatgttttaaagggtccactagagagaaacgcaaagcatgagttagtaaaaagcaaatgttgctaaagctttgtcacgtgctaatgcttattagaatctgccaaagtatcatttaattcccattcatttatttattacctaatccaccgtttgttttttaaatttcattaattaagactactatatgaggccatgttagttgatttaaataatcaaattattgatggtataatattaccacgcttagcctcggaatatgcaactatctctcccatatatcaaaaatttgtcattgttgatatataataattgtaatcacttttttcatatttccctttttccgtggtatgacattactacttttaatgagtttcctttttaatctcaggacccaacatgttccatctatttctggtttctcatgattttgttttttatgagttttgtttatactacggtttataaaacttaataataacgtcattaattgacacaaaatacgacattagttcattaaaacgaattaatctatttcattacacagaaagtagatttgaataagtgcatatataaacatgttacgtaaataggagaaacatatcaatattcacctttattttcttaattaattacttcctttttattgtggatcacccgatttgacagcaaaaaaggagaaatgaaaatcaaatgttaaaaagttaagactatagtgagatgtcagcatctttcgagttttaacttttctctctaatttttttctttcctttagcatcataattaattagcacgttatctttgctttatgaaaaatgtatcagaagttaactctgcaaaacgcttctgtttaagtacagcctgcataattgattacacaacaattactactagagtactagttaggcttagtataatcgctaatcaattctctaatcaattggttatttatatatataaagccacttaacctaatcaacaagacgtaagatttacttgatatgatgtgttttcatacacaaaattatagatttagaattgcaactagaaattatttaatatagaatagtcgaatgacagcttaaaactgatattattagagtagactgaatagtagttaccattgacaacaacaacaacataaaacagcagtgagtgaccaataattttggattttccatctaaattgcacgaaatattgtcactcactatgagaaatatcgaaacaaaaaggctggaaaccaccaaactctctttttttttttttttttaataaaaaaatcacgttcaaatcttaccaactatacgaataacattgtaaaaatataaaaatattttaattttttgatctattaattaactgatcacacataattggattaatatactattttaaaatttcgaagtataaaagtgtatacttcataaaaatattactaaatataataacaatatttttgtactattttgggacaatttttactctaataacattctgagcataattaattagtaatattaatttttgaaaaataaaagaagtgacaaaaaagattgagagaaaatgaaagcaccaagccactaaataccaaatcacaattaataaaaagatagaaaaaaaaggagagaaaaaagttgtcctcatctctcacaattctactccagctcgaaagagcgctcgtcactcagatctcccatcttctccgatatccataatcattccacttttcaatctccaatttacattactttataaaattgaattatagagataacagaaatggcgattaaacgttgttttctgctacttcgtcagctccaataagagagagagattctgtagttttcttccattgctctctgttcgagattatctgaccaaagtaatcttcctatacaaaatattggattaaatataatcaaaattgtggatctttgggaaacataagcttgaatgaaacacacatgccagcctttttctgcttctggttcgctttaacttcacgttttcccgctctgtcttcatagaatcaacaaggtacttaatttctatcaacacccattatctctttctcaggaaagtttaaatcttttttattttccaagtgttcttaattgtccttatacttatacatgtaactgtatctttctttctttttacttctgttttgtttttcttttatgttttatcttgatgggtctctctttctctctcttgggtttatatcagttagagtggagagaaagcaaaagttgaagacagacagagagagagagagaagcgcgatgaacacaagtgttcgagctgttctttcctccatgaaagctccttcaaagcatgacactactcatcatcaagtagctttctttttctctctctctcatatcactttttccacttttattaactcaattttgattgcttttctctttggggaaatctttcttggtggattatgcttagtctctgataaaaagtttgttcctttagattgataaaaattggatttcagatatttcttaagattcttggcttcaacattggactatttaccaaccgtatctttgcttttttgttttgttttctgaataatagttattccatagtgatggtcacagtgaaagtgatcgatactcaattcttatcctcattctggaagtgtgtgttgttttccactatcaaaggctcacaactattgtttctttattattagctccagttctgtttccttcattctgtttgtgagtgtgtttttttggtctatatgagtaatg

SEQ ID NO: 6302 - DNA, 3000 bp, Unknown
  misc_feature (1)..( 3000): cDNA_ID_1814016_gDNA_ID_1621088_Annot_ID_170561 3000 nt of promoter + ATG
attccttcctggagattacgcattaatatatttagatcttaggtcttattagcttctttattcgcacttttttttttcctctactcgaagcttaacgatcgtaacaatcatggcgacggcttcaggtaccatgattccttcaatttcttcttctaatactttaacctaattctcgatttctctgttaattcccgttgatgattaagaatctcgcttctgatatcttcttctttctttaaatctatatattagtaaattagggtttttactagttttgctattggctagattcattttggctaaattctggcaaaattgattttatttttaatgtttgaatgttgttctgatatatgttttctatgggatctgcagttgcttttaagtctagggaagatcacaggaagaaattagaattagaggaagctcgtaaagctggtctcgctcctgctgaggtagacgaagatggcaaagaaatcaatcctcacatacctgagtatatgtcaaaagctccatggtatctcaagtctgaacagccggtatatgcgaaaattcttctttctcttgcttctctgcattgtcttggttgagaacattcacactcatactctgtgatttttttttgtacagagtttgaagcatcaaaaaaattggaaaattgaacccgaacccaaaaagatatggtatgatagaggtaaaaagatctatcaagctgaacaataccgcaagggagcgtgtataaactgtggtgcaatgactcacagttctaaagcatgtatggatagacctcgtaagattggagctaaatacacaaacatgaacattgctgctgatgagaaaatcgagagttttgaacttgactatgatgggaagagggacagatggaacggttatgatacttcaacctaccgtcatgtggtagatcgttatgatgctaaagaggaggcacgaaagaagtatctcaaggagcagcaacttaagaaactagaggagaagaacaataatgaaaacggtgatgatgcaaccagtgatggggaggaagaccttgacgacttgagggtcgatgaagctaaggttgatgagagtaggcaaatggattttgcaaaggttgagaaacgtgttcgaacaactggtggtggtagcacaggaactgttaggtatggactactcttcatcaaacatgataacataagtttaaattggtgtttctacttgatgcactaatggtgttaccttttcttaatttcaggaatctgcgtatcagagaagacactgctaaatacctgttgaatcttgatgtaaactcagctcattatgaccctaaaactcggtccatgcgtgaagatccacttccagatgcagatccaaatgaaaaattctatttggttagtttgtgatcatcgtgaatcatgtagttgtatcttatattttgatgatatgagaatactaactttttttttcttcttatcatctatccagggagataatcaatatagaaacagtggccaagctctggagttcaaacagataaacatccattcatgtgaagcatttgacaagggacatgacatgcatatgcaagcggctccatcccaagctgaattgctctataagaactttaaagttgcaaaggaaaaactgaaaactcagacaaaggacaccattatggaaaagtatgggaatgcagctacagaaggtgaaattccgatggagcttttgcttggccaaagtgaaagacaaattgagtatgacagggcagggaggattatgaagggacaggtatagtttttgatggttctttcttgagtcgagtgatagctgttgcgatatgaacagcttgagataagtttgcttaatacgtgttgtttattgtgtacaggaggtgataattccaaagagcaaatatgaagaagatgttcatgctaacaatcacacaagtgtttggggatcatggtggaaagatcaccaatggggatataaatgttgccagcagacaattcgcaacagctattgcacaggttctgctggaattgaagctgcagaggcgtccattgatctgatgaaggctaatattgctcgcaaagaagcttctaaaggtttgtgttgttgactctgtttgttcttctagtctcttatttgttctcattgtattgtaacatttcggaatatgttttgtaacattggtttgtattttggtgatcagagagtccgaagaaggttgaagagaagaaaatggcgacatggggaactgatattcctgaagatttggaattgaacgaggaggcacttgcaaatgctcttaaaaaggtaagaaagacgccacagtttcagttcatattttctcttgccaagactcttgtttctctgccctgcaaggtttatctgacgtgttgttgtttgtgtgcaggaggatctaagtaggagggaagaaaaagatgagaggaaacgcaaatacaatgtcaattacaccaacgatgtgacctccgaggagatggaagcttacagaatgaagagagttcaccacgaggacccaatgagaaatttccccggctgataaatgtcttttccctttcaccatattaagctgaagaaaccttgtttttaagtttcatgtctttaaataagacccttgttattcatgtcattatttgttactgtcttcatgtccacccaaagattcattatataacgtatgaaactagaataaattttcttagccaaatcaaattaaccatgttgtatataaaccacgaccaagctttatatgaattttggtccaatcaaaccgaaatcctttattaagacaaaactgataatgtattgtttgcaaaagagccctccaaatttgttaaaatgtgaaagaaagctaattaaatatcaatttatctgtgtttaaagttttaacgagagggggcttttgaatttttttgctcaacttccaaatcgtcgccggcgatagaaaccctagatttgattctccgtcggttatatccagcaatg

SEQ ID NO: 6303 - DNA, 3000 bp, Unknown
  misc_feature (1)..( 3000): cDNA_ID_1808511_gDNA_ID_1621088_Annot_ID_170559 3000 nt of promoter + ATG
tggttaatgcagaagacccatatatgttctacacttggactgttacttatggtacaagatctcctttaggtgttcctcaacaggtatgaatacatacactctttgctctttttaagtatgttaattgtcgttatgaaatttttgatattatatactttggtacgaacgatgtaggtcattcttatcaatggacagttccctggtccagcgattgaagcggtcacaaacaacaacattgttgttaatctcattaacaagctggacgagccattcctcatcacctggtatgtaactatataactgattgtatttgtgcgcttagacaaatatgaaaaaaaacctttaacacggttttgtaatatatgtgtaggaatggagtgaagcagaggaggacatcgtggcaagatggagtattgggaacaaactgtccgatccaaccaaactcgaactggacttaccagtttcaacttaaagatcaaatcggtacttacacttacttcgcttccacgtcactgcaccgagccagtggtgcttttggtgctctcaacattaaccagagatctgttattacgactccttatccaacacccgatggagatttcaccctcctcgtctctgactggttctcaaatatgacccacaaggtacataccagtacaaagcctagatatacactcaagatcgtttcaaaagtcctatgtgaatgaataaaaagcaaatttgatgtttttaaaaaagtaaggatttggtttatatgttttcaaatgtttttctttaactattcttgtgatctctaggacttgcgaaaatcgctcgacgcaggctctgctcttcctcttcctgatgctcttctcatcaatggagtctctaaaggtttaatctttaccggtcaacaaggtaatgtcatcataacaaatctttaatattacatcgtgcatggtcttgttctagtctttgatatgtctttaatttcattgtctatcttcaggtaaaacatacaagttccgggtatccaatgtcggtatagctacatcgataaattttaggattcaaaatcacacaatgagcctcattgaagtagaaggcgctcacactcttcaggagagttatgagtcgcttgacgtccacgttggtcagtccatgaccgtcctggtcactttaaaagcttctgtgagggactatttcatcgtggcctcaacccggtttacaaaaccggtactaaccacaaccgcgagtctccgttaccaaggctccaaaaacgctgcatatgggcctctccccattggtcctacttaccatatccattggtccatgaaacaagcaagaaccattaggtattaataccaaaccgaacataaccgaactaaatcgaaccgtacaagtctagattggttctgcttaatttgactttaactttttctgattcttaggatgaatttgacggcaaatgctgcaaggccaaacccacaaggatcatttcattacgggaccataccaataaaccgaactctagtcctagccaatgcagccacattgatctacgggaagcttcggtacacagtaaaccgaatatcatacatcaacccaacaacaccattgaaactcgctgattggtacaacatctcgggcgtgttcgatttcaagacaatcattagcactccaacaaccggaccggctcatattggtacatcggttatcgacgttgaacttcatgagttcgtcgaaatcgttttccaaaacgacgaaagatcaattcaatcttggcacatggacggtactagcgcctatgctgtcgggtaagcaaacacattgccctctgttatctaaaccggttccggttattcataacttaaaccgtacgtaattgattaccttttacagatacgggtcagggacatggaacgtgaccatgaggaaacgttacaacttggttgatgctgttccaagacacacttttcaggtaataatcttatttagaaacaatatgattgaatctaaatatctaataagtaatcaacgatgattgtgtgtatgaaggtgtatccgttatcgtggacaaccatattggtgtcgttggataacaaaggaatgtggaatctaaggtcacaaatatggtcgaggaggtatttaggacaagagctctatgttcgtgtttggaacgatgagaagtctctctacactgaagctgagcctcctcttaacgttctttattgcggcaaagccaaacgtcccctttagatttatcattgttatcttttctactgaattaggtcacaattacgtggagtggaacaaaaaatacaaacgtagtccaaacggaaagctaattgatttttcaataaagagacaaaataaaaatgaaggaaaaaactttcttttgtcttatgatttgattctgtttttttttttttgctctcttaaattcagattgtgttcatgtatctaaagcagaattggaaaccaaaatttggatactagaattgtcagtttgacataaaattttatgtaaatgaattgaaaccaatcctaagcagtcatcacttatcaatatgctttttcaaataattttgcaaaatgtcatagatttttatgtgtgtaattcaaaccatagaaatttatttgaaaatataatattaaaatctttatctttatctcaagttattttcccaatctcatcaatcaaatcacccacttcagtggacaataatctttaatatttcattaatcattgatatctttctcattttcacatttgagaaaaacgttttgtcggtaaaagaaaatgtatcattgaaaattctaaaaatagatataatggagagagagatccacctcaagattatcgccacaaaacagagtagttgactgatatcgattgtgagatttcaaagcgataacgtggagaccccctcaccattataataaatcatcatatcgtcactttagccacatcacataccaaaaaaaggcaaaacactcacgaaagaagaaacggagagg

SEQ ID NO: 6304 - DNA, 3000 bp, Unknown
  misc_feature (1)..( 3000): cDNA_ID_1814023_gDNA_ID_1621088_Annot_ID_170558 3000 nt of promoter + ATG
actgaaaaagatagttattcgtggacggctatggttacgggttatgttaagaaggatcagcctgaagaggcattggtgttgtatagtttgatgcaacgggtaccgaattcaagaccaaacatttttacagtttctattgcagtagctgctgctgctgcggttaaatgtatccgtagagggaaagagattcatgggcatatcgttcgagctggtttggattcagatgaagtgctttggagttcattgatggatatgtatggaaaatgtggctgtatcgatgaagcaagaaacatatttgataagattgttgagaaagatgttgtctcgtggacatcaatgatagatagatatttcaagtctagtagatggcgggaagggttttctttgttttccgagttggtaggttcttgtgaacggcccaatgaatacacttttgctggagtcttgaatgcttgtgctgatctcacaacagaagagctagggaagcaagttcatggatatatgacaagagttgggtttgatccttactcttttgcatcaagctctcttgtagatatgtacaccaaatgtggaaatattgaaagtgcaaaacacgttgtcgatggatgtcctaaacccgatttagtttcttggacttctttgatcggagggtgtgctcagaatgggcaacctgatgaagccttgaaatatttcgacttgctcctcaaatccggcactaaacctgaccatgttacctttgtaaacgtcctctccgcttgtactcatgccggattggtcgaaaaaggactcgaattcttctattctataactgagaaacacaggttatctcatacttctgatcattacacttgtcttgttgatcttttagctcggtctggaagattcgaacagttaaagagcgtcattagtgaaatgccgatgaaaccgagtaagtttctgtgggcttctgtgctcggtgggtgtagcacttacggaaacattgacctagcagaggaagcggctcaagaactgttcaagatagaacccgaaaatcctgttacttatgttacaatggctaacatctatgctgcagcaggtaaatgggaggaagaagggaaaatgagaaagagaatgcaagaaatcggagtcaccaaaaggcctggttcaagctggaccgagataaaacggaagcgtcatgtattcatagcagcggatacttcgcatccaatgtataaccaaatagttgagttcttgagggaattgaggaagaagatgaaagaagaagggtatgttccggctacgagtcttgtattgcacgatgtagaagatgaacaaaaagaagagaatcttgtgtatcatagcgagaaacttgctgttgcatttgcaattctatcgacagaagaaggaacggcgattaaggtgtttaagaacttgaggtcttgtgtggattgtcacggtgctattaagttcatatcgaacatcacaaagaggaagataaccgtaagggactctactcggtttcattgctttgagaatggacaatgttcttgtggagattattggtaacgataaaaactatttgtgatacatccactttaagccactatgatttatttctactacaattgcaaattagtcactgagtcataggaattgtacattgtttaaagagttttgttttgtagaaccttaatgtacataaaatcaacatttgagagattaaggaataaaggcatgaaacttcttaaactccaaattaaaaggatgaatccattaatggctctgaaatcgatttgctagtttcaagacaagcttcgtaagatgaggacggaggaagcatacatacacatgcatgttagtacacattttacgtataaatacattttatgtcatataaatacattaggatatacagattcacatgatacaagcgagcttaattagtgataaagaattcatgtgtgattaatttgagtttctttctgttcccaatatgtgatctcttctagggatgcatcaccttgtttctcatggtttggagtaaatatcatttggtttgacttcacttacttttaactttagtttacaaaaactagttaatgctaattggaatcttgtgaggtataacttagaagcacactccttatgttttagttagtttaagaaatcaattatgtgctcgtgattgttggttttcttaattatagattctattgccatacaccaaattttaaagtcaacctatatatttatactattttacgtatgagggaacaaagaatttaatcatagatcaagatctacttttctatactgatttattttattttaatgtattttggaacttccatagtcaaatctgaaaaaattgtgtgcactactaccaagtcatttgctaccttactaatactaagtcaccctatcaacctagttctgatttttaaaaaatctaaacttgaattgcatatataagctattagtgtatagatcaactactggatcaataacacttctacaacacacattattgtatttaagaatataaattttgtattgcatgggtttatttttctcttcttttgactaattaaacgtttggttataatagtgaccgacactacttagtagggccaaatataactaatactcttgccgacaaagaaaaacttggtaatttgagaaattatagtagtacacacacatatataattacaaatctcatcatgtctactaaatcgcgtaaaatttaaattaaaaagttgtcaaggcaagcattttgcatgaagtacgccgcaaaagagcaattgaggcttttttgtgatgcatggggattcacgtcgtcctcgctgacaaaacttaataatatactaaaacacttacttagtcccatctctagcttcgtacatgtatataagatcgtcctgaggtggaacccataacacatacaaacaagtctaattcttgatcttgaatcttgtattaagagagatcaagattatatattctattcgtcttacaaaa

SEQ ID NO: 6305 - DNA, 3000 bp, Unknown
  misc_feature (1)..( 3000): cDNA_ID_1814031_gDNA_ID_1621088_Annot_ID_170555 3000 nt of promoter + ATG
gtgtttgtaaaatattatagattcttcagaatcctctttttaagactaatttgggaaaatattaaatacaggataacaggaatatgagaatcttgaatgagaagagcactaaaaacaaaataaataacaagtttcccaaaactgaaaattgtaatataattaatagccgaattaaaaggaaaaaaatccttaaagaaaaatataaaaaaagagaagaataaatatatataagtgagtgtaacgattcgccgcgtgtgtacgggcatcacaaaaagattctttcttccatttaaagataaatctaattttaatattgacaaaaacaccctcaagtctccacttatttacagcggctacggttcaccgcgtccttcttcttcttccctaatctcattttttttttgttctcatttatcttcttcagcatcttcatcatcttcttctatatatacctctttaagcttgcttctctttgtctttatcttgtccgatggttcaaacagaaaccgatcaaaggatgggtcttaatctgaatttgtctatctactctttaccaaaacccttatctcaatttctcgatgaagtgtcgaggatcaaagacaatcattccaaactgtctgaaatcgatggttatgtcggaaaattagaggaagaaaggaacaaaatcgatgtttttaaacgagaactccctttatgcatgctcttattgaacgaaggtatcttttattaaaattctctccttttcttttttttatcttctctaatcgattcgtgtttttgtttaaagagattgtttttctctgtgtagcgattggggcgttgaaggatgaggctagaaaagggttatcactgatggcatctaatgggaaattcgatgatgttgaaagggcaaaaccggaaactgataagaagagctggatgagctctgcccagttatggatctcgaaccctaattcccaattccgatcggtacgatcaaaaagcaaccctttttatgttttgtgaagaatcatatgttgtgtgattgatcttgttgaccttatgatcatgttttgacagacaaatgaagaagaagaagatcggtgtgtgagtcagaacccatttcagacatgtaattaccctaatcaaggaggggtatttatgccatttaaccgtcccccacctcctccaccaccagctcctctgtctctcatgactccaacatcagagatgatgatggattatagcagaattgagcagagtcatcatcatcatcaattcaataaaccttcttcacagagtcatcacattcagaagaaagagcagagaaggagatggtcacaggaacttcaccgtaaatttgttgatgctcttcataggcttggagggccacaaggttagtccttaaccttagtaaaggatcaaactttgctttagatttgattgattgattatactgagattgttttgtattgttgttgttgttgttgttgttgttgttgtgagacagttgctacaccaaagcagattagagatttgatgaaagttgatggtttaaccaatgatgaagtcaagagccatttacaagtaaaagttctcatcttttacagtaacttaaactttgatgtgtggatgaatgaatgattttgacagtgcggtgaaatgaaattgttattgcagaaatatagaatgcatatccgtaagcatccgctgcatccgacaaagactttgtcatcgtcggatcagccaggtgtgttagagagagaatcgcagagcttaataagtttgtcgaggtcggattcgccacaaagcccacttgttgcaagagggttgttcagtagtaatgttggtcatagctcagaggaagatgaggaggaggaggatgaagaggaggagaagtctgatggacgtagtagctgtagaaatgatgaaacaaagaagaagagacaagtgttggatcttgagctttgaaagtctgcatagtgaatgatataatctttaccaacttatgttatatatgctcaaaactttgagtttgttcgggagtttttgtagatgtaaacatgagagttgaaataaggaagaggattttgagcaaaaagtagggtttgtttttgcaagaggaaatagatagagaagagtgttcgaaatcctctgtgttttttttttttttttttttttacttcataagtaagataaactcatatatcaaagattttgtttttatacttattacagtctcaaccatgtgaatgaaggagtcatttgtttagttttaccagctcgtcatactaattaccttttaccttcgaaaacagaggatgaagaaacatcacaatctttgtctctttctgtaactcatcgttttctacaaatctacgtaatctgagagaataagtaaggggaaaaaaaataagaatcttttattgcataaaatcgtacgaaaagataagatttttcgtctgaaaaacgacaagatttattttcactattgaaggaattgacaatgtatatagaaaaaatctactcactgattagtgatttgatgaatagtttacttccacgagatttgcatgttttgtggataaagcttcttgcaccatgtaacatacattagccaatagtatagggtagatatttatcttttgacataattttcttcaaatttgttatttttattcaaaaattcaaatagttactctctgcttttcacaattaatgagtgtatatactaaagacatttaagcggcaatggaatatttgttcaaattggttcggtcgattcagtttctaaacccaaccggtttattcacccggttatttcgagtcaatttatgtggttttgtggtctctgggcctcacggggccgcctctccgtcttcatcaacattctcaaactcttttacaaatctaggctcgacgagggtttaagcaatcaccggagctcttagtctcttacgctgtgagctaagaaccgaccttttgcttagtttctttcaagtctccaatcaaacaaccatg

SEQ ID NO: 6306 - DNA, 980 bp, Unknown
  misc_feature (1)..( 980): cDNA_ID_3048168_gDNA_ID_1621088_Annot_ID_170536 3000 nt of promoter + ATG
caagcttgttgaacaatcctgaggtgctgaacaaggccagagacgagatcgacagaatgatcggtgtagacaggcttttggaggaatcagacatcccaaatcttccttatctacagaacattgtatctgaaacgttacgtctgtaccctgcagcccctatgctgcttcctcacgtagcctcgaaagattgtaaagttgggggatacgatatgccgcgtgggacgatgctattgactaatgcatgggctatacacagggatcccctgctatgggatgatccaacgagcttcaagccagagaggttcgagaaagaaggagaggctaagaagctaatgccgttcgggctaggaagaagggcatgtcctggatccggtttggctcagcggctagtgaccttgagtctcgggtctttgattcaatgttttgaatgggagaggattggagaagaagaggtcgatatgactgaaggtccaggactcacaatgccgaaagctagaccgttggaagctatgtgcagagcacgtgactttgttggtaaaatcttacccgactcctcttgagtttttgtatgtaaaatgctaatacgttgcttagcaacggtaacgaattaaatgaaacgtattagcataataaaaatcagagacaaaaatcatattctaatttccaataacccattgttaattatgttacagtcttacaaatatgaatgttcagtgttatcaatcaaacaaaattctaggtgtgaaaaaaaaataaaaaaatctaggtgtggcattgctatgctaaatgtcatataattagctaaaataaataaataataatgattaggtatctaaacgactaatgggcacatgtgatttggccgaaataagattctgttttcgaagtcaacgtctatggagtagttcaagcagattttgcaccacatcatcctctgttacaacccctgaagatccttgaggaagaagaagtcaaatatg

SEQ ID NO: 6307 - DNA, 3000 bp, Unknown; identical to SEQ ID NO: 6283
  misc_feature (1)..( 3000): cDNA_ID_1814035_gDNA_ID_1621088_Annot_ID_55420 3000 nt of promoter + ATG

SEQ ID NO: 6308 - DNA, 3000 bp, Unknown; identical to SEQ ID NO: 6281
  misc_feature (1)..( 3000): cDNA_ID_1807333_gDNA_ID_1621088_Annot_ID_55422 3000 nt of promoter + ATG

SEQ ID NO: 6309 - DNA, 3000 bp, Unknown; identical to SEQ ID NO: 6305
  misc_feature (1)..( 3000): cDNA_ID_1814031_gDNA_ID_1621088_Annot_ID_55423 3000 nt of promoter + ATG

SEQ ID NO: 6310 - DNA, 3000 bp, Unknown; identical to SEQ ID NO: 6304
  misc_feature (1)..( 3000): cDNA_ID_1814023_gDNA_ID_1621088_Annot_ID_55426 3000 nt of promoter + ATG

SEQ ID NO: 6311 - DNA, 3000 bp, Unknown; identical to SEQ ID NO: 6303
  misc_feature (1)..( 3000): cDNA_ID_1808511_gDNA_ID_1621088_Annot_ID_55427 3000 nt of promoter + ATG

SEQ ID NO: 6312 - DNA, 3000 bp, Unknown; identical to SEQ ID NO: 6302
  misc_feature (1)..( 3000): cDNA_ID_1814016_gDNA_ID_1621088_Annot_ID_55429 3000 nt of promoter + ATG

SEQ ID NO: 6313 - DNA, 3000 bp, Unknown
  misc_feature (1)..( 3000): cDNA_ID_1839029_gDNA_ID_1621088_Annot_ID_55430 3000 nt of promoter + ATG
gttactttgtacctgaaggttgatgtagtcatgtaacacaaattttgcatacattaaagtgtaaaactaattcaaagaaattgactaatttcatccacaaatttctttctcgattaggctttttggatattgaaaagataaaaccaaataatcttgaggtgtagaaagattgactcgattttcagatcggtttggttttggtttaggcaaattctttaaccgttcaactggaatccattacatcagatcaccaacagcaacaaaacacaaaatttgaaaagccgtcaagttcttacatgatccatgcctactccgatagaaaaatggaaaagaaaaaaaagatcttccatttgtttagccttagagtacgtacatgcagcaaaagcatagtttctcttctgaaacttcttctctcactcaagcttgaatcttacgacgctgtctcagtcttccaccaatactatttgggtttggttcagcagacatctttcgcttgcttcttgtttctcggttctctttgtttgcagagttagccatcctctcagtttcactgcactgagcctcaagatcgatgatcacaggagttgctggatccacctctttcacatctaatggcttgagatcaccatcagtcactgaagtttggttgttcccagacgacaagaagcataatgactttctagctgaatccggattcttgtttgagccatcatcatcatcgagattttcgtcaatttgattgtcctgaatcccatcagttatgagaaggagatgatctccttctgaagcttgactatctgcaggagcatcagtttcatcatcctcacttgtttctgactgttggttggtttgaatcagataatgtgcaacagacttatacccgagtttatgtatctgagaacaaaagaaattcaaagggaaagccattaacttttgaatctatccaaggactcaaaatcagaattttcaccatggatcatactaatcgaaatagctaccttcctgtaagctgcaccagttgggagccaccctttttttgtacgacagaaactgcagttgcagatatcgcgacagactggacaaatccagtccggattttccagagcttcaagaacatgttctccatatctgttcaatcaccaaaacataacctaaaacattcagttccaatcctcattttgctgagcaaagcaagctactcaattcccagttgattctcacaaaaggaattactcaaaaacacagaaacaaagaaggttggaggctaatgtacctcatgtataaacaatctccacagaattgacctcgaacagaatggttacactggctgcattgggtatgataacctagcgtcttctgcctgtaaaatccacagtaaccattaaacacattagcctcaatcctaaccgaatcaaactacatcttcagagataaagccaagtgtacaaacctgcactggtggcaacactttcctctaacagggtcataaatccgtttcccatttttgtcacaaccatcaacaaaaagctcccaagttcgttctgtgttacctaacagtttctcatgctcctcagtgtaaatctctggccttacgccttctcctacccacaaaacaatctcttctttagacactttacccttcttcagttcaggttcctctgcgtaggaaactggtgtagcgttcttcaatctaaagaccacaacagagaaggcaataaaaatcattactttctattaaaaatcctagcttcctgttaaacccttgattttgaacagaatccaaagaacgaaacgagaaccacagagattgaatacgaagagattacctcgaggatctccgagaaactggcggctcctgcttcaatctgattataaaacagcgaaatgatttctctaaaaaccctagatttctctaaaacccctaattttggaagattgaagcaatgtgaacaaaatcgagagaagtcagtgactgaaaacgaagagattaccttgaggatcgtctagaggagacggaaagctgaataggagatgtttctcgacccggattggcattagagttaccgtaacgccttttggcgggtcggatctcggatttgagtttgagagagagatccatgattccgagattcttcatcctctgaagattctccttgatcctgtcttctctgcatttctcgtagatcgagacgtttgagtttcctcctccgactgttggattagggtttgtgacgggaatcgaacatttcgctctcgttctcaccacaggcattgtgagagattgatgaactgattttggattcaaagttccaatctttccctctttctctctttggatctctggataagaagaagaaatgaaagatttttttttaactttttaagtgagtgaagcggaacagcaacggtctggtttttttactctttttaaaattcaaaacatttttcacctttttaggtaaatgtgcttaatttgccaactaatgaaaacgttgattggtttgtcaaatggaaatcatatttattatctatcatacatctgtaaatttatttttcttaaagggcctttaggctttaataacggcccataaaaaatcccaaattgtactacgaagaagaataagccgccattctttatctttccattccttcctggagattacgcattaatatatttagatcttaggtcttattagcttctttattcgcacttttttttttcctctactcgaagcttaacgatcgtaacaatcatggcgacggcttcaggtaccatgattccttcaatttcttcttctaatactttaacctaattctcgatttctctgttaattcccgttgatgattaagaatctcgcttctgatatcttcttctttctttaaatctatatattagtaaattagggtttttactagttttgctattggctagattcattttggctaaattctggcaaaattgattttatttttaatgtttgaatgttgttctgatatatg

SEQ ID NO: 6314 - DNA, 3000 bp, Unknown
  misc_feature (1)..( 3000): cDNA_ID_2155710_gDNA_ID_1621088_Annot_ID_55434 3000 nt of promoter + ATG
acatgcataaaatatatggagaaccaataatatataaacaagtacagctaaaaaatacatgcatatgccattagttgttgttttgttttcatctatgtaattatgaatcaagtatttcgaaattcttttgatataaaaagaaataaatttgtatcactagaatgtaaatgacatggaagaaaggtgtattccgtaactaagtactaaagtcatgaatacaaagatcatgttttaaagggtccactagagagaaacgcaaagcatgagttagtaaaaagcaaatgttgctaaagctttgtcacgtgctaatgcttattagaatctgccaaagtatcatttaattcccattcatttatttattacctaatccaccgtttgttttttaaatttcattaattaagactactatatgaggccatgttagttgatttaaataatcaaattattgatggtataatattaccacgcttagcctcggaatatgcaactatctctcccatatatcaaaaatttgtcattgttgatatataataattgtaatcacttttttcatatttccctttttccgtggtatgacattactacttttaatgagtttcctttttaatctcaggacccaacatgttccatctatttctggtttctcatgattttgttttttatgagttttgtttatactacggtttataaaacttaataataacgtcattaattgacacaaaatacgacattagttcattaaaacgaattaatctatttcattacacagaaagtagatttgaataagtgcatatataaacatgttacgtaaataggagaaacatatcaatattcacctttattttcttaattaattacttcctttttattgtggatcacccgatttgacagcaaaaaaggagaaatgaaaatcaaatgttaaaaagttaagactatagtgagatgtcagcatctttcgagttttaacttttctctctaatttttttctttcctttagcatcataattaattagcacgttatctttgctttatgaaaaatgtatcagaagttaactctgcaaaacgcttctgtttaagtacagcctgcataattgattacacaacaattactactagagtactagttaggcttagtataatcgctaatcaattctctaatcaattggttatttatatatataaagccacttaacctaatcaacaagacgtaagatttacttgatatgatgtgttttcatacacaaaattatagatttagaattgcaactagaaattatttaatatagaatagtcgaatgacagcttaaaactgatattattagagtagactgaatagtagttaccattgacaacaacaacaacataaaacagcagtgagtgaccaataattttggattttccatctaaattgcacgaaatattgtcactcactatgagaaatatcgaaacaaaaaggctggaaaccaccaaactctctttttttttttttttttaataaaaaaatcacgttcaaatcttaccaactatacgaataacattgtaaaaatataaaaatattttaattttttgatctattaattaactgatcacacataattggattaatatactattttaaaatttcgaagtataaaagtgtatacttcataaaaatattactaaatataataacaatatttttgtactattttgggacaatttttactctaataacattctgagcataattaattagtaatattaatttttgaaaaataaaagaagtgacaaaaaagattgagagaaaatgaaagcaccaagccactaaataccaaatcacaattaataaaaagatagaaaaaaaaggagagaaaaaagttgtcctcatctctcacaattctactccagctcgaaagagcgctcgtcactcagatctcccatcttctccgatatccataatcattccacttttcaatctccaatttacattactttataaaattgaattatagagataacagaaatggcgattaaacgttgttttctgctacttcgtcagctccaataagagagagagattctgtagttttcttccattgctctctgttcgagattatctgaccaaagtaatcttcctatacaaaatattggattaaatataatcaaaattgtggatctttgggaaacataagcttgaatgaaacacacatgccagcctttttctgcttctggttcgctttaacttcacgttttcccgctctgtcttcatagaatcaacaaggtacttaatttctatcaacacccattatctctttctcaggaaagtttaaatcttttttattttccaagtgttcttaattgtccttatacttatacatgtaactgtatctttctttctttttacttctgttttgtttttcttttatgttttatcttgatgggtctctctttctctctcttgggtttatatcagttagagtggagagaaagcaaaagttgaagacagacagagagagagagagaagcgcgatgaacacaagtgttcgagctgttctttcctccatgaaagctccttcaaagcatgacactactcatcatcaagtagctttctttttctctctctctcatatcactttttccacttttattaactcaattttgattgcttttctctttggggaaatctttcttggtggattatgcttagtctctgataaaaagtttgttcctttagattgataaaaattggatttcagatatttcttaagattcttggcttcaacattggactatttaccaaccgtatctttgcttttttgttttgttttctgaataatagttattccatagtgatggtcacagtgaaagtgatcgatactcaattcttatcctcattctggaagtgtgtgttgttttccactatcaaaggctcacaactattgtttctttattattagctccagttctgtttccttcattctgtttgtgagtgtgtttttttggtctatatgagtaatgatg

SEQ ID NO: 6315 - DNA, 3000 bp, Unknown
  misc_feature (1)..( 3000): cDNA_ID_1807955_gDNA_ID_1621088_Annot_ID_55437 3000 nt of promoter + ATG
ctaatttacaagttgttgattagttcactttttgtttgaaggcgttgactgatcctagcttggacgtcaaggtatcggacatatgcatcggcacatcagctgctcccacttactttcctccttattacttttccaacgaagacagtcaaggcaagactaggcattttaacctcgttgatggcggggttactgctaataacccggtactgtcaagaccgaagagaaattgattaaaaaaccttagttttagtttttccgaaaactatatataaacagaaataactctgttatgtttggttttgttatagactttggtggccatgactgctgtgacgaagcagattgtgaataataaccctgatatgggtactctcaatccgttaggttacgaccagtttctcgttatatcgataggaacaggatctgcaaaaaaagaagagaggtacagcgcaaagaaggctgcaaaatggggaatcatatcttggttatatgaagatggaactactccgatattagacattacctttgaatcaagccgcgacatagtccattatcacagctctgttgtgtttaaagccctacaatctgaagacaagtacctcagaatcgatgtacgtaagagctacatataaatatatatatgtgtgtctcctaatttctgattgatcgtttgattgattggattgttttatgtatgaaaatccattgcaggatgatacattggaaggagatgcaagcactctggatctatcgacaaagtctaatttagaaaatcttataaaacttggagagaagatgctgacaaacagagtcatgcaaatgaacatcgacactggtacatatgaacctgctgctgaaaatattaacaatgatgaacaactcaagaggtgattaataagtttcaaatgtttttatccataaatgggtttcttggatcacaagtaatctcgttctttgatatttgtaaatttaggtttgcgaaaatcctctccgaggaaaggaaattaaggagaaagaggagcgacaaaatgactaaagattcatcaatcggatcacaagagatcaagtaaaaggaaatacagccggaaaatcactctcgtgcttttgtgtgaaattattttttttgcaagatgatattgttattttgttaaagctgaggattttgtgtgtgttggtcagcaaattctcttaacgtctttttttgtttttgtttttttctgggtgtttctgattcaattcttttccgaattgaacaaaaataaataaaattttacaaatcaaccctttaaataggaactaggctccctgtcatgtgggttaaactgggaacggtcgagttatgcaattcttcacgtatcaacttatattgaacctctctataaattaaatcaagttagtcaatcactatagcatcatgatgttggaaaaaataaaatctctatcctcattatatgtaaaaaaatgtggtcaaatgaagaaccaagtaaagtggacaacctttaaaatgatattatctaatagttttgtcaaatttgatgattatatatatacaattgtaacgttctcaagaggacgtttagtgtttacaagttcttgactctttcaagaaccgttgacaaaaataatcgtataaacaaactcatatgtatgttacacgccaaagtatattatccatcttattacagaattaggtgattaaacataaattttgttctctaacaataaaaatataaattttgtaaaaggttaagccaagaaacgagatacgtgaagaattgcataagaggtgtgaaggggtaagatgatattggaggattacaattgtatgttttttaaataacacgaaaaacatttgacagatttaacaatctcgcaaaagtggaccatagatagattctgtactacttgtcacggcatgggcataaaataaatattgtagcttgttttatttcctaggtttaaaagttggtggaacttcatataatcaatgaacaatgagcaaatttatgcgaaagttacacaaaattaaatgtagtaaatagtaatagagtatggttagtacaatgataaaatatacagtatattgtatccttgactccttgtagagactaaccgtaaccatttcaaatccataatttaggccacatttttggttcgagtaacggttatatttgcttggaagtatgattctcgttgtccctaacggaaatatttttattggacaacctcatatacttttcagcaaagttccctagttctgcgatttcagttctattagtagtttaagaagccgggtttaaacctccaaccaaaaacattgtaccaaaaaccaaaaacattgtaccaaaaaaagtttacgcatcttcaggatggtaacctaaaaaactcggaaaaaagcaatgaaaaggagctaaaatattactcttcaaaaatttctgaacactgagttataaatagatctcacaattagaagatgaaaatgttcaaaagtagcggtcttatcttctactaatttttataaactaagaacatttaaaatatatatacttatatgttcaggtgacttctgctactaaattttgtgcatttatgtctattaattgtttattttggaaagaacagctgtcatctagacctttgtttttaaatatagaagtatgtgtgtaacatgacatgctctaaagcaaccacaagtgtaatggggcgtgagagtgatgaacacgacatcccaaccaagaaactggttcaaaaaacatccaaacactatgtgatggatatgtgtatgggcatgcataacatagtgttgtatatagactccctaatctacatatatctctttctataaatatgtaacggtagttctaatgggttcatcacatttatcaccatctctatcttgaaaaggagaaataaataattaatcactaagcgaaagagatttgatctaaagtaatacaaataaaccttgattgagattgtaaaggagaagagtttaaaagc

SEQ ID NO: 6316 - DNA, 3000 bp, Unknown; identical to SEQ ID NO: 6298
  misc_feature (1)..( 3000): cDNA_ID_1813991_gDNA_ID_1621088_Annot_ID_55439 3000 nt of promoter + ATG

SEQ ID NO: 6317 - DNA, 3000 bp, Unknown
  misc_feature (1)..( 3000): cDNA_ID_1813988_gDNA_ID_1621088_Annot_ID_55440 3000 nt of promoter + ATG
ttctccggtacttgcgacgattaactctgtttttcagttatgagatcgaaattgactgttttgcatgcttgttttagagctcaattgcttgattttaagtagaaacagacttcaatttcgatgtaaatcataaccctaaaaaaaaactttttagagaatcttaaagtttgttttgttttgcagattgattttgttataggaagttggatacattgcaagatcccaacaggagtatctttgaatataacaagcatctctggattcttaaactcatcaacaaaagctccaaactttgtggtcgaactaatacagagcagttccaagtcgcttgtgctaatccttgacctcccacatcgtaaagatcttgttcttaacccggattatctcaaggagtattaccaagacactgctcttgattctcatcgacaatctctccttaagctacctgaagttaacccttatgtgtctccttctctctttgtccgttctgctttctctcctactgcttcgatgcttaagattgatgcggaggaagaggataagttggaggagatattgagagatcatgttagtccagctgctaaggaggttctcgaggtttggttggagcggtgtgtgaaggaagaagaagagaagattgtggttggggaagaagagagaatggagttggagagaagagataaaagctttagaaggaagagcatagaggacgatttggatttgcagtttccgagaatgtttggtgaagaagtttcctcccgtgttgtacacgctattaaagaagctttcggtgttctctagattatgtaactatatatatacatcagttaatgttcattgtactaaacatttactttcatcaatgtcacaagaacgcaagatgaccatcaaacaagtcctgttttctcctaagaacgtctttgttgtgaatcatctctgaatcggattccttctgattcattttaatactatgggattgtaaatttatcaatcaagtttctaatttatctgtaaaaaaaagtcttgaattattgtttttctcatggattttaaagtttttttttcactattttacatggatgttttgttaaatttctcgttctctagatcatgtcattttacattagcaaaaccaatataatatatagattaatattaacgaaggaacataaacgtgcaaaactaaaagttttaaagctaaatcgctttcaaaagagttagtaaccagacaaaaaagagacagatcatcggcaactaatctcgtcatcgcatgcatcataaaccaaattaactaaatcatccatttaatccatttgttcttatcagatcatccttttccttcctacacaagaaatggttagtgttttcttttctcgattgtctcttagtttagattctttatccgactactttgttcatcggttttgtttttctttttgtcttccggaaggcgaattacatgtcggaagcagcacagctcagaagaggtctaaagcctaaagggaagacttatgggttgaccaatcagaagagacgagagatcagagagatctttgatcttttcgacatagacggttcaggtaaactattaaaccgattctttatccgatttacaaagttattgctcacatgatttagtgcatcatttcatatgtaggtagcatcgatgctagcgagctcaacgttgctatgaggtcaacggcaatttttctttctttttcaaagttattttcttcaagttctagttaagtatagtactaaaaaattatcagctgattacaggtctcttggatttgagatgaataatcaggtttgtttgttttccttccttttttcttctttgttttaatttcatggtttagatcattgtacgtagaaccaacttgtatttagtttggtcatgttcattgttgcagcaaataaacgaattgatggcagaagtagataaaaaccaaagtggagccatagatttcgacgaatttgtgcatatgatgacaaccaaattcggagaacgagactccatagacgaattgtctaaggcgtttaagatcattgaccacgacaataatgtgaataaatctaaacctgtcattatttcattctttttaatattatctttttttgtttggattgatttcattgtgtttgactggacaacttttggaatgttttaggggaagatttcacctcgtgatataaagatgattgctaaagaattgggagaaaatttcacagataatgatatagaagaaatgatcgaagaagcagaccgtgacagtaagcaaaaacacataataattttgcgttttatctataatcggtccctcaagttcatgtttttgccttaacctacgcagaagatggagaagttaacttggaggagttcatgaagatgatgaagagaacctcttacggctaagtataaatcaattagtaatggttgtgaataatatttgttaatcaccttgatttataataataaagaagtttgatttgtggcttggtcgaataaaaatgtattgttgtataaaaataataatgtaattcacatccattattttgaatatgtaaatgtccttgaacgaacatttgttttatcattttttatgtataaatgtctttgaccaaaaaataaattatgtaaaatatgaaccagaaacgatgttgtttagatctgatacttacatataaccaaacgacgacgttgctagagtaataaatctcaaaagactggaaacgactgcgtataagtccgtgacctggttaccggagcgtaacttctccggcgaattggacaattttgagaaagacggattatggactccatggaagctccatctctaccatttcaatctccctctcgttccaggttttaattttgagtttataaggattatctcataccttctaacaaaaaccctaaaaacccaatttgtttttttggtttgcagtcaacaattgcatttctacctcgccgtggatcgtccccaattcaaaatg

SEQ ID NO: 6318 - DNA, 3000 bp, Unknown; identical to SEQ ID NO: 6296
  misc_feature (1)..( 3000): cDNA_ID_2999338_gDNA_ID_1621088_Annot_ID_55442 3000 nt of promoter + ATG

SEQ ID NO: 6319 - DNA, 3000 bp, Unknown; identical to SEQ ID NO: 6295
  misc_feature (1)..( 3000): cDNA_ID_1813986_gDNA_ID_1621088_Annot_ID_55443 3000 nt of promoter + ATG

SEQ ID NO: 6320 - DNA, 3000 bp, Unknown; identical to SEQ ID NO: 6294
  misc_feature (1)..( 3000): cDNA_ID_1813982_gDNA_ID_1621088_Annot_ID_55444 3000 nt of promoter + ATG

SEQ ID NO: 6321 - DNA, 3000 bp, Unknown; identical to SEQ ID NO: 6293
  misc_feature (1)..( 3000): cDNA_ID_1808519_gDNA_ID_1621088_Annot_ID_55445 3000 nt of promoter + ATG

SEQ ID NO: 6322 - DNA, 3000 bp, Unknown
  misc_feature (1)..( 3000): cDNA_ID_1813974_gDNA_ID_1621088_Annot_ID_55447 3000 nt of promoter + ATG
ttttgccggtaagcccataagaatcaatgggccataagaatcaatgggcttatcttaattgggtttaattaggccttataatataacaactcagccctcataatgggcttgaatctttttaacaaacataaaactaaatcatatagcttaaggtatatggagttttaaaaccaaaatacatagtgaatataaattgattgtgtacaaattttttatttggatactagcaaacaatagctgtaagtatatcatatattctattctgtttattttaggaggaaaaatgtcatttaaatcaccactttgccattcgtggtgatttatcatgaactttgctttttatgattaaaatcatcaattaggtgttgacttcaaataaaatcagtaactttcgttgacaaagccaaattagtcataacgttaactgaataatacgaagattgagataaagattgtgatgaaattggatacgaagctgctggcgaggaagacggtgaagatgaagacggaaatcttgatgacttgcacgaaaaagttagtgtcgatgaagaagttgtgggtacggatgtgactaatttggctttgtcaactaaagttattaattttatttgaagtcaacacatcattttaatcacaaaaaacaaagtttatgatttaaatcaccacaaatggcgaaatggtgatttaaatgacctttttcccatttattttatctcattaaattattcatcttgtgtttactttaccacgtgaagcctgaataaaatttgaaattcgaattaatgttcgtaacttcttaatttatcattcacttccataataatataattttatattttttattctttattaaattattcaattttgtcttgtttattcttcttttgtttaccacgtgaaatctgagaagaagatttgaaattctaattactgttcgtaacttcttttccccctagattaattttgtttatctttgtcccatgtatttttattttattttgtcattcactccaataacttaacttattctatatattatttttactttttgtatttgttagtttctttcaacattcatcttaattaaccttatgtattactcttgtgtttaccacgtgaagcctttgatcaaaatttaaattctaagtaacgttcgtatttttagaaaatagttttaaccatttcactctaataactacttccacatgttatatatagttttcacaattgttagttaaaaaagaaggatttattgtgcttttttacattcctctattaatctatatgactatatgtcaattatccttcatttataagtttttgtgcatataaacaactcatactaatcataatgaaaatgaaggttggtgcatctaataatggtaaacggtcaatttttaagtaataaaagagagagagaagtcgccatgcaattgttgttatcgtttaatcattgaccatacttcactactccttatggtggaaatttcaattggttacgtcaaagtttatataacgtccgtgtgaataaatttgacatgtttcaatcgtctacgagtctttcttttattcacacgccattttatgttttttattttattttattttgtggcgaccacttcagagttcacaccattttgtcttaccaaaatttgtaataattaagtataaatttgggtcatttctttttgttttaattcagatcattgtaggactactttaagcatatatggatttaaaataaataaaaactgtgagagttcgattaacattgttggcaagtcacaaagtctttaactacaaggcattgtgggatttctggtactttgattaaatgtcttttaaatttttatcaagctataattaccgatgtggacttatcatacaaagtgttataggtttgctaattattgttaatcagatttcttgccatagaagtgatatattgagatccgtacgtatgttattagtttctctaacaaccaaaagatttagaaacatttatgagtttcatgaatattccttatcttacgtataacaaattctcaagggaaatcaatctaagtttattctatatccggagaacactaaacttgaaaatggtctaaactaaaaccaaaatcaagatattatttgcaacaaataattcagcaatgagtagagattttgagcatgcatgcacatgttttttaatgacatgtgtgggtgagattttcacaattgttttctaaaatcaacactgtttctacaagagaaaatcacgcatcaccatcaccccatcaataaataataaccaatattcacagccatataaatactacttcacacggtagggaaaaagaatctcaaagaaaaatttgacagaatcttccatccgatttttacgctactaagaaaaacgcgaatcacatggtagatcttgaaacaaacgtgtacaactacaaatctaatttatcaaatcaataaaatagaaaaacatcaaacaattataaatatacatctttaaatattcattaaatttacaggataacaatatatctctatcttttatagctaaaaatcatatttaagaaacactatcttatcaaagtacaatttagtaatcaaattacttaattttatatttttatagtgctatactgctatagtttatttttaattaatgattttttttttgttattctacagtgggcaacaacaagaatcttctcacaccacccacgtttcctttatggaccgctatttcttctcttggccaagagcaaattcttataaattggtaaaatatttttttagataaatccatatacttatataatcacgtgcattaattacataaatacacttgtttacaacaaactattaactttttttcttcttaagaaaataaatatctcaagagtatatatataaaaacagaggtagagttggagaagaagaaagtgtagagaaactgtttcataagacttttttttcttcttcttcttctctgttaaacta

SEQ ID NO: 6323 - DNA, 3000 bp, Unknown; identical to SEQ ID NO: 6292
  misc_feature (1)..( 3000): cDNA_ID_1807145_gDNA_ID_1621088_Annot_ID_55448 3000 nt of promoter + ATG

SEQ ID NO: 6324 - DNA, 3000 bp, Unknown
  misc_feature (1)..( 3000): cDNA_ID_1813970_gDNA_ID_1621088_Annot_ID_55449 3000 nt of promoter + ATG
tgttttttttttggttttgattaccattggttaaagcagagattcaacgttagacggatttatctcgacacaactctaattcagtttgaccggactgaacacttttatcaatattaatgttgagttgttgacctatatattattgtaataatgaataaacaacgccatgattgcgtactatctatcagactttatagagtaactactttgattaaccattacattttgtttttatgagaatgttttcagttatatatctttatcaacacagttgaaacctgttcttctatgttaaagcctttgaatttgagtaattttacttttgatagctagcctttttaaaatgaatgattatattgttaggttccaagtggggagttgtcttggggatctcatttgacgtgtgatcttgaatttttgatagagatcctaatgatctcgtggtccctctcgcagagtttatgtaaccatctaatatataacttcatgtctggatatggagaatccaaaacttaagaaatgcacgtattagcattcgtagttgtatatatgttatgtattttgcgtcaaatgcagaacaaaataaagcaagaagagaccaacaatcttcatatggagaattgtaaattgtccaaatcagcaatatatagatgtcttgaacaataaaaagataaccgagtttaacattagaccaaaaaaaaagaaagataaccgctacagaatttgtgacgaaaagaaaaaagctttggagaaaaaaacagagtaagaactgtttttgttgtgtgagaagagtttgtccttaggtcgcataatcttttaggatgtagttatatgtgttaagtgtaacacatgcatatcatttacttctgcaatatatctcttctggagtttcgtaaggtacttatggttggtttgtcttcgaaactaccaacgaacaacttaaaaaacattgatctttttaatagcgtgagtttgatttatgttatccttgttatggtgcatatgtattacggaaactttggtctgttttagatgggtaaatagttgtatatgagtaaatatgatattgccagtgttttatataaagaaaaagggaaacgatgataaaaggtgaaaaagaagtttaggatcatctttgttttttattttgttttccgactttcaaatcagacaagacaacgaggtatgggtcttttaacatacagagactcaacttgaaaattctatcaaaccaccaattaaaaaaccagagaaaacattcaactatcttcttagaatctagacaaaataaaaagtgtatcatgctgattttgaacaaattattaaagagatctcaaccatcgtttcattaatatctttgacaattctagaagccgtagtaaatcttgtctttttatgtgtatatcttgttgaatttgataaggatattcaaaataatgagatatgtatgttgagtaattgagtaaaatcagatcccttgtttaatttgacgattaaacgcttttttcattattttttttcgcattttgttgtgtatgttctcaattacaaattccactataagcatttggactctacaatgtcactttctaattctgatatttaataaaacaattattttgtatatgtataaatagtaccagaaaaacgaacttaataaaataattgaatcaaaagcagatgctgaacaaatagctgcagcttttagcaattgtctcccatatgcttttcctttgtttcaaaaattgtatatacgaggttaagtgaatgttgcaatgaaataaatgatgcagtttgtgcattcatcaagcgaacaagtacgattgatgttttcagtgcaaaaactaaaataaaatactactaacaactatatagtgtaaatatatataactttaacttctttttttttaagtcttcatacgctgcgaacgatcaaaatatatttacaaatttacgaccaatattttaaaaatacttcattaaagaattgatgctgctgtctgcacagttgagaacgcaattggaaactttcgtgcattcactttgttcgccgcaaattggatatgtgaacgtggtcatcattatttatagaattattctataaaacttactataaaacactagatataaagctggatcatataaaatgaatttactaaaaattcgatagttaattatagcagatgttatgttccaatttgaaagcatacgaacgaggtatatagttgaaaacacacaccgtaaagttaataattttcacaacacaagaacaaatcaaagtcgcaagtaatttaacgcatgtcagtagcatgggcttcttatatactagtcaatagaataaactagcaaacaagcaactaatgtattcttgtttatcacgccacgggttacaatatcatacaaaatttgaatactaattaatggtaacaagtaaaaaaacaaattactagaaatggaaatacttttgtcaaacaaccaagacgtataacttttgttttctatagattaatggacttcttaaaaatctctccatcagattaaactttgagatatacaaatacagtttttgttttcttctaaatgatatgaatattaactttatcgatttcatccgtagcagatttccattttaaataataaactatgagaaaacagataaaggttgtatattatttgttaccccaaaaaaaaaaaaaactaactacgagtagtagtttagtgtgtctcacgtgcgacgaggaaaagttttgggagagtaaaaacatttaatatttacgactagtttgaaaaaccgtgagctgacacaagctcattgctaatgctacagtaacagctaccttcacttttaactaaatgacagaccaatcattttaacctctgttttcttagctggcgcgtgacagacactctccctctctccatgcccataaaatctcaaagactgtttaaaaaaaaaaatgttttagctttaactgctttttttttgttgttggtgtaatg

SEQ ID NO: 6325 - DNA, 3000 bp, Unknown; identical to SEQ ID NO: 6291
  misc_feature (1)..( 3000): cDNA_ID_1807542_gDNA_ID_1621088_Annot_ID_55450 3000 nt of promoter + ATG

SEQ ID NO: 6326 - DNA, 3000 bp, Unknown; identical to SEQ ID NO: 6290
  misc_feature (1)..( 3000): cDNA_ID_1383434_gDNA_ID_1621088_Annot_ID_55451 3000 nt of promoter + ATG

SEQ ID NO: 6327 - DNA, 3000 bp, Unknown; identical to SEQ ID NO: 6289
  misc_feature (1)..( 3000): cDNA_ID_1813961_gDNA_ID_1621088_Annot_ID_55454 3000 nt of promoter + ATG

SEQ ID NO: 6328 - DNA, 3000 bp, Unknown; identical to SEQ ID NO: 6297
  misc_feature (1)..( 3000): cDNA_ID_1813957_gDNA_ID_1621088_Annot_ID_55455 3000 nt of promoter + ATG

SEQ ID NO: 6329 - DNA, 3000 bp, Unknown
  misc_feature (1)..( 3000): cDNA_ID_1814123_gDNA_ID_1621089_Annot_ID_55458 3000 nt of promoter + ATG
ttatatagtatatctaaaggggaaacattcaagcagaccaattattcttttgaactaccaaccaatgtcattcaataatatctgaagacaaagcaaaccaattcaaagtaacaatacttaaagatgtttgagaattatactcaattactcattgtggatcaagagcattggagtatctttttgtcaaatatgcatcattattactttgaaaactatgcattgacttagattgagtaccttcttacacttgttattaatgttgtattctgaagaattggtgcaactcatcacctatgaagcttttttacttacccaacttcagcttggaccatacctaatcacatgcacttactccttacacaatttttcttcttcttcgtcgtcacattcacaatatatctgtttcacaattactaggctatcatcatcgtactctagtatttggcatctcacatagtttaaatatatttatatcaagtattcagctgatagaaagttataagttagatactgtatttaacgttttcactaaaacagaaaatgagccattgatggtaatcagtaaagcccaaatgggccttcaaacccatattatagttgaggtttcagaagctcttccacggaagagacagagaatgaccgacaaacagagagacgaccaaaagaagaatctgtgttctctctcaaagaaataaacaaaagaaatgtcaataacttcacgtgtcggtattgtgacgtggaagcattcgttttgacatcatcagagaacacatcaatccaacaaagaagatcgatattttcagattcaagaaatcaaatcttgttaaactaaaggacaaataatgaagaaagatttcaatatatacacactttttttttggtatcaatgttaagtttaaaaaaaagaagacgcaaacatgcaaagaagggaatcgaactcaacacccaaaacttgcatggggtgttgtactattttacaacatataccataagataagatgtcaatatattagttatgaatgttttcgttaatgacaaaatgcaaaaactgaatcaagaagatgaagagtaataagagttaaagaagacaaagtaagcaataacagcacaaagaagagccacaaagtttccttctttaagaagaaccttaaacacataaccagcaatttctttcgtcactttccttccttcaatcaccactttcttcctcgactttacggggaacgctattgtcaccactaccgatatccagatcacaacgatcgctggcacagcgatgaacagagctgccgccatagatagaactccgaacaccgcaccaagaagaaccgacgcgtaaatagcaggcaaaccagatgatgtctgatgattctctccgtaccaattcactatcgaattcaacgaatttcttgaagaagacaaaaggaccgcgtagactacaagaaacagacagacccatgttctcctcttgcttatgactctcaaaaacagcttgtacgaggtcatcgtctcttgttcttccttatccgccatatttgagaacaccagattttcttatgattctgtgttggaattgaaactttgattaaacctgaaaaagagaaaagcttcaagtgggaagaagatgaagaaaagagaagaaccaaaagcaaagcaaaaggagaagaagaagttgtcgaagaagaagagtcaacagaagagatgagaaagtcaaagatgaggctattgggctagagtgaagcccacatagtaaattagtaattgtgtgttttggttagtaaatgggctattattagagttgagcccagattttgtgcatatggtgtgcttataattaagctaagctagagtagctaaagagtagttgttaagaggagttgtggtgtaaggtttagtagtttaacgttacttgtggttttagtctagtccttaggaataatcatgtctaagtgggagtagttttaaagctagaatgttaagtgtgtgaatgtgtatcttgtggtgaaataccactataagtatgtgtattgtgtcttgtagagttatccttgtgatccattagtacaatgtagacaactaaaagaaaaaaaagaaaaaatcgtttcttgtgtttctctctaaacaataacaaaaacagagagtgtaacaatgagagagagacataaagaatgagagttctaacctagtgtaaaagggaggtaacattcggtgtctggtttggtaaagttatggtaaatagtaaaacaatatttgcaatgttgcacactgtcaacatctcccaaacgcaccgtttcataaaccaaagtgattagtgattgattagtaatacttgcactgttgcacatagtaataagagaatatcaacttcaatgtttttgaattgaacaatgaacctaccaaaaaagtagttactgttaggcatttgacatgatgattttaggattaatatatactaggtcctattaatactatgatgcttacaggtgacgaataatttgagttatgtgcgatatgtttgaaagaattaaagaggagaatcaagaagaagatgaatatttgacatttcaaagctgacttttttgacgaataagttcatcattattcacacctataaatgtggacagcgaaataccaagtccaacaatttcacgattaattccaagtggcttggatcaagaaatatacaaaaacaaaattccaaatgcttaggaaaataaataaacgagagatcaaattatcacggcggatattatttcgtccacatttgttgttcaaacagatttctaacacatataattagcatatatacattaaacaacattatctccttaataattttgactctggaacagatctttccagtttcagacaatatatttgaacaatcggttcgttgaatcgagaacaaaccaatcaaatctcttttgacaaagctcttcttcttcttcccataaaacttcacaacggcacacgtctacgaaaaaacctctctcagtcatc

SEQ ID NO: 6330 - DNA, 3000 bp, Unknown
  misc_feature (1)..( 3000): cDNA_ID_1814119_gDNA_ID_1621089_Annot_ID_55459 3000 nt of promoter + ATG
aaataagatactgcttacaaagtttccgtttcagtaatctgtctcttggagattcttgaaacacttgagaggagaaaattccaagctgtacaacaacagaaagttgacactagtaagctcttggaacattttaacacatcaaacaagccattagcagaagaaagcactatcgttgtcttaaggactaccagatgatagggatttgagagaagattattgtcttcttgccctgaatcactctccttgccgctgtttaggtcaagtgatgtacagaccttggagttaagactcaataataaatcttaagagcagttaaataaatcaaaagttagtacctgttagccacaaggcggagttgtctaaagggccatatatatacaccttccagatttatttgggcaccacccacattttgttcattgtcaaatacgtcatggaaaacaactacaccctgtttcattaacgttgtataagttcaaaacattgcattctacaacatcaacggtgatcctatgatacagagcttagaagctgaactctttacctgaacataatgcacaccagttatcttcgttggaactgctactaactcaaccacagaattaccattttctttttgaaagtcttgaaacttcgaagagctatttaaggaattcagaaacttccaagttcctgaaaatacccgctttacatttgataagtagtctaaaacattaagctacagacatatacccacaacatcgtagacaatcctgaagtgtaaaagacgtaaaaaaaatggagaagggcatgcggcaaacctctataagttcctgttatattccaagcagaaaagggtccaacttcagcttcttgtttcctaccaaagagccactgcaagatcacaaagacctcacgtattaaaccattacccaaacattgcctggtcagtctaacgtacatgagttccctttgcacagtctacttaaaagtcactagctacaaacccaaactgtaaaatgtcatcgaagattccccactatcacgcgttctacttctgtaacaactaaccggtctctatgtaccttagactccattattgtagtctcatcacaccacactactaacgacagattcattcttattcatctcaaagtattcgccggcagaacaaagcttagataccgatgagctcaatcgagctaatgtaaatagtttatatacattttcagctttgctcaatcaaatcaaaagataaaacttagatcagagctgctctactccgggattttcattcaatatggtccattttcttcgaaactcagaaaatctcagacttagaaaaaaaatcatcaattatgaccagttctcgttcagcaaatcatgagcagaaacaagtcaataaaaaaaacatttgacagcaaactgctcgaattcttagttggaaaggcacatcaaaattacgaacaaaacataaaaatatgtttctgggaaacatcgaaatgaagaaactttcgaacaatcatcaataaagtaaaaacacacacacatacctcgtcactccatgatcgaggtttctccctaataggtctcaatcccagcgcttgttgcgaaatcgccaaccaaatcgataaccataagataatctgccactcgaagaaccctaatcccaaatgttcccgcttcttcatatcactcacaacccccaaaaatcccttctttatgactcaatacaaaatccgactggatcagaactgattcgagtctagctcaaaaacccacataactgaagaaagaaagaggtttgcttcaaatgaagtcaaaacaaaactaggctttggttttggttgtgtaagaaaacccaaaagacagcataagattcgtagatgtatcagacagcagatagaaagatgattacagacagataaacaacaacaacaataacaaccttaagatgcaatttgttttataaaaaactccaattgatgaatttgggcaattgcggtcgttgaagcttctcaatcaaacgtattcttcaataactcaattgttgaacaagtcgaaacttctttttggtctctctgatttttatttttatttttatttattagctttttctgttataaacgaaggaaggttcaattgataaattagttagttgaggtttcatattctcaggtcttttctttacgccttaaaacttcttttttcctcaaaaaggatttgtaccaatctattacgtttttttttggactaaaacataagtagaaatttgtatatttcgatctcacagtttaggaacgatcatcaaatatttaattagatccttcacccccactaaatcctcattatagaaagtaaacaatttctaatattgtccaactacagtagttgatgttttaaaagtagaggagaaagagtataaaattaggagaaagattgtgtacattgtgtaaactacaagacaatcaaaaaggattcagtcttctactaatagttgggctttaaaggtagaggagaagaaactgcaaagcctttcttacaacatacccaatccatttgaaaggcccactaaaattttattattgtatcactgggatatttatcgatttgtaaattgaaatataaaataaaacaatatgtaacgtaagttttaaataataataaatactaaaggattacaattttatatttgatggctaaataattacaagatctgagtgagaaatgtttgtttgtgagaaagaaagtgaaaaattaaaggtagatagccgttaagtccactgcatgtcgagacgtgttcaaaagaagacaggagcaaaaccaaaacgcttctacttaattcgcatttctttaggtaatcgatgcacagcccaaaaagcttgacctaacggctatgttttctttactttcaccataaataagcacctcttgaggttgcaaacacacacacacacacacactcacttcaaaagagttagtaagaagttggggtttgattaacgttttgcatcggagatg

SEQ ID NO: 6331 - DNA, 3000 bp, Unknown
  misc_feature (1)..( 3000): cDNA_ID_1814115_gDNA_ID_1621089_Annot_ID_55460 3000 nt of promoter + ATG
ttcggtgtaccggtttaatatattgattaaagttaaattgttcaaaccattcttatatgtacaaaaagtgtataagatctatttatatgtttcaacaagattttagtttgtgtggagaagttttattgcatgagctatgtgaactctacatattcgtcgtatatattcatattagtgtgatcataattaaaacacaaaataaaaacattcgcatctaatcaatacaaaaaaacatcttaaatattttctttagtaagaacaaaaacgagacagcggaaacattaaaaatgggttacaagatgcttcaaacatacaaataaaaaggcacataaatatgaaactcaatggtagagtaattaataccctcacaaatttaatgactagcgacaatatataaacccctcaaaacagagaacttatcataatcacaagaaccaccatccccggaccaaccaaaccggccgaattgggagctgtagccggtcctggagctggaacacgagagtttgaatcagatgatggttccactcctggagaaggccccggcgaagacaactcctgatggaccggagacggggagggagaggtatgacgaggagagtggctgtggtggacggtggacaagaccttgacggctagcttctgacctttaagacagttttgagagttgccactaatgaaaaagtaggaacctgagtggctaagtaggaagagagagtctccgtctgagagggaagtcagggggtgtgtcgtgttgcatgtgttgtactcttgttcagtcacctccaacactgaatcttttcccttggcgtacttaaaatcttgtaaaaatcaaaattactatgcattaatattgacacattgtgtatatatagtagagaagaggaaatagacttacgaagagtgtcgttgacttgaaaccggtttcggtgagaccaatgagaataatcttcggaaggagtcgggacccaaccatctttcccaccaacatagaacttgtatccatttgatatcgtaaaccctaaacccatcaacatcacaaacataaggtaaagatcaaacctcatgaccaaacccatctccgatgcaaaacgttaatcaaaccccaacttcttactaactcttttgaagtgagtgtgtgtgtgtgtgtgtgtttgcaacctcaagaggtgcttatttatggtgaaagtaaagaaaacatagccgttaggtcaagctttttgggctgtgcatcgattacctaaagaaatgcgaattaagtagaagcgttttggttttgctcctgtcttcttttgaacacgtctcgacatgcagtggacttaacggctatctacctttaatttttcactttctttctcacaaacaaacatttctcactcagatcttgtaattatttagccatcaaatataaaattgtaatcctttagtatttattattatttaaaacttacgttacatattgttttattttatatttcaatttacaaatcgataaatatcccagtgatacaataataaaattttagtgggcctttcaaatggattgggtatgttgtaagaaaggctttgcagtttcttctcctctacctttaaagcccaactattagtagaagactgaatcctttttgattgtcttgtagtttacacaatgtacacaatctttctcctaattttatactctttctcctctacttttaaaacatcaactactgtagttggacaatattagaaattgtttactttctataatgaggatttagtgggggtgaaggatctaattaaatatttgatgatcgttcctaaactgtgagatcgaaatatacaaatttctacttatgttttagtccaaaaaaaaacgtaatagattggtacaaatcctttttgaggaaaaaagaagttttaaggcgtaaagaaaagacctgagaatatgaaacctcaactaactaatttatcaattgaaccttccttcgtttataacagaaaaagctaataaataaaaataaaaataaaaatcagagagaccaaaaagaagtttcgacttgttcaacaattgagttattgaagaatacgtttgattgagaagcttcaacgaccgcaattgcccaaattcatcaattggagttttttataaaacaaattgcatcttaaggttgttattgttgttgttgtttatctgtctgtaatcatctttctatctgctgtctgatacatctacgaatcttatgctgtcttttgggttttcttacacaaccaaaaccaaagcctagttttgttttgacttcatttgaagcaaacctctttctttcttcagttatgtgggtttttgagctagactcgaatcagttctgatccagtcggattttgtattgagtcataaagaagggatttttgggggttgtgagtgatatgaagaagcgggaacatttgggattagggttcttcgagtggcagattatcttatggttatcgatttggttggcgatttcgcaacaagcgctgggattgagacctattagggagaaacctcgatcatggagtgacgaggtatgtgtgtgtgtttttactttattgatgattgttcgaaagtttcttcatttcgatgtttcccagaaacatatttttatgttttgttcgtaattttgatgtgcctttccaactaagaattcgagcagtttgctgtcaaatgttttttttattgacttgtttctgctcatgatttgctgaacgagaactggtcataattgatgattttttttctaagtctgagattttctgagtttcgaagaaaatggaccatattgaatgaaaatcccggagtagagcagctctgatctaagttttatcttttgatttgattgagcaaagctgaaaatgtatataaactatttacattagctcgattgagctcatcggtatctaagctttgttctgccggcgaatactttgagatgaataagaatgaatctgtcgttagtagtgtggtgtgatgagactacaata

SEQ ID NO: 6332 - DNA, 3000 bp, Unknown
  misc_feature (1)..( 3000): cDNA_ID_1814105_gDNA_ID_1621089_Annot_ID_55464 3000 nt of promoter + ATG
agagaatgctataaggaatgcctacagatcaacagatgccgtgatattgcagcagtcccttaagcttggtaaaggcggatcaacagctgtaacgggaattctaattgatggtaaaaagctagttgttgctaatgttggagactccagagcagtgatgtctaagaatggtgttgcgcatcagctatctgtcgatcatgaaccaagcaaggagaaaaaagaaatagagagccgaggtggctttgtgtcaaatattccaggtaaagctacataatttgttctaactagttatgcttttggtcttcttggattaagtattaacgttcctaaaatgttgcaggggatgttccacgagtggatggacagttagcggttgcaagagcatttggagataagagcttaaagttacatctgagctcagaaccggacataacacaccagacaattgatgatcacactgaattcatccttttcgcaagcgatggtatttggaaagtaagtttaatgactcagtatcttactctgtttctaaccgtggtttagccagtttctggtctacttcttctaacatgatggacgatctttaactgcaggtattatcaaaccaagaagcggttgatgctatcaagagtatcaaagatcctcatgcagctgcaaagcacttgatagaggaagctatatctaggaagagcaaagatgacatctcatgtatcgttgtaaagttccactaatcttctcttcttcttatcaaaagctattttgtctataagttaccatcaagttgcaagatagagaaatatatgctcaagctgtgtctgtaaaaacccagtaatgaggtttcccagaagatgtaatatattatcgaaatcgcaacagccttaagatacaaaagaaagaactgaaattaaaaaaatgaaataaaacaaatcgcaacagccttaagatacaaaagaaagatgttcttcgtagttgttgtcatcttcgaatctcctcttctctgcagaaatagaaaaacaaaggacaaagtatattgtcagctttaacatacaagcaaaaaaattgtggtggatcaaaggaattaatggaacttacaagcgcatgtgtggtctctagacatggggaagtcagaactgaaatgacactggtcggaaagagccaaaacgtctggcttgagtgattcgatggatgtggtcagaaactccatacaccggcaaagcctgcgcctctccttcccatgcttacggcggcactgaaccaacggcaacactctgcggtgggcggagactcctgatggacgaagaacatcttgcactgttctagcatcacgttcgccacgtctacacactccggtggccaaggacggtacactgcgtcggtagttgtggctgcaacaagaagacacatcattgcaaacgctactttcatcatcatcctagccaaaatgtagcaattgttgttgttttgtttttgtgttggtcttattttatctctacctaacgtaatcgtgacactatcttaacagaaaattcaacttagtaacgcatgcgagattttaatgctttcggccgcgtgggaactatctaaaatttaaatataggcgtttctcgtatttgaaattttaaatggaccattaatggccatgttagtgtatgtgtgtggtgaaattgcgaactacatacagataacaaaaaaaaaagaaaaaaaatctaactttcttacatatgttagttttggaaatgcgtaagaccatatatcacaaacttgaacaattgtgttttatgtataaaaaaaaaacatgaataaatgtgttattctaaactcccatttccaagacgattaaagaaaattgggttttcaatatcgaattttatgttaagttatgaaggatttaaataagttttagagtattttaattagtactgtatctgtatgtaagtaaaactacaattaaaactttgagaaaaaaaaatcaattatacagaaaaaaaaacattcagaatacgttagaagtgggaacctcaatgttactcgtaaccttaaatggtcaccgaccattgcgcggatctagttgtttttatcgtggacgtcaaaaaacccttttttaaaattacctctctaatcttttgacgggaactacacttcgttccaatggccattgttttctcttaatttttgtttaggctaaacaacaacttcaaactgacctcaaatatctgttacaaaagttctgaatccacagaggatttaacttaactaggcgggatagaatataatttaggatcatagttaacaaatgaaagagacacctttgtctttctatccgaaagctcatttaaacctcggtatatatgtaaacattactttgacctccttcacaatgttgagcagattacgtgtgttttgaaggattggttttagggctggccattcttcatctgcatttagcatcgttacaaagctcattggaattcgaggatgactttttgtgttgaagttggctacggttcccacttgccttttttctctcttattaaattgcccattcacgaggtattgtagttttttttgtttttaacaataattttaaaagactctttataaaaagaaagaataactaaaagacaactataaaattagacacctctcgtgaatgcctgaatgacccatttcgtattgatcaataacatgaagatataaagacgtaccaataatcatgtatattttacggattaatctgtgcttatatatatctaagtgataatctaatttatgtttgtgcttgtcgctagtggcttatgggtagcatttaagtatgggttagtgcttgtctgagttgtgtctatgaactcgagtgatcgagcgcacattccaaactgaacacacaaaaaaagcaaaaaaaacatctaatttatgtttcatgcttatatatatgattccactttcacaaaagaataagcacacaaaagaaaaaacaaaccaagaggaagaagttcactcggagca

SEQ ID NO: 6333 - DNA, 3000 bp, Unknown
  misc_feature (1)..( 3000): cDNA_ID_2104909_gDNA_ID_1621089_Annot_ID_55467 3000 nt of promoter + ATG
gagtcatgcacttacttattggtaccaccaccaacgtctcttatactctttcatgattctagatcaatttggatgattcttatttcttaacaacaattaaactgcagacgaagctgaagcttccattgttggaggacatagaagacgacatggatttctgtatgaagctagccaaagaagaaaacctcgtcttactaccaggagtggctttgggattgaagaactggataaggataacaattggagtagaagctcagatgctggaagatgcacttgagaggctcaatggcttctgcaaacgccatctcaagaaaacagaatcttcttttcaagctctgagcaatggcaaaatctaaaccactcatctatagagagactatacacaaccaaataaaaaatctgcaatttttgtggtgtaaaaaacaataatcatgtcattttcatataagaaactctatgtttcttaatcttatttctttgtttgagtcaagtagaaaaagacatgaataatgttgaatcaagactttatctttaccgttaaaagagacggacccactttgccgccgtcaaatttaaaaaatgcaaaagatttgtcttttactttctttcttcatcaacggctctctgatccacagtagccggagaaaaagcagagagctcaaattgtcggaattaagaatccccaaatcacatcttcaagaaccctaataaattcccagagattcctctcatttaatcacttcagattcgaaaaaagttctctctttttcccaaaaaaaactttctcatacaatggactctactaccacacctccttctctccgttcgaatactagatccgctttgcgtctagctcgaaacaacaaaactctcgtaaaatctcacattccatctctcgatttggttttattgtctccgaagaacaacaacggtactccttacccatcacctgtttctctcagttcaccatcttctcctgttactcttcgtgagattctccttttatctccttcccctcttcgtaaatcgagaacccgtttaagcaatcggttcgatatggaagctgcggaggctgctgtgacggcacgacggagtaagacgaagggagggcaaaatggtcttttggcctcgccgtcgccgaggaatttccggaggtcgagactaaggtcggaggcgatggtagatacaaaggaaaatacggagccaattgttgtcgtgaccgatgaaaagaaacaaaaccagaggaaacagaagaagttgggtcgatctaagaaggagaagcacagttctgttcctctgttagcttctcctagtccatcttcagatcaacgtatgtccttcctctgtctattagctcattcgatttcactttcgtgctctaataattgctcaatgatttgtgtaattcagctcaagatgtttgtcaaggtgatttagagcggattagagagaatataagcgatttgattatgtggagagatgttgcgaaatcaacactttggtttggttttggctgtatatgtttcctatctacttgctttgctgctaaaggatttaactttaggtaacattgatttctctgtcaaggtttatctttctagctttaatcatttttcacattcatgagttgataatgaaactttgtgtggtttgaagtgttttctcagcgatctcctatcttggacttttgtttcttggggtatcgttcttgtcaaatactcttcgccaaaggtacaaacttttaaggtcccagtacataaatatcagcttgaactgcagttgactgaagttttgatccatttgttaccataaagggttactgaagaagcgcggagagagcttaaattgagtgaagatgatgtattacgaatagctagacgaatgcttcccatcaccaatttagcaatttcaaagacgagtgagcttttctctggtgaaccagcaatgacactcaaagtagaatttacaaaactttgccattctcataaaacttctctccaatgaatgtgactctcacgttgattttgtccttcttacactgtttttactttgatttcaggtggcaccttttgttctaatgggagctgagtatggttacctcataacattgtggagattatgtgcttttggtatgattgttgaaacactatatgtcaacattactccaaagaaagctaaactgttttctttagttgtatctagtagaattgacacagagtatgcattgtttctttaaacaggtttcttccttagcttcactattccaaagctatattcatgttacgcaagtcagcttaaccaaaaaggtaaactctattaacagactgcgtagctctttgatggttccaatgattgacactaaggattctttgatctttgcttatgtgtagttgagtgtgcacaaaggagatttgttgaagcttggggagtttgcacacacaagaaattcgtagcaggctctgcagttactgcattctggaatctaacttctctcaagacccgttttattgcagtgtttatcatagtagtagtaatcagatacagacgacagaatctacagttagattccgaggatgaggaggagaagaagcaacaagaaaaaactcacccggagcaacaaaaatcgccggaggataagtcaacttcaccgcggtcagcagaagaagagcaagcgttggtgctagttgcagaaaccaaagcaccaaagaagctttattagtctagtcactagtgtcttttcagtatccacctgtgtaataatatttcacatttacgtaataataaataaagagcagtcattaatatcaaataataaattgacacgtgacaagctcatgaaactgtgagaagcaggtgataaaaactctcgtccgtcttgggagagagcacatcgtcgtcttttctttataaaccctaaattcccatttctcttctccaaaagttttatcgattccaccaaattagggcgaacgcgaaatctgggtattgtaatttgaagcg

SEQ ID NO: 6334 - DNA, 3000 bp, Unknown
  misc_feature (1)..( 3000): cDNA_ID_1814093_gDNA_ID_1621089_Annot_ID_55468 3000 nt of promoter + ATG
tcggtgccagtgcgggtaggacaagcggttgatgtggttggacaggcaggccgacctaagacaatcactgggttccaaacgcactcaacacctgttctccttgctgctggggagagagctgaactcgcaaccgagaagtatgttgttcctctaatccccttgttacattatcctactcgaaataaaactctgttttacatattggaatctaaaaaaactctgcttctttttgggtcacaggtacattccgttgtcgcccatattagaaggtttcgtcatattgaaggaaaatccagactacagagaggagtaaatccaaagttgcaagcatttgaagaaagagagagagcctttgaatactttcactacggttgtcaaaagttttttagtttattcccgtctgttcccaggaaatggttcacaatctctccttttaaaagaaaaaatagcttcattgcaatatataggaacttcttgtgcactactttaatatcgcattctaaaagctggataagtttccaaatccaattctcttaacctgcaactccttcaaatcaactcgttcgacgtttctataaacttggcttattgattatgggctctttggtttgctgccctggaacttcaagttcttggtttgtacgcactccaacttcaatttgtgacatgcaaaggctcctctcgttgtttccggatttggccaaaactatgtaatattattaaaatgttgaaagggtgacccagctagcccggctacatatttacaattttacatagatggcgtgcacgactcacttgtttcctcggtgtatcttttttttttttttttgaataagttcgttcccaaacataaaccagaagtataaaatcttattaaaattagcaaccagcaaaagcaaaaatcatgtacatgtatattgagggttttagtttctgtcactaactatatgaactttgcctaaagaaaaaaaaaacaaataatgaaataaatgaatggaatacagttttcaccgtttgttctggtatacatatggggtatatcgagattaattaatctcctccggccaggaaaaaaaaagtaaaaaaggaaaatttaatggccgcgacctcttggacttggacccgacgccaaacgctgaaaccaagaatccaccgtcgatttcatcttctccaccgtcatagtcgcacttccatctcccgatttttcagtaagaaccctccccgccgcagccggaaccaccacgtgttctacgaaaaacaacgacaccatcacaaccacaatcaaaacagtagaccaactaactcttctcatcgtattttactttctcttctttatgttgtaccgacaagtaataaaataaaacagaagccttttttttgtttgatatcaaagaaaattaagagatatggttatgtgggaaatcaaataaatgagagggaatatttatagttatttgacgaggaagcggtcatgacttgagagagttcatcacttaggtcgggttttcccggcgctagctcacgattttgcgtgttgaccaagtattatgacttgaacgggtcgctcttatgacactttacgatgtgccaaattacatttatacccattttggtggtttttagttttttagaggtaaaaaataatcaatgagaattttgttaacgaaattatatttacacataaattttttaaaaacaagtgttttattcgaaaaactaattgatgcaattttatcaagatgtttacgcggtaccaatgattaatttatactagatcatttgatagcaattgtatctttcaaagatacaattcttatttaagctatttattttaatagaatcacatatcaataaaatatttcaagaaatttcgcaatatatcataggcataatttcgttctgaaaagtcttatatgaaatttgaaacttaacgcgtaagttaccattgactaaataaaagtaccgtaggaggaccaattcacagtttcacttaaataattctcttgtcagtgtagtttgagtggacaataatccattatgagttaatgaaaaaggttgaaatgtaagataaaattacgtatcaactgcgttagtaggtatataagtagttagagaacaaagtaaagtgtttggtaggtggttttttcctatttgaatacttgaaaagcttgtgtgagtttgttgctaaatagtataaaatgtatacaagcatatgagtgttctttgaattcaactatattttaaaggactgtttaattataagaaaccttaaaattcaaaacacgagaatcttgacttgtccaaatttgaagaatagtcttgtattaaccaactttactagtaaaagtccaacggtaatgatattgtattcaaagtcatgcattttaggtaaccagagaattcttcagagttttgtttacaataacatcttcggattggatcaaaacagatttaaatagtttgaatcaattatttgttatcggccgtactcgaattcatgattttaaagaactcaactccttgataaattattaaacactaaccttgtaaatgtcccgcattttgtaacagaaaaacttaaactcgagcaagttttgcaatagtaacttttgggccaattataataaattataaaaagcccattaaggactaaatatttttaagttaggcccatctcagattcgtcacctctcccaaaacctctcatctagggtttttctgtctggagaacttagctcacttttgactctgtatctctctgtgtctctcttccccgttagtcttcgtcgtgacctttttgtagtattaagcaatgaagattaagacgttatcaagatcggttgatgaatacactcgagaaagaagtcaggatcttcaggtaatttttgcatatccaattcgtttcccatatcacaaaatttagctttagactatcaataacattatcaattcgtttccagaggggtctttcacaacttcgacccaagtcttcgacctatg

SEQ ID NO: 6335 - DNA, 3000 bp, Unknown
  misc_feature (1)..( 3000): cDNA_ID_1814087_gDNA_ID_1621089_Annot_ID_55470 3000 nt of promoter + ATG
tcatggcatcggatctccccttaccaaagaataatttcatactctagacaagaactgaaaaacttttgtataacaaaaagatttgtgatcttcaatttttgtttatggaggacatgtaccaaatcttgaaaaaactattctttaaaaagaagacttgtttaacaacacgaaatttaatgaagagggagataattccctataaattgtatattaccaaatttatcccaatctccacacatcacaagacagagatgctttaatcatcacccaataagcttcttaaacccagctttctgttccgcagttaatctcgctggaaacttgatattgaacttgatccttaagttccctttctttgtctgatctttctggagtggcattccctctttaggaaccacctcttcatactctggatggatcacatttgtgatcgggattgtaagtgtacggccatcaagggtcgctatgtttgcggtgtagcctgttaaggcatcagctagtgagactttctgtgtgacaatcaggtcgttgccctcacgggtaaacactggatggggtttctcgtcaatgatgaagactagatccgctggaatcacacctggatgctcattgcctttctctgggaatgtgatctttgtgcctttcttccacccgggtttcactccaatcgttagaatctcttccacttgcattgccttactgcatttaccagaagacagatattagatattgttaagacaacaactagggtcagctcaaatcaacaattaaccatatggaagctggggaatgttgcagaatctaaaagcttgaaactttgtttcatatatgttcatcatacttgggacttgggaggttgtatatttctaaaaccatgctctaggttgactagtagataagcctaataacaaaatgttataagtgtgatcgaaatggtatctgagttcaatcacttacccgctgacatctacaatctccctggagatcttcatcttcttggtggttcctttgtagagatcttcaaggctacaaggcaacttgttctcgataggagccactttcctagctgcagcgtgatgatgatgatggtgatgatgatgcatagctcctcctccacctgctccttcaccaaacgaggcatacatatcatcaccaaacatgcggctagcgaatctctgccctccagtgccaccaccaccgccaccaaacggggtcgagaacccgaaaaactcagcgaatatatcatctgcacttctcgggttgaatctgaaagacgaagatccatctcctgttgagaagtaggatgctccactagtagcagcattgggaggtggcacattcccttttaacccttcctcaccgtattgatcatatacagctctcttttgaggatcgctaagaacctaatcatctcacaacaaaaaccaacattagcctcataaaagcctgagtcaaatcaaacaatcttagtatgttcctcataatcctaagctacacattgacaagtacagagtgcctaagaggttctcaataatcaatcacagagttaagaaaacggataaatcatgactcagaagatcagcaaagaaagcacaaattaagagctttggagataacctagcttgcccaaatataaagcaatcatcttttactatatactatgattcgaattactcagggacacgaaatctaaaaaccccacgaaccaacacaacatcaaatcgtgaaatcagactaattgcatctcatatcaaaaatcagaaacaagttcgtgaccaccgacagtatcaagggaatgaaaatttctcaatagaaataaaaatcaaaactttagggacgatttcaataaagcaaaagcagtggaggaatcaaacacatacatcgtaggcctcagagatctgcttgaacttagcctcagcgtcttttttgttgttagggttcttatcaggatgccatttcatagcgagttttctataagctttcttaaggtcatcgtcgttagcgcttctatcaacctgtaaaaccttgtaataatcaactcccatctcaccttcttcttctttgtcttctctctttcgtttcttcacttttcctgaattcgattaaacaaaaaaaaggaattggtaatttctggatttcttgttcgtctcaggtctcttcttcttctttggcttagtatatctcgtggaaggttcgagaaaacacgatctttgtttgtctccgttgacggggaggtgacggtgttttaaatcacagctttgccatcttgcctcttcccttctccatttcttttccttttcttcttttattatcgctcaagtaattcagattctcccatttatattattaattataaaaacaattaaatgttatttcctctttcattatgtgaaggtatatgtttgagttcgactaatattgctaactttaccataaaagaacatgtcgactaagacatgtaacgtatttatataaatgttgctattattatgttgttcgaatttaaatccgatcgaattagttgcttcgaatttaaattgatcaaatgtaaatccgataaaatagatgtttttggagtcctttattttgtgattggctatatcgcccaaataaaataaattttaaagtgttgattatatatagagatgtttgccaaagacaaggtgttttatatagagaccatagtagaatactatggcccaatgaatagcccaatttattatgggctgagcccacaatggaattcttgatcgaggggtaatcttcttccgtataagtacttttttttatctgatagtatttattttttacagttgaacctttttgctacagttcctgaagaaaagcatagttcttctctaacgagccattccagagagacttagggtttacgcgagagctcataagatagaagctgctcgattcttccgagttttacgaatttcgatactcattgtttggattcgttgatttgatcaggtgatagtctgacttacaatg

SEQ ID NO: 6336 - DNA, 3000 bp, Unknown
  misc_feature (1)..( 3000): cDNA_ID_1814083_gDNA_ID_1621089_Annot_ID_55471 3000 nt of promoter + ATG
atatgaagattagaaccatacctgcatgttatcaagaaataatgcaatttgcagcgcgtttggatattctgcaaacttaatgtagatcatgtaagcaatatctagaaccaacatgtcatctggtcctggaagatacctggaaaaaaacatacaatatcaacgggactgataatgtgcaagataaccaagcaaagctcatgagagcttgtctcatatgaaaataacataattaagggtgaaacgccagtcgaatgaataagctaaacatattgaaattactttgctgcactcgtgagatagttgcacgtcctcctgaaatttgtattgtcaacatgctcaagtaagagatcaagatcctcaacatccattaaaaggtcaacagcttcggtttcggcattatgctgcaaagaacaaaagggaatccttcaaaaatgtgaacaaaacaagaggcgcaaatttcacgcctatcaatgaaacttatattaatatacaatggaccccttgttattacaagaaaagtaagaatgacaaggatctcaccttcatgtgaaaagaaacaatttgctgcacaagatccattaagtcttcaatagaggactcttcaccctgatataacaaaaagaatgagcattataaccatattcagtaacgagcccattgtcataatattcattaacaaaccataatatccatgacgttgccagaatatgagtgaaactcctcgagctaaagaacattgccaaagaccaaattgtttactaacctgacgtattgtatactcttttgcaatctctccagccaaattcctgacatactcgtgaccccacgatccgatgtcactctctgatccattcaacctatagtttaagctttcctgaaagagtattgcataacaaaggatcagcaacaaatagcttaagtcaaattctaccaagaaccacaaaacacaaatctggtaaggcatatcataagaggaaaacaaaagggaatctagttaaatgaatgtgaagcaaatagcaataggcaagaaactcctacaacagtagcaagaaagcataccctttcaccttcagcagacatggtcagtgccaggacagaaagtatatcagccaacattttctgcaaaaacgagtgcgatcttataatccagactcagtagaacgactaagacggtgttgatgagaaatgacttaaaatgtttgaaatcgtactttgagatcagactctgccatttttgcatgaaattctttaagaactccataatgagggcggagaaacttgaggggttttggaactgatgtcatggagcttgttgagtcacgaatttccttcctacataccaaaagagatcgatcaagattagactatgaaaacagtgaaagcactaaaagcagcaaaagaagtgtcataagcccattaaagaaactccaatagaaaattatcagaatatttgcatctaatcaaatcaaggatgggtttaagagatacaaaaactacctcatgctttcaagagcaatcttctgtaactcaggattggggtcctgaactctctcaacatagagctccagattctgctttagttgcaagtcctcttcagactacaataacatcatatgcaaattgagtcagctgccaatcaaaccagctaaaaccatagccatagtacaaaagattcctattaatttaactccatgtgacttaaaccctaacaagaattgtatcttcccagaacgagttataatgtggatttaaccaacttcttaacctcgctttctaaatagcaatgcgacattcacaatatatcagctaaaccgtacatctcggaaaatctacagcttaatcgtgagttttttccgatctccctggattctttctaactcagctaagcacgattccaactaataatcgaaatcgatataaagaaaactcaccagatcctcttcctttttatcatctttcttcttggaatccttagaaggaatcttcgtcgtagcttcgtcccgcttcgcaccaccgccaacactgttcggatccggaactggagccattgtaagtcagactatcacctgatcaaatcaacgaatccaaacaatgagtatcgaaattcgtaaaactcggaagaatcgagcagcttctatcttatgagctctcgcgtaaaccctaagtctctctggaatggctcgttagagaagaactatgcttttcttcaggaactgtagcaaaaaggttcaactgtaaaaaataaatactatcagataaaaaaaagtacttatacggaagaagattacccctcgatcaagaattccattgtgggctcagcccataataaattgggctattcattgggccatagtattctactatggtctctatataaaacaccttgtctttggcaaacatctctatatataatcaacactttaaaatttattttatttgggcgatatagccaatcacaaaataaaggactccaaaaacatctattttatcggatttacatttgatcaatttaaattcgaagcaactaattcgatcggatttaaattcgaacaacataataatagcaacatttatataaatacgttacatgtcttagtcgacatgttcttttatggtaaagttagcaatattagtcgaactcaaacatataccttcacataatgaaagaggaaataacatttaattgtttttataattaataatataaatgggagaatctgaattacttgagcgataataaaagaagaaaaggaaaagaaatggagaagggaagaggcaagatggcaaagctgtgatttaaaacaccgtcacctccccgtcaacggagacaaacaaagatcgtgttttctcgaaccttccacgagatatactaagccaaagaagaagaagagacctgagacgaacaagaaatccagaaattaccaattccttttttttgtttaatcgaattcaggaaaagtgaagaaacgaaagagagaagacaaagaagaagaaggtgag

SEQ ID NO: 6337 - DNA, 3000 bp, Unknown; identical to SEQ ID NO: 6335
  misc_feature (1)..( 3000): cDNA_ID_2132684_gDNA_ID_1621089_Annot_ID_170634 3000 nt of promoter + ATG

SEQ ID NO: 6338 - DNA, 3000 bp, Unknown
  misc_feature (1)..( 3000): cDNA_ID_3048184_gDNA_ID_1621089_Annot_ID_170632 3000 nt of promoter + ATG
tgaaatccattatactggggaaatatcactatgtgctctacttccttgttttggcgatgcaggtgagtgcaattttctgtctgatgactttttttttaatgaactaagtttatctactaacacaatacggtttgagtgtgtagccaaggatgatgctgacggtggatcagagcctgaagcccatctcggtgccagtgcgggtaggacaagcggttgatgtggttggacaggcaggccgacctaagacaatcactgggttccaaacgcactcaacacctgttctccttgctgctggggagagagctgaactcgcaaccgagaagtatgttgttcctctaatccccttgttacattatcctactcgaaataaaactctgttttacatattggaatctaaaaaaactctgcttctttttgggtcacaggtacattccgttgtcgcccatattagaaggtttcgtcatattgaaggaaaatccagactacagagaggagtaaatccaaagttgcaagcatttgaagaaagagagagagcctttgaatactttcactacggttgtcaaaagttttttagtttattcccgtctgttcccaggaaatggttcacaatctctccttttaaaagaaaaaatagcttcattgcaatatataggaacttcttgtgcactactttaatatcgcattctaaaagctggataagtttccaaatccaattctcttaacctgcaactccttcaaatcaactcgttcgacgtttctataaacttggcttattgattatgggctctttggtttgctgccctggaacttcaagttcttggtttgtacgcactccaacttcaatttgtgacatgcaaaggctcctctcgttgtttccggatttggccaaaactatgtaatattattaaaatgttgaaagggtgacccagctagcccggctacatatttacaattttacatagatggcgtgcacgactcacttgtttcctcggtgtatcttttttttttttttttgaataagttcgttcccaaacataaaccagaagtataaaatcttattaaaattagcaaccagcaaaagcaaaaatcatgtacatgtatattgagggttttagtttctgtcactaactatatgaactttgcctaaagaaaaaaaaaacaaataatgaaataaatgaatggaatacagttttcaccgtttgttctggtatacatatggggtatatcgagattaattaatctcctccggccaggaaaaaaaaagtaaaaaaggaaaatttaatggccgcgacctcttggacttggacccgacgccaaacgctgaaaccaagaatccaccgtcgatttcatcttctccaccgtcatagtcgcacttccatctcccgatttttcagtaagaaccctccccgccgcagccggaaccaccacgtgttctacgaaaaacaacgacaccatcacaaccacaatcaaaacagtagaccaactaactcttctcatcgtattttactttctcttctttatgttgtaccgacaagtaataaaataaaacagaagccttttttttgtttgatatcaaagaaaattaagagatatggttatgtgggaaatcaaataaatgagagggaatatttatagttatttgacgaggaagcggtcatgacttgagagagttcatcacttaggtcgggttttcccggcgctagctcacgattttgcgtgttgaccaagtattatgacttgaacgggtcgctcttatgacactttacgatgtgccaaattacatttatacccattttggtggtttttagttttttagaggtaaaaaataatcaatgagaattttgttaacgaaattatatttacacataaattttttaaaaacaagtgttttattcgaaaaactaattgatgcaattttatcaagatgtttacgcggtaccaatgattaatttatactagatcatttgatagcaattgtatctttcaaagatacaattcttatttaagctatttattttaatagaatcacatatcaataaaatatttcaagaaatttcgcaatatatcataggcataatttcgttctgaaaagtcttatatgaaatttgaaacttaacgcgtaagttaccattgactaaataaaagtaccgtaggaggaccaattcacagtttcacttaaataattctcttgtcagtgtagtttgagtggacaataatccattatgagttaatgaaaaaggttgaaatgtaagataaaattacgtatcaactgcgttagtaggtatataagtagttagagaacaaagtaaagtgtttggtaggtggttttttcctatttgaatacttgaaaagcttgtgtgagtttgttgctaaatagtataaaatgtatacaagcatatgagtgttctttgaattcaactatattttaaaggactgtttaattataagaaaccttaaaattcaaaacacgagaatcttgacttgtccaaatttgaagaatagtcttgtattaaccaactttactagtaaaagtccaacggtaatgatattgtattcaaagtcatgcattttaggtaaccagagaattcttcagagttttgtttacaataacatcttcggattggatcaaaacagatttaaatagtttgaatcaattatttgttatcggccgtactcgaattcatgattttaaagaactcaactccttgataaattattaaacactaaccttgtaaatgtcccgcattttgtaacagaaaaacttaaactcgagcaagttttgcaatagtaacttttgggccaattataataaattataaaaagcccattaaggactaaatatttttaagttaggcccatctcagattcgtcacctctcccaaaacctctcatctagggtttttctgtctggagaacttagctcacttttgactctgtatctctctgtgtctctcttccccgttagtcttcgtcgtgacctttttgtagtattaagcaatg

SEQ ID NO: 6339 - DNA, 3000 bp, Unknown; identical to SEQ ID NO: 6333
  misc_feature (1)..( 3000): cDNA_ID_2104909_gDNA_ID_1621089_Annot_ID_170631 3000 nt of promoter + ATG

SEQ ID NO: 6340 - DNA, 3000 bp, Unknown; identical to SEQ ID NO: 6332
  misc_feature (1)..( 3000): cDNA_ID_3092078_gDNA_ID_1621089_Annot_ID_170628 3000 nt of promoter + ATG

SEQ ID NO: 6341 - DNA, 3000 bp, Unknown
  misc_feature (1)..( 3000): cDNA_ID_3048192_gDNA_ID_1621089_Annot_ID_170624 3000 nt of
tgacacatttgaagaccaaatcttagtgttggacttagatcactcattcgcttacaacccaaggaaaccgaatctgaattatacaaactttcgcataaccatacatttaaagttcttttgatctctcagcttatgttgactttttaactgataatattcactaaaactgttttaactacaaaaaacataaacatggtattggttttctttgtatttattcttttgtcaacaaaagtcatagaagtatagaactaagacaaagggccacaacttgacagagacactctatattctaaaagcaacatttatacgaacggacacactgctttattcattcacagacctcaagggctattctttcatcatcctcatcgtttagccaccaccagagccatacttcttacccaacacaatgagctggagcttgtcatagccggccagtacaccagcgcctgcaaccgcacgaaggatgttggcacctgcacccttgaagagtgacttggccccttcgttcttgacgatctgagagaaggcctgaagagagctcttgtacttcactgcttcacctgacgtcatcatcattcttctgcgaaccgtgtcaattgggtaagacgccaatccagctccaatggtgattccccatcccagtaagaaactagcaaggaagctatcctgtacagattatagcaatgagtaaacagtaacagaggactcaatatgttgaagtgaggagttttctttgttttttacctggagaccatcaactagaaccacaggcttcaaggaatcatacaatccaaagtaaagcccccggtacacgacaattccaacgcatgagatgttgaaaccacggtaaagcccgacaatgccatcagaggctatagtcttcttgtacacgtcgaccatgccattaaactgccgctgaccacctttcttggccgccttcgcatcattggctaaacgggtacgagcgtaatccaaagagtacacaaaaagcagagatgatgcaccagctgcaccaccagacgccaggttccctgcaaaccacttccagtagccatctttttctttcttgaagttaaacagcctcttgaagtaatctttgaacgcaaagtttaaagcctgcaaaacaaaactatttgcttagcatacccatctcgacgtctatacaaataccacgtcaaagaagagaaaacaaacctgagtggggaagtatctgataacattggcagtgtttcctctccaaagagcaagcattccttcgtctttgactgttcgagcaaaacaatcactgattcctttatatggctcagagagacgcccagctttgatcatttcatcttgattctgaatcaagagcttcacacgctctataggcgcggctgccgtcttcgaaacagcagctgagactcctcccataaggaaatcgatcaagaaaccagtaccagttttctcactaggagcgtgagctaatacaggaaatgaaccatgaggtataagagacgagccaacgccatggctagttggctgcaatagactctgcaaacctccattgacataagcaccagagacacagtaaccacgagcttgcacactcggagaaagtctattgatcaagtaagattgtccatgtagcttctgaaagactgatggatgctttgatccatccattttttgtacaaatcagtaaaagctgactctgaaaaacaaaacaaaacaaaacaaaacaaaaatacaaattaaacaccacaaaatcttgctttctcgaaaatttctatatttgcatgcttaaaaaagaatgatcataaccaaaactggaacaaaaacagagaagacatcatcaacacatttcatacgatcctagttagcttcgttaaagacaccatttcaatctgtcaactataatgcgacctaattagcacaaattaaaacctagttgcagcagctcaattaaatcctctgtttctaaaagatcaagcaacgagtggcgtcgagaaaacagaattcacgagaagcagaacaaaaaaacagagagagctaggagagaagcattaatgataaagctagaacttctggagtcgagagcttaccgtggatttttcgccgaagcgttaacgagagagagagagagagctgtggaaaattgcgagaagagtaggtttctacatgattctcgacttctggtcctaaactaaaagacgaaactgagcagaagagaaggtacaattacgaaaatgctactggactcctttgacccgtttctttctgggcccaattttaagggacccgagtcttgacttcttctaaatggacccaaaatttattttcctaggaagataaaattcatacctaatgaaagtgagagacctctttatcattatgtgatatatgtctcatctacctgaaaattaaatatagaaaaatagaacaataatcaagacttttttggtttgccggaaaaatataatagaggcttgttaactaggtcttaaaaaattggatgttacttaagaagcaagaaagaaagttgaatcttttttttcttcttcagccggacagaactttacagatgcaaggaaggtgatgtggttcgaatttagtgatccaaaactagttagagaaatgttctacaaacaatgaaacaaaccgatacgtattgagagtaccagaatataggcaatgatatcggctcatgtattagataacaagacacatcatacatgtcatgcgatataaaataaactcgaattacatgcaataaccttaatatgtgtaggtagattatttcaaaagattcaagaaaactaaaagagaactcagctggaattcatccgagtaagaaggaaacatgagaactacatgtgttcattaaactaagccatgcataataaactccaccttagaaacgaattgattactatatatataatatatagatatagatttctcttcgtacacgaatcatatatatcaccttcgctagctagtgtactgagttca

SEQ ID NO: 6342 - DNA, 3000 bp, Unknown; identical to SEQ ID NO: 6331
  misc_feature (1)..( 3000): cDNA_ID_2132651_gDNA_ID_1621089_Annot_ID_170621 3000 nt of promoter + ATG

SEQ ID NO: 6343 - DNA, 3000 bp, Unknown; identical to SEQ ID NO: 6330
  misc_feature (1)..( 3000): cDNA_ID_3048196_gDNA_ID_1621089_Annot_ID_170620 3000 nt of promoter + ATG

SEQ ID NO: 6344 - DNA, 3000 bp, Unknown
  misc_feature (1)..( 3000): cDNA_ID_3092093_gDNA_ID_1621089_Annot_ID_170619 3000 nt of promoter + ATG
ctgcatgtcgagacgtgttcaaaagaagacaggagcaaaaccaaaacgcttctacttaattcgcatttctttaggtaatcgatgcacagcccaaaaagcttgacctaacggctatgttttctttactttcaccataaataagcacctcttgaggttgcaaacacacacacacacacacactcacttcaaaagagttagtaagaagttggggtttgattaacgttttgcatcggagatgggtttggtcatgaggtttgatctttaccttatgtttgtgatgttgatgggtttagggtttacgatatcaaatggatacaagttctatgttggtgggaaagatggttgggtcccgactccttccgaagattattctcattggtctcaccgaaaccggtttcaagtcaacgacactcttcgtaagtctatttcctcttctctactatatatacacaatgtgtcaatattaatgcatagtaattttgatttttacaagattttaagtacgccaagggaaaagattcagtgttggaggtgactgaacaagagtacaacacatgcaacacgacacaccccctgacttccctctcagacggagactctctcttcctacttagccactcaggttcctactttttcattagtggcaactctcaaaactgtcttaaaggtcagaagctagccgtcaaggtcttgtccaccgtccaccacagccactctcctcgtcatacctctccctccccgtctccggtccatcaggagttgtcttcgccggggccttctccaggagtggaaccatcatctgattcaaactctcgtgttccagctccaggaccggctacagctcccaattcggccggtttggttggtccggggatggtggttcttgtgattatgataagttctctgttttgaggggtttatatattgtcgctagtcattaaatttgtgagggtattaattactctaccattgagtttcatatttatgtgcctttttatttgtatgtttgaagcatcttgtaacccatttttaatgtttccgctgtctcgtttttgttcttactaaagaaaatatttaagatgtttttttgtattgattagatgcgaatgtttttattttgtgttttaattatgatcacactaatatgaatatatacgacgaatatgtagagttcacatagctcatgcaataaaacttctccacacaaactaaaatcttgttgaaacatataaatagatcttatacactttttgtacatataagaatggtttgaacaatttaactttaatcaatatattaaaccggtacaccgaaatccaatagagagaatatgtcaaggagttaacaaaaaaaatatactaccgccgtctgtggggatcgaacccacggcctcgtgggtaaaagccacgcgctctaccactgagctaagacggctatatgacaaaaaatttaaattatgttaattattgtatgtttttgcagatcaaattaccaatgaaatagttggtatttaggttgttaactcaatcataaagccgattgactcttttttgttgaagagcttgcctcttgttgtggatgtggctgttgtaagactaataccagcccttgggtcgaaagttgaaagtttgattctggatctctaatgtctctagtatggacgctcctgtttggaagtcttttgtttggaatatgatatagattcataaaaatgcgggtatctactaccatttgctattgaccatcaaaaaaacaacaaagtctcttaactatcttaaaattttattaggagattttcatgcgactagaacaagattttcaagcagtggatgataagacaaaactgataggccaacaacttgatgaaatgggcaatattatgaaataatacacaagtatagcttccacctccaaccacctaaggacctctaataaatttacccaccaaaggtggtgggactccgtcacagagccgtgcctcaaggcaaaagaaagaaacattcgcctacgtcctcaaatttttgaaaaaaacttaggagcatatatttttacaagataactttagtttcataggtttaatattgacaaatcacttacatttacctaaataataaaaatatagaattaaaaatagaaaaatattcacagaataaataaataaaacagaacaaagcattataaatttaggttaaagcattcgatatagaattggttaaaaaaattaactttgaatcttttgtcatatgacaatttatttttgtaaacacttttacttctattattataagcatctttgcttgtgaattggggcaaatttcatttggccgcctccggcaaccattgaccttggcacggctctgctccgtcacctcttatatttgctgcaatggcacagagaagagaaattagttgctggtgttgatccctaatatgtgctagttcatcatctacatgtccaaatctaaatctcatcccttctcctatcgcacggacctgcaagtgtagaaagcaaaaacatcaacatattttaataataattacaaaacacattaggttcttaaacttatcaaaactaattacttcaaaaaatatctttctaaaagttaatataccggaatttaatgcatttaaactagaattttttttctataaattaaatgtataataaaatccataaaataaattttaataagctcttactaattaaacataagataaaacaatattattaatttctcaacaatcaaatgtggatagaaaccaaaaagataaaataaactcggatgtcataggcccataatccagccttttctcaaagcttaaacgtaacgggctcggcccaaatttggtgtgttcatcatcttccccacaaaacctaattttgtttcttcagtagtactgtagcttcagatgcaactcctcgaaaacccgtagaaccggcattgagccaatcgtttacattctctgattcatatccttagcgttttcagaaacaaaatg

SEQ ID NO: 6345 - DNA, 3000 bp, Unknown
  misc_feature (1)..( 3000): cDNA_ID_2105819_gDNA_ID_1621089_Annot_ID_170644 3000 nt of promoter + ATG
aatcagtataagttttatttcatatatttgtatatatttgcaaacacataagtagagttatttttaataataccatctttctagttccttatttcaaaactatatataacagggttttagaaactaacaagaaaatagatttaggttaagttcttgatttttattttatttttttcctaaagtattttatatctttttttcttaagcatattggtagagagagacaacagtgttgataaaagaggggcagtttgattggaggaggttgaagaagcgtgtgaccgagaactttgagcttatgattaattattttttattttatttttaattttgccgccgtaatgttagtggactcattcatagtttcctttacgataacaaaataaatattgttggtcaattttaaaatttcaggtttctcaatttagccaaataattgcacatgtattataaatatatactcttacatatgcgggactctgacactaattataataggttgtgttaaatttgtaggtcaagccaaaattaaaaaaaactatcacgttatttcatgcgttcattatatatatatatatatatatatatatactttaccatattgatcaagtacgcgaaataaattcgtgttatatgcaggcccggcttagaggcagtgctggcagtgctttagcactgggtccaccatttttttctaatttttacaaagtttttagatctaaattttttgatatttttgcaataagggtccaaaattttaaaagtttgtaactaacatcttaaattttctgaaaaaaaaaatttgagcacaaggtccaaaaataatatgagccggccctgattatatgcgacaatttttttaagtctggaatatattatattattaaagtgaaatatgtgacaattacatatcaatactttattaaaaacaaatgacaattacatatcaataattagcttatgtttgcctagtatttgcattcaactacaaaaagatgaatttcatataaatcatctaaagagggagagaacgtggatggcataagatccacgggatcaataggcctaagcatctaaaaattatagagctagccctagctataagatcataatatacacaagtcacaactactctatatataatgtgtattatttatgtatattttgtgtgtgtcttactcctaaggccctgatcctacaatagcttttgaaagctatagaccaaccgaagagaggtaaaggagaagaagaaatctaatcaatttaaaaagaatcaagaaaagaaaaaagagagagacatgacttctaaaaatcttattattcgctttaagaacttcaacctcatgggaccactaaagaatcttttgttgttttaaagttttttttttttttttttcactttttaacttttcttaattgagaaatctactcaatctatcggggtcgggttacttttatcaatatgtacaatgattttctttctgtgtttgtgtccaaccaagccttattacaatcaatggtaacggacctttttttctatgatgtccctaaccatatttagaatcgtgtcaataagatttaaaatctccaaataagaaaatatgcatttaagattctaaatgagtcaaatacaaatacaaaagacctaagattctgaactcttgttaaccaaaacaaaaaaatgcagtaacaaaatatatagtaaagtataaaaatacataattaatttgcttaccaccaaccaacagaatgacaaacgaatcttaagcacacaaggaaacacaataaactaatgagaacaataactttattacatgattatgacataaccgtgtcctgatccaactgaaatccctctgaaaaaataattacttttaagttataaataaactggcgactaaatgttactactaaacgacgatcaaggagaaaaaatgagtcaaagatcttaaaaattaagcatattccttagttgaaactaaataaagataccattgcgaaaagtttgtccgcaaaaaataaaaataatgatgagtaatttacaagcttcattcattgatatgaaaaatctcaatctagacgtttcgggtttattgactacgtggactcactagacttgccattgacgcttcttcatgacttcatcactgaccaatagcaatagccaatagcctttctctctcgacacattcatgtgtgcagcagcagaaagaaatatcctctacatattccacgttgcaaagtgggcctaagacaggtggatcaggcccaatgactccaacgtcgcttctatgataaagacaagacaacatatccataagcgtgaattattagcattaatgattggtataaatgtcatagataataattctcaaaagctactctctagtctgtttatataaactgtttttgttttaggaccttgattgttacccgtgtagaccaatatgtccttgatagagactcccaagaacgcataccaactagtcttgcgagttgcgtgtttctaaatgcacaaagcctcaaccacaactagtccgagcacaatttggtgtgcaacccacaaagaaatgtttgggccgattagttgaaacagttgggccgggcctattaatagaagtgttaggcccatttattattctctttctctgtactgggtcaacttttctttcgccaaagaaatatcaatcaattcgtcacctttttgatttggggaatgtgacaaagcaatctgggttgtctgattatttccaatgacttccttctctgtctgattcgtttgtttcggcgattcaactcttcttcaacgccctgagagtcacgcacgagaattggattgatggtttttcacacgcaggagaggcgattcgttgtcttcttcttgtcccgttgacctgtttcgatctcagatggtgattatgcagcagctgattctaaattagggcatttaaatccgccttccaggtgaatttttgaaaagtaattaaagggtgttcttga

SEQ ID NO: 6346 - DNA, 3000 bp, Unknown
  misc_feature (1)..( 3000): cDNA_ID_2132692_gDNA_ID_1621089_Annot_ID_170641 3000 nt of promoter + ATG
tgagcgattgattttttccaatatttttttgtaaaaataaagtcacaaattaacgagaatgaagttaggacttaagatcgtcgcgttgtctttattgtgtatgtattgacaaaagaaacaaaaaagatgtgtgtgtacagcttccaataattacgagaaacataggaaacataatgacaaaattgagttttgtctacacctcaattattgtggcaggctctgaaataaatccaagattttccgaaacaccaagaaaatgagtttggttcaaagttcacagtgtcttcggtttttcatgttcatcattaatgggccccttactcggttactcccatcaattgtgtctagtttcaaaaatgatagtatcgatttttttgacattttttagtgggatgatagtatctggctatctctttatatatattccttctgtcgcattttatgaaatgttttaagttttttttttgttagtttcaatttattagacacttcataagtttttatttaaaattcaaatatatttaatattttatgatcatttatattatgcattatctcttatgattgcttgtactattttaaattgaaatactttttgtgataaaaaatttcttacgtgtgcatctcattataaataaatgagacaaagagaatataacataaagacataatacatatgctatcaaaacttttaacaaaattaggaaaataatttctttaaacaaattttattttagttttttacgaatatctatatattatctaagggtagctaacaaattaaagaaaaaatgattttaaacacttaatttataaaactaattcaaaggtaacgtcttgcctgtctttaaccatggactccccatttataggtttacgatcgctttgtaaagtttactcccctcttatggctagcttgctattttgaaaaagttgcaaaattgatcgatggactatgttactttttgtcctcattcgaatgctattgaaaaccacttgagcatgtaattaactcatattaaaattagtctaaattaagaatgtttatcataaattcttttatttttttgaatagacccccacaaaaaaattaactatgtatagagtgtatataaaagtaaaattaattgttttacattttctcactttataccacaatattattatttctgttaaagaataccacaatattttcagaaattaaaatatcagtatcagtatcactaccactcaaagcgtgcaacattgttgacagacaaagctattaccccgacaacgttattaagcttagattgatcctcactcatctggttttactctatcgtctctaggtgtagtctgtggttatatatgtgctaactaatatcttcagaaagtagagatggcgatagagtcaaacagactgagggaaatatatttgtgaatcctgagaaagtgagaagatattatacgatttttgttttgggctctcaaatctagaagtcatataaccgagcaatttggatagcggttaccatgagtacatatatacatagttacataccattatatatgtaatcgtacatattatatatagttgacctggtaattattgattgatatttggtacgtatacattcttacatattggaagtatattgtctctaacgatttaaataaaattggcctctcgtcacatatgccacattagcatgttaggcgtaaattaattgtggaagaattaatgtcaacttattaatcaaaatgaatcagtgtatctagtcttctctaattaaggaaaaactaatccagtattaaatcgaccaacccacggagttcaaaaagaaaactaattaaagaaaaaaaaaaaaggagttcagtataaagtatggtttctattgtttctcttattgaaaaaaatcaagataaaaacaaaataaattccgtaactaatttttccttgtagtaaaagttatatatgtatactcttgcatgctcgtttacaactttacatcatgctttgccaaccccttttgaatttgatatcaaatcagaaaaaaaatatttgacatattaaattaggtccatattatttttttcctaaatatatggccaagaataatcgatttaacacagttaacgtatgttacccattaattgtcaatactaattgttggcagcaaaaaaaaaacacattattgtaggtattataaataaaagtatgctaattaactttcttctgactttcttactaatatttttgatttaaaaaaaaaaattcaagcttaacttcatactaattaatcttagagtactattgtatctccaaattaaatcgtaccaccaagttttgtttaggtaacaatccttaaacggaaaactatgattgactttcttattaattttgagataccaaaagaaaatacggactaatctagactagcgatcgtagacattcataatttacctactattcacaaaaaaaaaatagtatctaaatgaaacggttattcgaacaagaagaaaaagaagggaaaagtttggtttgttttccctaagtggataacaatgaaaccaaaagagaatatttgataatagtgtcccatgagacacctcacaactaagatttcttgtaactttggtttttcttgaaacttcccaccataactaactacatatattacacaaccatggacccaattaatcttacaatattgtaagaaactctaacttgccatcttacatccttagctacatgcatgatttatattattgtatttccatatatcatataagctaatttcccactaactataaatatatacataattaaacctatatatgtatctacacacaccgatctccctctccctctccctctccctctttatctttctcttcctcctttgctaataaacttttctttgaaccttacacgccttgttgatattactctcttaaatatatattttcgtacattaacacagacatatataaagctaaagatttcttcacgtaatg

SEQ ID NO: 6347 - DNA, 3000 bp, Unknown
  misc_feature (1)..( 3000): cDNA_ID_1012673_gDNA_ID_1621089_Annot_ID_170639 3000 nt of promoter + ATG
atgcgaacccttgtgggatgaccacgagctgtcccttctgcacctgttggtccaacacgttctgtccgttgtcgttgaccacttggatccttccttgtcctccagtgcagtacaagatctcgttagcgttcatgttgtatttaggaagcaccatcgcattctgtaacatttgacaaaacatgtgaacacgtcatccgtcatatagaacttccaattttaatatgttttgctaaagaaaaaaaaaaggaataaatatctatcaaattcatttttaaaacatttgtatacgttcttaaataatttaggatatgactaatttttctttttggtaaaaatgttaatatctatatttaatttattaagaaaaatgtacttacaccctggagaacgccacgagtggcactgagcctgacatactccaagatgggcaaggtatagctgttgacgctggtcacgcgacctaggctgggcttgtacacgtcagcacgagcagggtcgtcaatgttctcgtgggacctcatgctgcagatagtctcctcaaggccgttgccctgtgggctacgtgggtgtctccactcctcgctctcgtagggctgtcttagaggtggcctcacgacctggaaaggtcccttaacacgaacgatgtttcctctgctgtcttgttggttctgaagctgctgagccaactgaacgtcaattttcaatgcttgagctatgacctgtgcgtcgaacccgctccacaagtttttctgttcttgttgttgctgtgaaccgccaaagcctccctgctggttgtttccggccaaatggaacacctatagcaaagaatcaacaaatgcaatacataaatgaattagttaaactgatatggtagatcttctaatagcggatgtgcgtctttgtatatagtatgagattactctagggttgcggtcgagttggttttggtagttggcgatgtcgagaagagcgatgatgacaagtggctgttctcctgagttgtagatccagtgggcagagcctggagtgttggcaaagacgtctccgcgtctcacatgttccaccttctggtgcatgtcacggaacccttgttgtccctgctgtccctgtccttcccatggttggccttgttgtccctgtcgtccttgttgtccctgttgtccctgtccttcccatggttggccttgtcttccttgttgtccctgttgtccctgtccttcccatggttggccttgttgtccctgtcgtccttgccatggttggccttgttgttgtccttgcatcggctgcgagtccatgaaggtctcggcacatccagggaccactcttccgctgatacccgttcctgtaaattaattttaggtagagaggaaaaaaaagagttatcatatggtgaatcgattatatcttcattaattagacatgatatatacattaattttattggaagggtaattatcatgtatgaaccttgaacgacgtaggaaatttttggggaagtgaagaaggtgggcaagtaaagaccgccttgttcaattacataacgagcaacggaaacaccaacacatcggagctgagggtggttgtggtcccagtactcgatctgaccggcttcactcttgatagtttcggtggcttggagaacatctaggttgtcgaggttacactcgttctgtagctgaggaggaaccccaagtgactgcctcgcaaggcagccgttaaggacgaggagaaccccgaaggttgcaacgaggagattgctgagcttaaccattttctttttgtttgttgtgagagatggatgaagagaacgggacttaggaggagtttatatattgtcaagtgagctcgtggtttgagccacgtaggattaggtttgcatggggacttcagtctaagctttttacacgtcactctgtgagctcgagcaagtgtctcttgatcttcatgcgcgtagctcactctccgcatatgtcaaaatacgacaaaatcaaatgtatctatctcattttttgcttcacgttatccatcaactaaatttatcattttattatcatcttacttacaatgttttaaccatgatacatataattcacttttaaaccggagaatagaatctaaatttaacaattaacacaacaaattagatcaccagtgttcacgtatattggcgatatgatcgaagagtttgcaagatacagccaaaaatttgtattgaagataaaacaaaagaacttatgaaaaattaaaaaaaaacgaggaaacaaggtgacacatgagcgagacgcggcgacactaggcgtgtttgatccattgtatatgctgcgacttgtctcgacaactgttcggttgcatgtttagcactagtagccaagacatgtgtcaaatatttccaacatgggcttatttaaactaagcccaataacttatattgtatttactagaaagcccatcaaatatctaatagcccataacgtgagcccaaagttcatttccaaaacggaaaatgtgacaccgtcccatttactccaatagaagtctgagcttaaaccctaaacccctttctccacgatcttccttttcctctctctgcgacttgaagcaaagtttccaggtacgattctcgccattttgattatgtattttgtgtaatgggttggtattgatcgattcctttcgaaaattttagtgaagacgtgaatttcggaggtgggtgagagttttctgctcggattttgctaattactcgttgttactgttttgattaggaagtattttgcgcagcttagcatgagcgttcgttaaattttctatctttactggctttgtgtgctgaatctgacttgattttgttactttgactgtttttgatgttttcatgatgaagttgcataattgagtagatgtgagtctggattttgagtgtatgtttgtgtagtttttccaccacacatgggttttgattaatcatgtattgggattgtttcagaaaaagagatg

SEQ ID NO: 6348 - DNA, 3000 bp, Unknown
  misc_feature (1)..( 3000): cDNA_ID_1814079_gDNA_ID_1621089_Annot_ID_170637 3000 nt of promoter + ATG
acccttgatggccgtacacttacaatcccgatcacaaatgtgatccatccagagtatgaagaggtggttcctaaagagggaatgccactccagaaagatcagacaaagaaagggaacttaaggatcaagttcaatatcaagtttccagcgagattaactgcggaacagaaagctgggtttaagaagcttattgggtgatgattaaagcatctctgtcttgtgatgtgtggagattgggataaatttggtaatatacaatttatagggaattatctccctcttcattaaatttcgtgttgttaaacaagtcttctttttaaagaatagttttttcaagatttggtacatgtcctccataaacaaaaattgaagatcacaaatctttttgttatacaaaagtttttcagttcttgtctagagtatgaaattattctttggtaaggggagatccgatgccatgacggcgtgtagggaacgctaggaagaaggcaccacaaatgacgccgatgacaaaaggtaaactggtaagaatctccttggtttcctcggaaggaacggggaataaacaacgggttacgttctgatcaaacatggagactgcgaagaagacgagcattgacatgattgcgtgaataaaatcaagaatcttgagcttatacttttccttctcctcctccgttaaagtaatcgatccatccatcactaatagcccactccacgttgccaacccgtacctaacctgcaacattaagtttggtgcttatgtcaacaagttgttatgaatggtacaaaacagcggaaaatgtgacagagatatgtatatataccttgccgtttgggtctctaatggagtcggtaaaggagaagaggaagcaggagatggcgcataaggagacgaggaagcaggtgagccagcgactggtgatggtgggacactgaccttgatgggttaggaccggacacattatttgaaaactcattacagaaccggttgggagcagatttgatagatgagctgttcctttgaatgttttcctcacaactctctctactttcgactttggttttcttggtgccgacggcaacgatgctatcaatgactgcttcgtctcctccatcttcaattgttttttcgttaatcactctgcaaattcgaatgattatatatgtttcttttttttgtctctatggttaattctgatttgaaagaattgcacaagattttatgggtttcgatttctttcttttttggtgtttgcttccgttgagttgtttgttcaggtttcaaggttgatattctgttcttccatttttatgtttctgttgcatgtcaggattagcaataaaaaacgtaaaaaccaaataacatttgagtaacgaaacaagaaataggagttttgtaacagaaaggattaaactaaaactctgtcaccgtttcctaagaagatatatcattatcaaagttacttttattatattgatatagtaaaactttgctaaactagtaaaaactagtttttcgaaaataatctagattagaattctccaaagacgtggcttaattctaatctgtctaacgtatggaccataaagaattgtattaaattggtctttgaacgaatttattcttcggctaaaagaggttatcggttgtgaagtggacctgcaatttcatttgtttgttcataagaatatatgaacgagaacttaggtgacctctatttcatataacttttacatactgcatactggtaaatcatatgaaatatggacttttaaaacgaaacaaaaatcacgtataaccctattagtgtatatagagtctctgttgtgttgagactctgttgtgttgagactctatatacactaataaaccctttttacttctttgttccatacgaattaagcttcagaataacagaatttaagagaatatcgttattaacagcaaaagtccaaaacaattaaaaggcagagtgcttgtggagacgtaaagggaatgcaaactaagaagaagaaaagtcattatcgttagaggaccaaagacttaaacattattggattaaggtgacatcatagtgcatagtgcgttgtaccatcgcgcaaactcgtgatattcgatcacggattaaagccatgatctatcattttctcttctttccccccttaaatctcgttgttttttcaaatcatagtgactgttgcttttcccatcgaaatgaaagtaatctaacaaaatctactgttagatcatgtttctccgaccaaccaaatttgaccttgtctacatatacacgtggcttcacaaatgcgcatcaagcaattggaacttggaagcatcactatagttctaaacttccaattaaaagattgttagtcaatctagggttgggatcataggtggctaagttttcggtttaacaaattttcgagatcatcgatataaaatcataggatatgtcctcatcacaatacagtatacacacacacataagtgattaagttatgcattcataacattaatccagaagctttatatgcagactcgaaaagtcaacataaatccagcattacatggcccatttgtctccatcattttgaccatcatagcatttcagttgacttggagagtgaccattggtccattctgtttcttttcaaatgaacaattaaatgtttgttcatttatcaaaaaaatattttttataaaattaccttatgtaattattcataatccgatttttttttaatatcactttacaaatttgtttatgatttatatgtacagtagtactttgctccgtaatcgatttcacatggatgtatactattgcctcctaattcttccaatatcggaaaacatgtctcacccatgtcttgtcacagtgctcgtttccctttttgcttctacaattccttataattaccaatccataatttcgttttattcacaaatccaaagcatgaaaaaagaagaataacgattccttttccaaaaaa

SEQ ID NO: 6349 - DNA, 3000 bp, Unknown; identical to SEQ ID NO: 6336
  misc_feature (1)..( 3000): cDNA_ID_1814083_gDNA_ID_1621089_Annot_ID_170635 3000 nt of promoter + ATG

SEQ ID NO: 6350 - DNA, 3000 bp, Unknown; identical to SEQ ID NO: 6329
  misc_feature (1)..( 3000): cDNA_ID_1814123_gDNA_ID_1621089_Annot_ID_170618 3000 nt of promoter + ATG

SEQ ID NO: 6351 - DNA, 3000 bp, Unknown; identical to SEQ ID NO: 6348
  misc_feature (1)..( 3000): cDNA_ID_1814079_gDNA_ID_1621089_Annot_ID_55472 3000 nt of promoter + ATG

SEQ ID NO: 6352 - DNA, 3000 bp, Unknown; identical to SEQ ID NO: 6347
  misc_feature (1)..( 3000): cDNA_ID_1012673_gDNA_ID_1621089_Annot_ID_55474 3000 nt of promoter + ATG

SEQ ID NO: 6353 - DNA, 3000 bp, Unknown; identical to SEQ ID NO: 6346
  misc_feature (1)..( 3000): cDNA_ID_1814072_gDNA_ID_1621089_Annot_ID_55476 3000 nt of promoter + ATG

SEQ ID NO: 6354 - DNA, 3000 bp, Unknown
  misc_feature (1)..( 3000): cDNA_ID_1814064_gDNA_ID_1621089_Annot_ID_55478 3000 nt of promoter + ATG
tactatggttatgaacatgagttcttgcttttttttttctttccatcgaatatttgttcatttggatgtctaatagtgtaagaaacagaatttcttagctgacctggatactaaattatgttctgaataatgtgtatctaggtgtatatcattgattttgggcttgcaaagaagtatagggatctccaaacacataggcatatcccctataggtgatttatggtgctttcatgttcctgtttatctacttcttttattttgttttaacttaaattcttacagatactcatgttgttttctttgcagagaaaacaagaaccttacgggcacagctcggtatgctagtgtcaacactcacctaggagttggtaagcaatacatagaaccactcgagaatttgctccaaagtcatatatacaattcctaaaatgtgtggatgtttgcatatctgttggcagagcaaagtaggagggatgatctggagtctcttggttacgtactcatgtatttcctgagaggaaggtttgtgcatacagatccgtttttgtctgactaaatctttggacatgtttgttctggtctaacttttctggattttcgggttcagcttaccgtggcagggactaaaagctggcacaaagaagcaaaagtatgacagaattagcgagaagaaagtatcaactcctatagaggtaaagacataatatggcttagataccattgactgaagttagatcagccatctcattgtcacataaatgaagggttaattgttctaccatactttaacaggtcttgtgcaagtcatatccacccgaattcgtatcatactttcaatactgcagatctctgcgattcgaagacaaaccagactactcatatctaaagagacttttccgagacttgtttatccgtgaaggtttgcatttgctctgttttggttattttttccctaagggacttcacagtacagttctgtgttgtgacattttgttataccaatgctttttttttatgcctggaattgctttttatctttgattgccctcactagttactgtcaaattttctagatattgaaatcttccttgatatttctataaatgtttcactcttttaacgaatggattcgcggtatcaggttatcagtttgattatgtattcgactggactgcattgaaacaccctcagagtagtgccaggtcccattccagtacacatgaaagggtgagtacacatgtctgtagatttttctatcgagtatgactatacatactcactttcgtttcgtattgatctcttcttcagcatcgtaccggtaaaccagggatgggtgcgggaccgtctgctgaaaaacctgaaaggatttcaggtaacccttgacttttttctacagttaagaatcatataactcttcttcgctaaacggtggtcggttctgattttgtgatcctgtctatgtcttacagtagggaacatccgcgataaattctcaggtgcggtcgaagcatttgcgagaaggaacgttagaggacccagtccccatcaaaaccataccagacatcgaactcttgacgaaattccttcaatgaaacctgctgtggtaaaaaataatatcatcatcttatatatatcaaaattttgatatattgttattacattatagaacgtgcttagtgattttaacacttttcaagaaatcaatcttgctcgttcttgatatatcaatttatttgatattgtcagaatatggtatctgagaaaggaagaaacacttccagatacggcagtgcttcgaggagagcagtagcctcaggaagtagaccaagctcatcaggtgaacaaagggagagccgggactcgagccgcgtagcctcaagcggtggcggtgtccgaccatcagtcttccaaagaacccaagcagcagctgctgtgagtggatacgagtcaaagacagcatctgcctttaaccgcgaccgagtagccgcttcaagaacagcacgagacgaggctctcagaagcttcgagcttctttcgatccgcaaatgaagccttcatcaattggctctttgctgtaaattggattcttctttacatatgttgtttggtcctttgtttccacgaaactcccaatttttcatgtattatcaaattctctggattttgtatcaatttttacacactttattgtaatcatgacaatttgttgagtttaattcaatgttacagttttaattttgtgttacatatgaatttatacctttaaattcgacgacgtcgtttccaagtgtataacgtgtacgccaactatcgtcgtttgaaaccgtcaagtttaacggcagcctccgtcggtgaccttgtcgtgacgcagggccttttcctcgctccaacatttaaattctctgaatttcgattgatcaatacggagtacgaagcacgaagatcgatttagcattctagttcatgatgttgaatccgacaaggtacaaacttgattgcttaaaggttatgtttttgccggaactgggacaatgtttagattgtattctcataagtctggtacttcctttaaaattggagtttttgtttgttggagaaacttgacttttagctacataagatttttaagggtcaattttgattgttgttagttgttttgatgaatttgtacagggatgatagtctataataggtttgctctgaatctggattgacccagagaaaaaaaagtgaagctttgtatgatttgttgtggatttatgtggaaatccggaggtgaagatttgcaaggtttctatccagttagagaagaatgtgtagcagatgttcccaggactcgatttaaatcaagggtttgtctttttcttagaccatctatgttcttgatcaatcaaatttgtttcaaagtttgagtatttcattttgggatatgatcaggctggtaaaactcttagtgctagaaaatggcacgctgcgtttactggagatggacatttggat

SEQ ID NO: 6355 - DNA, 3000 bp, Unknown
  misc_feature (1)..( 3000): cDNA_ID_1814174_gDNA_ID_1621090_Annot_ID_55484 3000 nt of promoter + ATG
ttcttttgaagtcaaatcccgagcttttgttcagttctgggtcatcaccgcggttttggatgaatcaaccagttcctggttcgagtatttacgatcgagtcaatggctctatgagcgaggccctgaagtctgttgttgtcaaggaaagtgaaagactctatggagaagaattagcagtaactgttcttgttactggtaatgtggagaaattgaataggttagatgttgggaacaattgggattttctagatgtgtggttgcatataggtgcatactcgcctttaggcccgttaggtgttggagaaaatgccgcgagtttggctttggttggtcgtggacgagatgtagctgctgctaaatactcagactgggttaggtattgtgcttgttgtgctcatttagctgattcttgaggatactgatagctcaatttttcagggatttagcttgtggattacttgagttttgttgtttctttcttaatctcggtatggtttatgatttaggcaggcttaggaagcctctggagaagtttagacctcctttgaccactgaacttcttttgtcaaacgatggtgatcatttgcttgagggctgcatcacaaactttttcgtagtttgccgcagggtactaacaaaaatttgatttttttttgttcaagcacaagtcacctatgttgtgattaggatgtttattgtcttcatttatgttgcattttagaagtttgaatttcattttaccactgcatgatttactgtttgatctcattttaggtgaagtcatcagagaatctctacggcgggagtttgagcgagtttgaggtgcagaccgcgcctataactgatggtgtgctagcaggagttataagagaccttgtcatcgagtaatatgttagaccattaagaatgttgattatattcgtctgtgtttatggcctgatcaaccaataagatttgcttttctgtcagagtgtgtttaagcgaggggattccataccgcgagagagcaccttcgtggtctgagcgtgagctttgggaagaagccttcattacaagtagatctttccatatccataatctgttttttcatcttctcgcatatatattggcctgaacactttcaatgtgttgtgtgatgtttgtatattttaacatcccaagaactcactgggttcaggtagtctgaggattttgcagcatgtagggacgatcaaagtacccgttggttcaatggagggattggcttgtaacaaacctgaggagattcaatggaaggagaaaaggtttaaggaaagacctgggatgatcactgaattaatcaaggtaaagcttgttacttttattacccttagaatcattggttttgttcttgtcttttgagtcaaatcaaagatagaaatcactttaaagtttttgtttgtcactgttatgttggagtagaaagcgataatggagagaggtattaaagaagggttcccgttgaaggccttttagtgctcttcatgattttgccaaatagctgaaatgttgattcgtctatggtttgtaattgtattgacgccaatatcttcccaaatcatcactcattataattttaacgatctgatgtttaaaaggttctcagttatatatatctgtataattgatcagtagaacatattatttaacggattttatggagatactccggtaacttattaaacagatctcatgaaagtaatcagtgtcaagaaatgtcaagactgtatacatatgttaatatgctaaaccacaacgactatcacttcccaaaacatggttatgatgttgatatgaccctccaaatccacaagtgtgtatgtgtatcaacgtcaaagtattgaatataaagagttgtgagtactaaaaataaaagcaaactaaaaatatagtccgtatggaatgcctttaaaactgcttgtagtggaggaaaatagaaatttggaggacaccaaattttccccctttttttttcttttttttttctagtaaatcaaattaattaatatcataaaaaagattagatgatatataagcatcttttttttttccgtaaatcaaattaattgatattataaaaaagataatggggtgattgacatcgcattgtcaagactttaaaactatttaacaaatgataaatcacattaattgacaccatgtatgttttggatatgtttgataaaaatagtttactagtgaaaaaaaaaatatgatccacacccgagggagtagatttaatttttttttttcttcagaaaatcagctatacattaattatgtattctgacttaataattggtcgggtttgcaaatcttttatttttttggtaaacatgtgaagaaaaaaatagaaggtttgtaaatctttcaatattgtttgtacattttccataaatctttcaatattgtttgtgcttcatcaacatatagtcaacacaaacaatgctacgctcttatgaggttctgcaatatgagtagcttggacgaggtttctgatcaatagatctgttataatattataaaacatatcgattctaacagattttcaatggatatataatccgataactttttagacacatctgatgagtgatcactgtaaaaaaaaatacaaaaaaatcaaaaccatgtgtatatatgctaaactacaaatataaaattaccacacttgtacaatatataataaaaataaacatcataatactaataattacgacactattggtcttggtttggtttatatgcacgactccggctttaaacaataaatccaggagcatgacacttccacgtccttggctagatctaagtttaagtcaacgatgactcatagtggacacgtgtcactcgttcattcgagttatccacgtgacttcttattacagtcttcttgactctttttttttttttttttttttgctgaaaattataaaaacccaaaatccaacaaactttgattacacacacttacatacaaca

SEQ ID NO: 6356 - DNA, 3000 bp, Unknown
  misc_feature (1)..( 3000): cDNA_ID_3048244_gDNA_ID_1621090_Annot_ID_55485 3000 nt of promoter + ATG
gttcactatatcaaacagtgttttgaaaacctgcaaatatttttacttgagtactgaaattgttttaactgtctcttgtaaaccaaaaaaaaacagatcgctgtggatgttgaccgtacagtagtggaactgtacaaattcctgaagaagcacgcatcaatcccatttaaacttgagaaaccggcgacacctgaaccggtgatctcgaccatgaaatctgatgagaagatcgagggtgatagttccaaggatgagttgtgatgatcggaacagagtgtgtaacaaggctatagatgatgactcttctataaatgatagaaaatgttttgccctttgtttttttccattgttgtatgctatgaaatgaataattaaagaagttttggtttctcaagtttttggatgtaactggaggtttgatccacacattgagtgttgatttaatgcgacttgtggttcataacaactagcacaaaagatttcttacgaagcgtagagaaaccacacaatttctgccaaaaccattgttatcatagatcttatggtttacaaaaatatgcaccttcaaagttcatatagaatagacgtaaataaaaatccataagagatgtacgagtttcatatggaagagacactgtttattagtctagatccaacgtgttctctcgtactatggattagtagagaataattcgttctcttttaacgagatatggttgttatataagatatagaaattgaaaaaagcatggtaaacaattaaatccatgtttttctattatgtgtcactgcggtccataggctggtgaacacctaatagtgtagcattgtcaatatttttctttaccattggttttaaagcttccccaccaaaactcgtcatttttacaaaaaagttgcacaacatgtaggcatctgctttattacaagttcatggcggcactagtctgcttcgaaccccttaacattgcttacaatgaggcaaagtttctttttttcccccttgtttttcctaatatgacaaaattgatcaataaaaaagtagttacaattgttacaactttttattgcaacttttagttaaaatagttataatttttattgcaattaaaatagttacaatttttttattttggttatgtttttttatcgcatattttcgttaaactaccgcatagtttggtaaattttttgtaatgattcaaatatttaaatatataattataataatttagtacataaatactaggccagagcattcatttatattcggtttgcttctttcggttctaaactctgaagatccataagaaaccgaaaaagttatggttcaactcgattcggttctaattattttatccaaaatattttctaaaaggactgtatctaaatatcggaaactttttttgacaaaattataataaaccaaaatatcagaaaaattaacaaaaattaattagattagaggtaaaaaaaaaatgtattggacttagttttgtaaagggttgaccaaacatttttttgttctattcgggtatctaaaacagaaccagaatccttttttggtttggtttagtttggtttttcaatttcggtttttgttcctagctcaatatgcaaaatcaatattattttgtagtttaatatataaatacaaaaatttgtcgaaaatgagtttcagggtggagttcatatcctagttccacataatagtagagaacacgaaagaactttgacttatcaaactttacatcaacatataaatctaatatcatataatatactattaaaaattctataatttatttctagagtccatccacacacgtttctgatatttgttttttgtttgtaaaagaaaaaaggaaaaaagaaaagtactagacatctcttttccgtaaaatatatactaaaaatataaatattttattagcatttcattatcttacctgcatttcaactatggcaaaagaaaaaataacagatttgaaaagaaaaaaaaaaggaaaagcattcaacgttgatagtatgtaaactaattgatgctctaaattagcgttacatttgttatgtaaaataagaaagtcaaagaagcagagtaaagattaggtgatacttgcaaagttacctttcttttccaaatgtaagtaacgtctcaagtttatcaaactaatagtttatgctttacatattttcccaatctataaattttatttgtaaacagaaacaaatgccttcgaaactcttgtatggaaaaattaaatccaaaaagttagtatattattagagtaaacactcataacagaaagatctttttcatactccaatatggaaaattttagcatcaaaaataacatttttttgttgttgttgccaatatatcagcatttaaaaaaaaaataaccattcgcaagtatagaaataataaagtctcagtaaaagtgaatgcaactacaagtctctgggatggcaaaattgttagcaataattctgtgtttgtagtacataaaataaaattgattaattgctcgttcttcttttattaataatccgtgttttgttttgtcctttctcttcaatctgggtttggtggggaggttttaagtcaagcgtgcgatatatatatcatcaaaacagacatcctctgttcttgcctcttcttcttcttcttcttcttcatcttcttctatatattggtgtttcatttgttctgctttaaaagtacacaaagattcatcttttttcggtcctctgattgggcaaaagactagctcggtcgtgttttgaacaagagatacatgttttgaaaaattcctcgcaaaagaagagaaagaaagactcaaacttttgtttgaatttgataccattttttatatatataccaaaagtccaagactggtttcatttttgggtttggtctgaaacctctcttcgtgttgtttgttcatggtatgtcttaattagggtaaaaaaatacttgattgttttctctcaatcatc

SEQ ID NO: 6357 - DNA, 3000 bp, Unknown
  misc_feature (1)..( 3000): cDNA_ID_1814170_gDNA_ID_1621090_Annot_ID_55486 3000 nt of promoter + ATG
tctcttatcaacaattacactatataagccaaaacaatgtattcacttaggttttgaaataacgaacctggaagtgtgcactattaagacatttcccaatctgtgtaaacagaggaacaacacattgctgaaactcagagggctctgtagcatccaagacttcttccaactctcccaagaagagaacctccttttgacaattggtaagcggccaaaacttcaacaacccgcggatcacagtatcagccaacttataatctttctcaacaaactgtgtcacgcaatacgccaactgctggtggtaaatcgagatacctttagacttgtgtagtggcaaaatagctttcacaagatacagcctatgctcctctctcataggtactgtaaaaccattgatcacacttcctaagatctccaataactctccaatgccaatacacctttcagtctcatacaagaacttgtagaaaatgttataaatcgaacatctgataaacggtcggtgaaatataaacttgccatagattctatgaagaacagttttcaaatactccctctccctaggatcctcagagtcaaacaaatcaagtaacctcgagacaaaggtgtgattgatgaactttttcgcagttttaggttcgatttcggaagagactacataccgcaaaagaagctcgtaaacgagctgcaaatgaggccaccatggctcaagataaggctcttcttcttcaggatcattcccttcaggaggagcaccagtgttctcatggtaagccggtgggagacaccggaaaatgttagcagaaaccatacgtataagctcactctgcatcgtctcattgactttaccagaagaagagtgaaggaaatcaaccaattcaaggagtgtctgtcttttgatctctttctcgcgtggcattatcaaagtatcagagaaatcgcagtggcaagaacacatgtgagctttcttcatgaagagaagaggtcgatctgaggaagacacgtcttttaacaatggaagtacttcgaggatcggtgttgttgtgaacattgggtggtttggtgtctgtgaaggagattgagctgttgtctgagattctccatttgaaacagaggatggagcgggtgtggtggtacggctgccgcgaacgacggtgttggtggaggtattgttgttgttgttgttgttatcttggtgatgttgatctgatttgttgaatttcttctgacccagttttatgattttgttgaacatcttcgattccgaatcaaaatgtaatcttttcttgaaatgaaaggaaaaaaaaagattcttctgtgagagaaaacgaggttaatctgtaaagaggaattgaaacgaagaagatttgatatatgtgattacctctaaagcgatgaatggagggagaaactgagatcggagaaatgcattattaggccaatgggattgtggaagaatgttcttcaggcgaaaccagaaaccgatacaagattgatgtaagaagaatgaaggaggaggaggagatcaaattttttggggagatgtatttttaaccaaacgatagataatttgttgttaaatcattgttttatccgagtaaaatgtatattattgttttgaattttctcatcattaaccggaaaactttttaagaaaatgtatatatttaaattgcataatcgaataatagttaaatataaaatgcaatttcataaaacaaaaattatgattgttaaaattttgagaaacttcaaaaccattttctcataccctttacattgtagaatctaattctctaagagcattattaaagggggatattagggagatattaggagattcttagattgtaaatgattaaatttaaatgttaattaagcaatttagaggctctctaagctaagaggtcctcttaaataaaatgtagtggtgatgtgacatgatttggttggttgggaataatattaaagccgaattttttttcttgccattaattcttctactatgtataatacttcataatatgatagtaaaaaacgaacgagatggttacacttactttgatgtctctgaattcttacaaccagaatcaactagaagtgcacaagtggatttcacctattctacatatatgccttcaaatctcgagaatatattggaaactcgaactcgaattcgtaatcgacaagcacatcaataattaaaatttgatttggttcaatatatatagaaattttttagcagaaatcaatagttaaattttatgttttcatgtatgtttttttttttatatgtcatctatgtatcgaatattatgaattgaataataattaagtttttaaaaaataaaatatttatatattttatcttttaaatatattttttttaagaatcccaatttaatatattaccattgagcttgccaaaaaattaaaatcttaccaaaattcttaataataaaatttcacaaatttattcattaaaaaaaaataaaaaccttagctaatagactaccattaaggatggtctaacattcttcttgttaaatcccttaactaaatatatataggccgaagcctctttgttgggccaagaattttgaccatctgaccaatatggtccaacaaagagaaacatctatggtgctgtagtgtctgatttgtaacattacaaaacaatggaacaaggaataaggtttttttttttttttaatccagtacttttatgatctatgagtttaaaactaaaccaaactctagtttttttctagactcaaagactaaaagtctcattgataactttcaacacgcgtcatgcagcttcattgtctagctctacatgcaaacatcccacgtgtttccactctgcatgtatctccaacactttcgttacctcaaacttatgtaattcatctttataaattacacacaaagccagcgattctctagggactcagtaaggccacctcaaaacaagacccatcgataacagcgatcatg

SEQ ID NO: 6358 - DNA, 3000 bp, Unknown
  misc_feature (1)..( 3000): cDNA_ID_1814140_gDNA_ID_1621090_Annot_ID_170679 3000 nt of
cctgtatacaatctcttctcagctgtaatttctataatctcgtcaattatcatctattcaggggtaagctatgggatgtgcttcttctcttccaggcaagttttgttttctctctcaattttgttgaatttgttgtcgttgttcgaataaaactgaggatttatagagaccctcgagcaatttcaccacccattttccgaaggtgtaatcatcggggttgaattagaagcttttaaaaattggggattttgatgattggttagggttttctggtggagaattggagaaaccgaattgattgttggtgatttgtgtgttttgtgaagcagataggaactctggaactttaagtggtcttagcaattcagagaatgctgttccagctgatgccaaaaatctacgtgtgaaggttttttttttttagtttttagtctcgtttaagaatgttgatctcgttgagattgctttgtttcttcactgattcctgcaatttctaatagcttattagaaagttcatgcttttgtgatctgtggtcttgcattatatatgattgttcacattttaatccacgcatgttgtaagatgtgataagcctagtgaagcgcttttgaagaaacatacactctttatagaatggtagtagcaaaacctcaactttgttcttaataattgacggttttgctttgcaagctacttttgaaactctttttctattgttaaggagatgattccttttctttcaccttttattttcttgttgctcagcagtattttgccaagtgtggtataattggtttcaactttgcgtaagacataccactaacttttggattcacttgattgcagttagttctattaggagactctggtgttggtaaaagttgtattgtccttcgatttgtacgtggtcagtttgacgctacatctaaggtaagtaaagccttgttatctaattgtctttattgaccatctgacacctttttagaacaccatgctctgatgtgagtgaatattagactattagagtatacttatctgccactagatctcaagactactagctatgtatcaggtaactgttggagcctcgttcttgtcccaaactatagcattgcaagactctaccacagtgaagtttgaaatatgggatacagcaggacaggagaggtattaaacccttcatgcagatttgtattgcttattttattagataaacgctttgcaaacttactaggatttaacctgcattcactttatttttaggtattctgctcttgcaccactatactaccgtggagctggagttgctgttattgtgtatgatataacaagccctgaatcgttcaagaaagcacagtattgggttaaggtatgttttcagggggttcaaaaggttccatttcgttcatgtttctaggattcgtgcaatagcttccgagctatatctttaccaggactgaaaattagagttacagacagtcatatagccaacagcactcctgtctgtgtatataatgggtatcatttagttgggcaactggtttacttctctgacatttttgttccattaatttgcactcgttgctaccatgaagccatttggcacaactccgtgcaggaaagatatcaacattatattgaatctagtgctattgttttacccctgcccataaatctaacaggaactgcaaaagcatggaagcccagatattgttatggctctggttggtaacaaagctgatctacatgaaaaaagagaagtacctactgaggtgagtttgcgtaaacgtcttcatctagattccgtagcgcattttgttgtcactttcattgtccttgcttcttcagtggtatcacattttcaatttcttaacaggatggaatggagcttgcagagaagaacggcatgttcttcattgagacgtcagccaagacagccgataacataaatcaactgtttgaggtgtgcacttctttcttgcctctgatttatgatcgattttcttgtcctctgcatttattgagatcttattatccgtttctttcattgctttggaattggaggatggaaaagtgataggcagtgatatgcagctagatatgagatttaatttcttgtagtttgtggaggataatagttttggatgcagaaagatggattaatacgaagtatatgagattttaacttgttgtagtgtacacatgtctgataggaaattggcaagaggctacctcgtcctgctccttcgtcatgattggagtgttgaatcatctcatcttcagccatgtcttcagactactaatctttccatactttttaatgtaatgtttcaaaacaatatttctctatctgttaagtcaagtgtgttgtataatgtgaagatttgagtttgaaactggggatattacgaacctcaaaagtggaaacccaagttatatcaagcaatggatcatcagtacatattttagtgggattcatcagaagtagagaagagtaaagcttcattcaaatgattcaatgcatgtatagtttgtgggagagactattgcagccaattctaacaaaacctaaatcaagaaattatttgacaatttcaaagagactaacaaacaggtagagaaatccattatacaaaggatttgacttttgatgatttcagatgcaaatacaaacttaaaaactttatatatttgtattggtcaaccttaatatcataaatttatagttgaggcaataaataaatatgaaaatctaaatgcaatgtttaaatattaaaatttaacggcaaaataaaatagaaaaaattatgattggtctgaaaatggacaaaatgagacttttcatgtccaaataggtgtttattgtcacgttgatgagaagactatttcgttccatagcatttctgttcctcctcttggttttttgggtttcttcttcctcgtcttggtttcgttaaaacccttttgaagccctctggaacagtaaaatctgagggatg

SEQ ID NO: 6359 - DNA, 3000 bp, Unknown
  misc_feature (1)..( 3000): cDNA_ID_3048229_gDNA_ID_1621090_Annot_ID_170678 3000 nt of promoter + ATG
gcctatttcagagtttatttaactaggaagatatgacaaaatgtatagacactgaagtaagccacgcttatgagttctatatctagagaggctaggaaatgttttggtcaactaacccccaaaagaatcacgcagaagccttgttagcttagaatctcttgttggtatatgagaactgccttcagctaacgcatttatgcattttcccagggatgtcagtgaaagattgatgaattttgcttcttcaatcatgtggccgtcagttccttcaggaaaacagcatataactcacaatgaaactacttgatataacatgaatggttattatatgaacaggtaaggagttcaaaccagatttattaattctttcggaaccagcaagatcaacaattagtagtttgctctttctaactctaggaatggctttatctcccaatgattccggttttgccttctcagttttttcattcatagcacgtctaacgtaaacctgcaaagaatatacatttcattaatcggcaggtagaacacatggattttgttgatgaacaagaaaccatagagaccaaaatatcctaaggaagcacaccgtaagaattgcatgactacgagaggattctgtattcatctttgtatttgctgcatgacggtttgtctcaccgacttgcaaaacctgcaagaaatggtctaaatcttgaatgttaactactgtagcgcctggtactgatacttccccagtctttgcatcctcattgattgaaatgttgtttttctcaggtgcaagaagatcttgtatagtttccatatatagctgtgaattacaagaacaagtaaagatattagaaatggttcttatatatgctctagaaccatttccatcttctgtctatgaatgttcaacaagaagacaaacatctaagcactagagtgacacctgcaaataggagatctcgacggaaatcgaagcagaagatgcgttgagaagtatatcctccagagctctaaccataataccacgctcagctgcatcatctttaccaatttttccaaccgtgtaagttttacctgtgccggtttgaccataagccataatggtaccattgtatccactcagaacaccctgtaaattcaatgtagtagatatcaataaccaaaagtattacttcttaacattccaataagttatataaacatcagacactttctaacctcgacgacaggttttgctactccttcatagacacgcttttgcgaagctgtgtctgtaaagacttcatcaaatttgtatgactcagagttccagttgttcttcctcaacttaagcctctttatctgtacacacagaaacaaaacaaaactttgtaagaatataactaacacagagttgaaagagagaagatgtgattagtgagcatctaataactcacttctggttgtaactcaacaagatcagcaaaatcagcatccgagataagctcctctccgtttcgaggtcgaactcttacagagactcttaccctcccaggatcttcatagaaaagtatgaaactttaaaaacagattatgccaattagtgcattttatgaaagtctaacaatgcaccaattcgaatcaacaatctctgaatcgaatgtagaaaaagtcaaatactttaagaaattgaaaaaaaaagctcatctttcaattgtggaatcatacgggtgaatatgaagagagaaggagaaaaaggacagaccattgtcgtcgtcgaagtctttcgattgagatcggcgaacgggagtgccggagcggcgtgtggagggagaagaggcggagacagaggacgaagaggaggaggaggaagcggagggtcgatctttaaggcgagaagagtgtgctattccgggagcgacgatagaggttctagcaggcaaattcaaggaagaagaagagagagataccgcgtgattgctgttgggaggcaagtgctgctgaattcgctccgccgcgtgtttcgccgacgatctgacggcggaggaggaatttgacgaactcattagctggagtcttcacgaagcacgaaagggcaccgagaagagaagagaaagagagtatgagacaacaaagatagagagagctaagagaatgtttcaaagaagtagaagaagaagagaagagggaggcacgactgtgatgaaaatggttcccgcgttcgtggattttattcggtttggtttctccatttggtttggtttggttaaggtcggtttcgatattagcggttagcggacaagaataaattttaagaacattacaagtgaaagtataaacgtttagcgggtccaaaatgtgtatggaccatatcgataacaacgatacaaaatctagtaaagtggatcccctattaatatatgggctcatctacggtatcaacatctctaaacatagtgatttgtcccctgatgacagaataaggctccgaatggtgattgtgttttatggtacgagagaagtgcggtgcggttaaaatagtaacaaaaatacatagatacatatgtatgagtagagattttgatactattacagcactgttgcggtgcggttttgggtgcggttttggtcaccattcacagcctaagaatcattaaaatcattaaaatagtgtaagagattttgataatcgtggtctggtcggcttcaacttgcataaactccatatttgtaccagcgacacatatgttcgtatcgttttcttgctatcatgttggtacatacactcttgatttctttaatgcaacccaaaaaaaaaaatctgactttatatcgttgcaattttttttcatatgaaaacaatgtttaaaaatgaggcccatttctaagcccatttatacagaatgaggcccattaggtgatttaataatcttctccgccgtgttcttccactgcggtggactatcgtcgctatcacacggtgcaggaaaaacaaacggagaaaggtcgatcatctcttgatcatcgtcc

SEQ ID NO: 6360 - DNA, 3000 bp, Unknown
  misc_feature (1)..( 3000): cDNA_ID_1814148_gDNA_ID_1621090_Annot_ID_170676 3000 nt of promoter + ATG
gaaataacatcctcatctagtggaaccatatacaagggaaactctttcactgtaaccaggttatgcactttttcttgctcaagaatctgaaaatagcagaatgattttttttatcacccttattcaaaaaagtaataaaacaagcaaacgaaagcaacaatagtattagaggacgcaaataaccacataccttctcacacgcaacagacctacgaggaacaaagtaaacatagtagtctctctgaatcgcttttgcaatatcattctgaatgtgagacgctatgaatttcataaagctaagttgagagcgaacaagataaaccacttttgtgcattcagtctgaactggttccgcagtaagatgtcgtaactccaaaccaagttcctgttaagcaaagaacaacaaaaaatcaaatcaccactaatgttaaaaccaaactcaacctttaaaagaaaaacgaaattaccttaagcttagaggtcgggatgatcaatgagactgaaccactgagctttggatcaataaccaaacacttagttccacgaacctacaaccaaagacaccaaaaagaagagaaaacaaaaaagtcttgagaaatcggtaaatcatctccgaagtctattcatcctaatgattctcaatcatacgacattggtgaagtaattgcatagaaaagagaagaattcatagtaaaagagagacaaagcattggtttttattttcacattctcaaaagagatatgtttgatcaaatataatccgcgaaatttcctaactttcgtctcccaacccaaaaaaaaaaaaaaagatagagtaatgagacttacgtctttaagcaagtttacgagctccctctcagacttgtccctgaataagaaacgagaaacatatgatgtgagaggaaagaagaagaaacgatcaatcaatctctaagtaatgaaaatagagtcacctaatggatttcagattgagaggagcattctccaagctggggatctgcgccatggacgatgatcaagagatgatcgacctttctccgtttgtttttcctgcaccgtgtgatagcgacgatagtccaccgcagtggaagaacacggcggagaagattattaaatcacctaatgggcctcattctgtataaatgggcttagaaatgggcctcatttttaaacattgttttcatatgaaaaaaaattgcaacgatataaagtcagatttttttttttgggttgcattaaagaaatcaagagtgtatgtaccaacatgatagcaagaaaacgatacgaacatatgtgtcgctggtacaaatatggagtttatgcaagttgaagccgaccagaccacgattatcaaaatctcttacactattttaatgattttaatgattcttaggctgtgaatggtgaccaaaaccgcacccaaaaccgcaccgcaacagtgctgtaatagtatcaaaatctctactcatacatatgtatctatgtatttttgttactattttaaccgcaccgcacttctctcgtaccataaaacacaatcaccattcggagccttattctgtcatcaggggacaaatcactatgtttagagatgttgataccgtagatgagcccatatattaataggggatccactttactagattttgtatcgttgttatcgatatggtccatacacattttggacccgctaaacgtttatactttcacttgtaatgttcttaaaatttattcttgtccgctaaccgctaatatcgaaaccgaccttaaccaaaccaaaccaaatggagaaaccaaaccgaataaaatccacgaacgcgggaaccattttcatcacagtcgtgcctccctcttctcttcttcttctacttctttgaaacattctcttagctctctctatctttgttgtctcatactctctttctcttctcttctcggtgccctttcgtgcttcgtgaagactccagctaatgagttcgtcaaattcctcctccgccgtcagatcgtcggcgaaacacgcggcggagcgaattcagcagcacttgcctcccaacagcaatcacgcggtatctctctcttcttcttccttgaatttgcctgctagaacctctatcgtcgctcccggaatagcacactcttctcgccttaaagatcgaccctccgcttcctcctcctcctcttcgtcctctgtctccgcctcttctccctccacacgccgctccggcactcccgttcgccgatctcaatcgaaagacttcgacgacgacaatggtctgtcctttttctccttctctcttcatattcacccgtatgattccacaattgaaagatgagctttttttttcaatttcttaaagtatttgactttttctacattcgattcagagattgttgattcgaattggtgcattgttagactttcataaaatgcactaattggcataatctgtttttaaagtttcatacttttctatgaagatcctgggagggtaagagtctctgtaagagttcgacctcgaaacggagaggagcttatctcggatgctgattttgctgatcttgttgagttacaaccagaagtgagttattagatgctcactaatcacatcttctctctttcaactctgtgttagttatattcttacaaagttttgttttgtttctgtgtgtacagataaagaggcttaagttgaggaagaacaactggaactctgagtcatacaaatttgatgaagtctttacagacacagcttcgcaaaagcgtgtctatgaaggagtagcaaaacctgtcgtcgaggttagaaagtgtctgatgtttatataacttattggaatgttaagaagtaatacttttggttattgatatctactacattgaatttacagggtgttctgagtggatacaatggtaccattatggcttatggtcaaaccggcacaggtaaaacttacacggttggaaaaattggtaaagatgatgcagctgagcgtggtattatg

SEQ ID NO: 6361 - DNA, 3000 bp, Unknown
  misc_feature (1)..( 3000): cDNA_ID_1974108_gDNA_ID_1621090_Annot_ID_170674 3000 nt of promoter + ATG
acagcgtgagatacctcaatgaagactctcttcatcggcttctatctaactgccctgttcttgaagatctattggtggatttacttttgtcagacagcatggaaaagctaactgttgttgtcccatctttgcagattttatcactctttatacctcattcttatgagatcgatgggattgtgatagaaactccttctttaaagtattttaaacttatagaccataacagtaagagtcactactgtttggttaagaatatgcctaacctgatagaggcagatatagatgttgaattacatagcatcaagagtcttattggatcaatcacatctgtcaagcgtctttcaatatgttcacaggtatcattttctcaactcattgtttagatatgcatttgctgataatttttaatattgcgcaggctatgtatgatggaggttttgtcttcaaccagcttaaacatctgaagctatgtagatgcaaagggcattcgtcggatttacttgtccgactgctcaaagattcttctaacttacaagcactagacctttccgaaatggatgtaagtttgttcgtcaaactcttttttcttgtctgatgcacattatggttttagtgtaattcttcttctgtttgatctgtaattcttcttctgtttgatctgtaattcttcttctgtttgatctcagtatcatgagaatcatgatatcctttactggcatcaaccaagtactgtccctgaatgtatgttgttgagtctccaaactctcaacttgtcggcatatagaggaacaccagaagagagagatcttgcagtgtatttcttgaagaacgctgttcacttgaagaccacaacaatcaagtcatgtgtttttgatgatgaaagatttgacatgttaaaggagttggcactttcttctagagcttcaacaacatgccaactcgtgtttgattgagagtatttgatcaccaaaacaaagcttgttcttcagttcttccatgtccccgggctcgtatggtttgtcttcaacctgaaaatttgttttcgtcaaccatctttttctatgttttccgttttttttgtatgtgataaaaactttattctatatgttgtccaccaaaaaacaaattatgttgattggagaagttatatgataagttttaatcgtttatggggttttataggtgtgtagagatatatacataccttgtgaatgaagaaaagagaactagctctgtgttgaaaaactgaaaagcatttgatgccctgataatttctctaaaattattaaaccgaaatactaatacgatccaagtggaaccaaccaatttcttaatatctaaaataccggaatctaaagagtcgaaccaaaccgaaccggaatgtcctctaatttttatttttaaacccatgattatgacatgcactaccggcttagtggtgatgtttggcaacatggtttattcaattctcactcgcactgagtgtctgtggctcataaatcatttaccttttcaatttctcaattccaaatctaaaagtcgtcaaaaatggctctccgatctgtcaaaacgccgaccttgataacttcggtcgccgtcgtctcctcctccgttaccaacaagcctcactctatcagattctctcttaaaccaacgtcggcactcgtcgtccataaccatcagctatcgttctacggttcgaatctcaagctgaaaccaactaaattccgatgctcagcgtcggctcttacgccgcaacttaaagacacgctggagaaactggtgaattcggagaaagtggttctgtttatgaaaggaacgagagacttcccgatgtgtggattctccaacactgtggttcagattttgaagaatctgaatgttcctttcgaagatgtgaatattctggagaatgagatgttgaggcaaggacttaaagagtattcgaattggccgacgtttcctcagctttatatcggcggtgagtttttcggtggttgtgatattactcttgaggcgtttaagactggagaattgcaggaagaggtggagaaagctatgtgctcttgatcctgatttcaatacttggtttttgtgatgatggaatttgatcttatctatctatctatcacctgggaaaaaaaatgtgattttgatgtttcagagtttgtggttgtaacattaagagacatatattgtatgatggatttaggtatacaacagttggagttgcttggaatttgagtttcctttgtcatatgtgttggcctgcaaatttgtgttgtttgttgaaaggtttatgtgtgaagtagtgctagtagaatctaagtttgtttctgactaagagacatgaagtcatgggttgttatgctcattcatatcctgattgagatacaatttaaagaaacttagttccaaagattctgaacattcaccggtacagtgtgtctgcaaatggtattctgtctcacttcaatgtctaaacacgttgtctcaaaatgtatcgtttgttagatactcctttcaagacatatgatttagcctcgcatgtgttcgttgatccaagttttaccggtttgataagtctccagtcttagcaataaatccagaccggattcatgaccaatcgcagatttaccggtccgggtcaagttttaaaacattagtagaaatgtgtttcaccgaacaggaagacttatctgatagcatctcgttgcagtggataaatggcaaaatagtaatatacgtagattctgcttttatctgaaccacatagtgcagatggatatcgaacagaagaacatgatatcgagaagacacgtggcccaatgaaaaagccacgcaggctctgtatagccaattgcaatctggttttagattctcatctcacaaatcttacttatacgatcagtctcccacattcacacttccaccaaacacctctcgtccacatctttctcctttggtggcaaacacaacgacagatagagagaaacg

SEQ ID NO: 6362 - DNA, 3000 bp, Unknown
  misc_feature (1)..( 3000): cDNA_ID_2175376_gDNA_ID_1621090_Annot_ID_170670 3000 nt of promoter + ATG
aggagacgacggcgaccgaagttatcaaggtcggcgttttgacagatcggagagccatttttgacgacttttagatttggaattgagaaattgaaaaggtaaatgatttatgagccacagacactcagtgcgagtgagaattgaataaaccatgttgccaaacatcaccactaagccggtagtgcatgtcataatcatgggtttaaaaataaaaattagaggacattccggttcggtttggttcgactctttagattccggtattttagatattaagaaattggttggttccacttggatcgtattagtatttcggtttaataattttagagaaattatcagggcatcaaatgcttttcagtttttcaacacagagctagttctcttttcttcattcacaaggtatgtatatatctctacacacctataaaaccccataaacgattaaaacttatcatataacttctccaatcaacataatttgttttttggtggacaacatatagaataaagtttttatcacatacaaaaaaaacggaaaacatagaaaaagatggttgacgaaaacaaattttcaggttgaagacaaaccatacgagcccggggacatggaagaactgaagaacaagctttgttttggtgatcaaatactctcaatcaaacacgagttggcatgttgttgaagctctagaagaaagtgccaactcctttaacatgtcaaatctttcatcatcaaaaacacatgacttgattgttgtggtcttcaagtgaacagcgttcttcaagaaatacactgcaagatctctctcttctggtgttcctctatatgccgacaagttgagagtttggagactcaacaacatacattcagggacagtacttggttgatgccagtaaaggatatcatgattctcatgatactgagatcaaacagaagaagaattacagatcaaacagaagaagaattacagatcaaacagaagaagaattacactaaaaccataatgtgcatcagacaagaaaaaagagtttgacgaacaaacttacatccatttcggaaaggtctagtgcttgtaagttagaagaatctttgagcagtcggacaagtaaatccgacgaatgccctttgcatctacatagcttcagatgtttaagctggttgaagacaaaacctccatcatacatagcctgcgcaatattaaaaattatcagcaaatgcatatctaaacaatgagttgagaaaatgatacctgtgaacatattgaaagacgcttgacagatgtgattgatccaataagactcttgatgctatgtaattcaacatctatatctgcctctatcaggttaggcatattcttaaccaaacagtagtgactcttactgttatggtctataagtttaaaatactttaaagaaggagtttctatcacaatcccatcgatctcataagaatgaggtataaagagtgataaaatctgcaaagatgggacaacaacagttagcttttccatgctgtctgacaaaagtaaatccaccaatagatcttcaagaacagggcagttagatagaagccgatgaagagagtcttcattgaggtatctcacgctgtgaagttgcaaagttttcagagagggaagaaatgccattcgaggaacatccaagcgaatctcgccacagagttccaagatcacaagcgatttgcaggtatacaagttactcggcaatatgtttggcttctccggatatgaagaataaataacctccagctcacgcaggcagtgagaaactgctataacaacccacatcttgatattctcaggtgtgcattttgaatcaattaagtaaagacggaagctttctataaccggagctctatgtaatggcagatttttgtcaagaaaacactccaacctcttgcattcagaagaatctctatgaccatacttaagtttaggcaaccacatccaaagatactcccatcttttcgacaaaatgctagtggatacagcaattttgttggaacaaacaataatatcttaataagcacttcatcagataactcactgaatctatccatatcttgaaacccgaaaccccaagttactgttgttactgtcgacagaacttgggaccctaataagaaagaagataacatctttcaggctcataaagctaaagaagccaattagtaaacaagtgaaaactcggacacaaagaggaacagtactaaaccttagaaacaagctagattgttaggtgaagctgagaaattttcagtgcccaaagaactgtatatccttttcaaatctagtagaatggtagtctgaactaggaatcaagaaagggtaaatgtaaacgaagcttgaatggtacatagcaaggaaaaaggaatatgaacaagttggtttatcagaagataccacaatcgctgagcatcggaacgacaaagtgttgtcctcaccgttgatactcacactggccactgacccactcatcaaagcgttcggcgtccatttaatttaggtgtttaattaccataaacgatgggcctggttatgggcctaacttttatgttatacgcccatttaacttgggtgtttaattacaaacttgctttagcgacgactttgacgagaaatgagaggcccaatataaaatacgagcttgcttaccaaaatttgagacccaaatagtaaaccaatctcctccagaatgcaagtggacacaaatccccaagagaaacagaatcaaaatctcaagaaaacctattagccctgtttccagcaagagggcagagaagcagagagagagagagtgtgagagagaaagcagcttcttcttcttctcctcctcttctcccttatgtggatttcaaatccttctctgctactctctcttcacatttctctaccaacattcttcttctgacactcaacacacacactgcaacttccacagctaaatctagcaacaccaagtcaaaatccgccactaacgatg

SEQ ID NO: 6363 - DNA, 3000 bp, Unknown; identical to SEQ ID NO: 6357
  misc_feature (1)..( 3000): cDNA_ID_1814170_gDNA_ID_1621090_Annot_ID_170667 3000 nt of promoter + ATG

SEQ ID NO: 6364 - DNA, 3000 bp, Unknown; identical to SEQ ID NO: 6356
  misc_feature (1)..( 3000): cDNA_ID_3048244_gDNA_ID_1621090_Annot_ID_170666 3000 nt of promoter + ATG

SEQ ID NO: 6365 - DNA, 3000 bp, Unknown
  misc_feature (1)..( 3000): cDNA_ID_3048256_gDNA_ID_1621090_Annot_ID_170659 3000 nt of promoter + ATG
atttgttcattcgttttctgagattctatatcaaataatagtcagtcatcactagaaaatgctcaaacaactaatatgattcatacacatttcatatcatatgcttggcaatattggaccgaacttcatgatttttctgtccatgaatgcaaatgtgttgtgatctctgagttacatctcaaaatgtgaacttgacatcatattctcgttcaaaaaaggaagataagacaaaacatttaagaaacatttcacaatcatagggggcaaaagatcaaaatttaaaatttcggacgagagtggaaactatcaatctttaaggggatgatttggcaaaagtgttgtttttatttttcttttactgttttcgttttatcatctttcaacgtctttctctcccgacggccaaaaaccccaattttgccaaatccaattttacacccagaaaccctaattttccttactttgatttgattttgtgatggacgattatacaagagagatgatggatctcaagactttggtcactcgaaccctagagaagaaaggtgtcctcgctaagatccgggtaaattccctctacttctctaccatacattattcgcagaaatttttgagtggaaatgagaacagagaagtgattcgtttgaaatacatacattactctttttctagggttcctgctattcagatcgaaatgctcgatattgttaattgcctatgcatctggaatcttgctgatagtttatttgtgtttgtaggctgagctccgtgcaagtgtgtttgaagcaattgaagaagaggatagagtgatagagaacaatgaaggaccgcctccagctctgttgggaagctgtaatgatcgtgcaaggaagcttcatgcttctccttcaggttttttcttcacaagtttttgcttttatccttttaaatctttcctctatgaatggtttggttctaaatggcatctcttggtttgaaatttttgttgaaatgcaggaaggttactatctgcgttgatttgtgaatacttggactgggcacaacttaatcacacgctcatagtttatcaacctgaaagcaatttggtaatcaatataatcccgttttcttttgctatgtttcattaagaagattgttgatgaatttttctcactaatctggtgaactcctgcaaaacctattcaaagccaaaagattcgtggaagtctgagttacgcgactttaatagcaacaatggttttgagctcaatagaaatggagatagtggaccactccttctcgatgttcttgaagggttcttgaagtttgaggtatttctttctttttttcccctgaagatgtttgcagccaagtgtgaaacagaactttactatctataacttcttctcttagtttacaatctttacaaccatactctaaacaaattacaatagtccacctgtagtatgtgtgatttatgagttgtagtgttaacagttcctattatgtaagtgaagatgatcaatactttacacccaagctttacaaacaccaacttacataaaatcttggtactctgtcctcgcaaccaagagaagaagttatagatagtaaaattcagttttccaagaaaaataaagtctcttagtagagattagagttcttcagagatttgaaaaacacgtttagcaaatttcctagcctcaagttctcttcacatctaagaatcatgtttccatcctatcatagttaaaaccattatcatctgtttttgccgtatgctcctcagatgtagtgatcaacttttttttgtaatgaattttttcttcagagcatgacgcagggcatgggtagtagttcaaggagagattcagaaacagagtcgtcatcaagccttgagtccagaaatcctcctcgcagatcatctgcttctgatagcttacctcctcaacgaaggtacacatatcttcaacttcttattattatgccaaatcaaagatcgttactcttcgacatgattgctttatttaccttcaaataaatgggcaggccggtttctgcatctcaagcatcgggtgagtcatcatttccctagtttcttgaagtattggttgaaatacgtatgcttcattattttttgataccaaataaatatgacaagatgttacagatagaagagccgggttgtctacatctgggtacagaaaagatgaattcaactggagacaaggtaaccaagatacacatgaagaggtaacaagagcttcagcggcgctggaaaatctacagcttgataggaaaactcggaacttaacatcgtcttggaggtaagctttcaaggaagtctcattgaatcccacattgaaatgaaaacaaagcaagttgtggtaaatctgatccatcgggcttgcttgtgttgtaggaatgtgagggatggaacaaatgaagaagaagggagagattgatttaggctttggataaacatttcagcttctggattagtagagtaatggtttgtgtacgtgatatatgtatgtttctcctttatttgcaactgcgttttcaattagccttttttttaacgcacgaacctctgtctccttgagaacaaaaaacatgaaacagtaaaatgttttcttttgagatttgttatgggaagagaagagttcagaaagaagaatcaaagaaagcacaatgtggttgaatattttcattcacttgcttcttattttagtgtctccaaaattattatgtctctagtaataaacaaggtttttgaatgatgtgttcactgtttgttttactcgtactttttttttgttttccctttagtcttctctctctctctcgcttcttcgtttaaaactttaaactaaagtatcgaagaagccaactctggatgacgcaaaagcttctctcagaacggcattgtagaattctccggtgaccaaataatccgattgcattagtagggaatctgttattttgatctgatccgtcaaattggcggtaagaacaatg

SEQ ID NO: 6366 - DNA, 3000 bp, Unknown
  misc_feature (1)..( 3000): cDNA_ID_2105807_gDNA_ID_1621090_Annot_ID_170686 3000 nt of promoter + ATG
acaatatgaacgaatgattttagtatttaactttcgtcctcatgtagccatgttgttattttcaaaccataaagaggacttaagagtcgtcagataaaacaatgatattttcgtattcgtcgatgcactaataaccaactcgattggacaacatatcttacttcattcacgattttgatgatttcaccgaacaattttttctttctttctcttttgtcttttaattatgtcattttcttactggatatgttcactggtcgagttgggtcttggcctaacacataagatatatttatgatagacatatcttttttttttatctttttttgagttcaaagtagacttacatatgtcaaaatccgagactcccctaactcatgaaaaaagtgagacgaattcaactactttgccgaatttacctgtcttagaaaatcaatcaaacccttgagttgtttgcttgatcataccttctcttctccttgtcactttcactcaatacaattgacacaaatcatcactcgggaatcaagacccaacacttttgtcttggttgtcaggggctgggttaaatactactaggcccagtatcagcccacgtaatgttcttctttactgttttgtctatgctctagtttttgtttatacattttctttgtattcctcattctcctaacaaccctattgcctgcctattggtatcagaatagaccaccactgcacgagaaaaaacctaaacttgatcgcgaggaaaaaattgtgtaactaaagtggtcgtggagcggtggaggtaaaacattactacatagtactgttacaaaacaatatcttgtaataattaaaataaaagataaagtagtaaaaatattatttttttgtcacatcattacaattttcctaatttatgtttagaccattgctgtttggcatactaaaggtataagaaagacacgccacagagatccagtggtatacaatttttatgctttggaatcaacttatttgctacaatgacaaactaccaaagtttatttaattactttacaaaaagaattatttggataatccaaaatcaaagaggggaaagttggatttacatttccgattaacattttaacgtaaaaaggaaaaatgtgaaacataaagtgggcaactggacattcacggcaacagatcaaaaacccttttttaaatcaactacttagtaaaagaggaataaattaacagattatcacacacactgattgataaattaggagcaaattggttttaacaattcaaaagaaataaacaaagcactaagttagttttggtgctgacgagagtggacggcaaaaaaaacagaagatcactattaagaaagttaaagttaatagtgcaaaatattaatgtagggaaaaaaatgactacaataatgttcaaagttaaaataaaggacattttgttggcaagaagaaaaacattagaaacaaaaacagaacaaggcaaagctgcaaagtcaagttgagtcggtgaaagagaacaacaaccaacctttaccccactgccatcctccctagttttgaacatgtgcactttcttcgttatttaccatcacttttgtgttgtcatattcatcttcttctattcagagaagacatttagccaaaatttatgtaatttccgagattaagaactggttttcctttgtttgtcacttcaaaccagtgatcaacaatgaaaacagtaaatgttacagtggtctataccaagattctaaaagttgaaaagtggaagagggcatgctaatttgaatgaatacccaatatttaagattctagaagctcctttttatctatatatatcaactaaatagtcggcatgaagctctcaaatacttggtccacctatttatagagtacacaacttttttggaaacagctaattggaaaactctgtattatttagggtttggtactagttccttttgttgtgcaactatcaataaataacatataccttctattgataaatccaaatccaaactctaaagtgagtcgctgaaaatgaaagtagtaaaattttgtggcctctcatctcactgtattcatatttcgtttgttgagtgccgactctactatccacctattatgagattcttatgttaaaacttacaaaatatatttacctagattttgtctttgtccatactcttccatgtctcgggatcagaacaaaacaactagtttacgtgcttttttggaaggtcttatagtagtaataccaacagagctacagataatggattaaatacatgtaaccaacaaatgttatattacttttataaaataattataaatcaatgaaaaaaattccttatgaatcgctaaattttcaagaactcaaaaccttattcggttttcataatgagcaatgatgaatacatgttatacgtcgaattattattttggattctcaagccggccctttgctatcttattttctcctttacaacattttttaaccccattgtcaaagagtcggctttgagcccatgattgtaatgaatggatagcttgaatattgcgaccacactaataattcccgtcaaatatttgtttaacttaatgtatgacacatgtattttacgagcaaataaattcaaaaaatttaagcattagcgaaaacattgtttctccgctccacaagacactaaaacataaataatgaattaaatcagtcattctacagaaaattaatcaccgtagtcggttgccatcattccaaaaccttaaaaaaaacccatgtaaaatgatcattaacaacaacaacaacaacaaccaaaccaacaaaaattaaagtaaaaacagagtccaaagcctcgtcacatctgcccataaatacccttcaccgactcaccatcttaccacatcaattctctcatatctctctctcactttcgaatatatcttaagataacagagacacatactcttaagtttggtgaagaataagaagacaatg

SEQ ID NO: 6367 - DNA, 3000 bp, Unknown
  misc_feature (1)..( 3000): cDNA_ID_2175403_gDNA_ID_1621090_Annot_ID_170684 3000 nt of promoter + ATG
gcctcaagatttggttgcatctaagattgctttgtggactacagtaagtttttttttttcacccttcctctgcttattacatgaaagttgggatgattttcactaaatttggtagctagccaggtgaggtcatctaagagtttttttccttgccttttttgcaggttgttaatccatttaccaaatatcctttatcaagaaatattcagagacttttcatttatctctgtaattttgtcataagcttattcataatataaactgaaaattgtgtggccttaatagaaagaaagcacatatgctttgacattatctccagttgcaatgagtcttgaggagttaataccatcaaactatgggaagtcacgtttctacgcaatcgccattagaagtgcattagccatctctactctgctcgttggtcttgcgattcccttcttcggtaaggacaaacgaaaaatatacatgtaaagaaaataagtgtcacttcttttgacactcagaattcttgcaggccttgtcatgtcactgattggatcattcttgacaatgctcattgtaagttacacatttgtttcatccttttctggttatgtaaagcaaattctcatattgcagtttcatagtgaatttgcttagcctgacaaagtttctggacacagacgctgatactaccgccagcttgtttcttgagcatcttaaggaaaaaagtaacccctactcaggtatggcctgctcacttactgataaccaaaccgaatatcgaaattcctcaaactgaaatcgatataacaatctgtggtttgtttgcaggtgacaatctgtatcttaattatgacagtaggagcagtatgttcagtcattggcacatattcagcccttgcaaagatcattgagaagttgaacacctaaaactgatcaatcttgagattcttattttgtttctcttgagattttgtttctgtcttaaatcaatggaacatctcaacctatatggaacattccaaacacataattgtattaaacatcttctgcatttaaatgttaccaaacagtgaactacaagaaacaattataatactggaacataaggtgaagttctgttccataatggttaagtagcaaaagcaaagaagatcactccttattcagtagaaatctttcctccagctaaatcttcaggagttaggttaagagaatccatggatcctttcttgaattcttccccttgagaagcaaggaagtcctccacgcttcctggttctccaaaccaaccacgacggtctgcaatcaaatgtagattatcacaccctccacatcgtaccaccacaacgccgttttcatatgattctcggctcgccatcttcatagatcttgtatcacagaccttgcaagtgaagaccatcatgaagtcatgcctcgggtttatttttaactgggacttgtacttcaccatcatttcctcagagggcgtcgcaggggagggaactttggccgattcagtagcagagtttgacgagttgcagacattggttacagaagcttcatttgcctcacggattacagataactgtctctgaaataatcttccataaacatgacttctgctgaagagtgagtttgatagcgacaactgctctgttgagactattttcaaaaaaaaaaagataatcaagaaagatcaatttaacagtagttgtagttgcacgaagctaaaacagtctgtaccataacaggacatcataggaacctcctaggataatgtttgcatcaaaccgtagactaatgctaacacatcttagtcaggaaatatataaccaaacttgaaaacttaaccagcgtctagctgaaatgccaatgttcacagctactgcttaatgcatagagatatgttgaagacaaagcacttatgtgagcattcataacttcaggtttcgtagaagcacttctctaactccaaaatgtaacagagcaaagacgatattagatgatatacacatgagaatacgagtactcatcatcactaatgccccaaatctctaaaagctacaaaaacaaccctaaaaccaaaatctccccaaaatcctcttctagtgtaaattcaaacataaaaaccacaaatttacatgaatctcaaccaaattcatcaaaagaaacatcaaggcaagtataaattacacagattaagagaccagtttaactctagtgcccgattttcaataactctttaatttttcttaaagatgacaaagttgagaaggagagagatgaaaccttgagacaaaggaaaacgatgttgttggttgctgaaaagagacaaagcgcgtctcaaagcaagtaacctagcggccattgacaacctgagggagaggaggaactcgacgcttctattttccgtgaaattttggaatcggagcacaataaaagaagcctttttaatcattagagttagttttcgttatggtcaagtcaaaatctaaacccaggttcgaaccactgagtgagccacaagtagaccgacctttttcttcttttttttacgtgaggaaaaagaaatttgtgaattgaaatcttatctagaaaagaaaaaagaaaaaaaaaatcagaacaagcaggagaataatgtgtgtgatacaggatattgagtaaggccacgtggacggctgtgattagaagatcaatggacggctgtgattcaaattaagtgtgcgtagagctgaagctaataaatatcaagtgtcatcgtattttcatgttatcgttgaagttgttgttattcctttctctctgaaaacattccgagattcatcctctgcatagaacgtcgattcttgcgaggtgaatccagaaatcccttgttttatgaacattggatttcatttgttatttacatcgtaataataagtaatcggagttgttgatgattgctttggttgattgattgtgttgtggtgtggttttactgtattaaaggtatcagagcaaagacgtttctcggag

SEQ ID NO: 6368 - DNA, 3000 bp, Unknown
  misc_feature (1)..( 3000): cDNA_ID_2106795_gDNA_ID_1621090_Annot_ID_170683 3000 nt of promoter + ATG
agttactccgtttggcaaataatttatgctccctcattacttccaataccagttttaagtgctgcaaatgctccttctttgatttgctatagataaggatatcatcaaaaaacaccaagacaaacttccttagaaacttttgaaacactgaattcatcaacccttgaaaagtagctagtgcattggtcaatccaaagggcatcaccaaatactcgaaatgaccactatgagtcttgaaagcagtcttgggaatatccttctccaccattctcacttgatgataacccgctcttagatcaaacttcgagaagatcactgccccacccaactcatccataagatcttcaataagaggaatagggaaacaattcttcactgtaattccattcacctttcggtagtccacacacaatctccaagagccgtctttcttcttcactaaaaccacaggggaggcaaatgaacttgaactaggctggatgataccgctctctaacatatctttgacaatcttatcaatctcatctttttgatgattagcataacgatatggtcgcatgttcaccggattagtgccctcaatcaaaggaattggatgatcatgatgtgtccgagaaggaggcagccctttaggttcagcaaacacatccttatactcatcaagtaattgagaaatagcagaagtagtacttggtggtgacacctctgttgttaaagaagacaactgcaacacctctccctcatcctcatcagcgtctgcaacacacaacatagacagctgaacttcggagtctctcagtttgttcaatttgtcagccttgatagcacgcaccgacgaaggctgaataccatgtatcatcacccgtttcttatcccatttaaactgcattgtcaacaatgtgaaatcccatgtaataggacctagaggtttcaaccaatgtacacccaaaactgcatcaattcctttcaaaggaattaccataaagtcagctacaaaagtcgtgttatgaatctcccacttaaaattctgtattctcgctatcaccttcagattgtaaccatcagccacccgtactcttgcattatcactaggtaggagtgagcaacccaacttctttgccatttgaggatccataaaattgtgagtggaacccgaatcaaccaacataaaaatggatctcttctgacttgtacccttaactcgcatagtgttgtaagttgagataccctccatagcatgagttgagatatgagctacttccccaactaactccttatgctcttcttctgcatccaagaacacttcctcagcatcttccatttccaaaacaaacaattgtgttttcttgtgaatcttataatgttcagatgtgtattgttcatcacaaaaataacacaatcctttagctctcctagcactcatctcttcagtagataagaaccgccttggctgattttgttgtgtgtctcttggtttttcctgaaacgctggtttattgccctgctgctccatgtctttcttaaaggagaactggccctttgaagtagccttattgttcttccaagaagtcgcattgttctgcacaggatgagcagtttcatagagacgtcccaacatcaaacactgccgcaccgtttggggttgaaacattcggatatgcatctgtgtctcaatccttaacccaaccaaatacgcactcactaaataatcctccgtcatccttactcgagtccggatcgcctcaaactttgcgtgatagtcatcaatgctagcagctgtttcctgcaacttcttcagctcagcaataggatcctctccaaccatctcaaacctctccctgatcctagctttgtacacaccccactcaggaacctgcacttcatcctcaatcatattctggtgccaagtagcagccagaccatccaaatgaatagaaactacagacactcgcatctcttcaggtataggatccaccgcaaaaaattgatcaaccttaaacaaccattccttaaccttctcaccactgaatctgggaaaatccaacttccctaaccttgttactcccgaatgattgttagcgtgaccttgccttctcatgtaatccacgtctgttgctgaagcggatgaagcacgagctgtttgatgagtctcacccagatttgactgcttagatggagacagcatgtggatcgcctcaaacatctccgagatatggcgctcgatcttcagattttgagcatcgatcttgctctcgatcttctccatctgtgactccatcgattcctctgcttctaacgccttctctcgacgagcttgagctaactcctgagctcgagtctcgatcaccatctccgagaaacgtctttgctctgatacctttaatacagtaaaaccacaccacaacacaatcaatcaaccaaagcaatcatcaacaactccgattacttattattacgatgtaaataacaaatgaaatccaatgttcataaaacaagggatttctggattcacctcgcaagaatcgacgttctatgcagaggatgaatctcggaatgttttcagagagaaaggaataacaacaacttcaacgataacatgaaaatacgatgacacttgatatttattagcttcagctctacgcacacttaatttgaatcacagccgtccattgatcttctaatcacagccgtccacgtggccttactcaatatcctgtatcacacacattattctcctgcttgttctgattttttttttcttttttcttttctagataagatttcaattcacaaatttctttttcctcacgtaaaaaaaagaagaaaaaggtcggtctacttgtggctcactcagtggttcgaacctgggtttagattttgacttgaccataacgaaaactaactctaatgattaaaaaggcttcttttattgtgctccgattccaaaatttcacggaaaatagaagcgtcgagttcctcctctccctcaggttgtcaatg

SEQ ID NO: 6369 - DNA, 3000 bp, Unknown
  misc_feature (1)..( 3000): cDNA_ID_3048227_gDNA_ID_1621090_Annot_ID_170680 3000 nt of promoter + ATG
aaataaatctattagttttaaattttacaaaaaatatatcataaaaaataatcaataaattatcattttattctctatatgaaagagcagaaatggtagtacataaaatgtccaaatttcttcccaaataacttattattataataatgaaatgaaacattatatactattattaactattaagttttgaaaagtaaaaattaaataaaaacattatattttttattttgttataatttgtttctttcactagaggtagttatactaagaaacttgtacttataaaagattcacacataaagtagagcttcatatttttagtatacacatgaactcaattttcacatccactttaaaacatgacttcttataagacttagacattcatattttaaatcttttatgttaaaaagaaaagaaaaaagggctttatgttcatcaagaaaatgtacatgtgttattttaagaaactaaatgtcataggagaggtttctcacctcttgactcggagacggaagtttgaatacggactatgaagaatattttctcaaaaagataaactgtaaaattttcgaaatcgattgtatagagttagtctccatgatgaaatctccagagaattgataacatgttttttccaactttctcgatgaatttgatttttttccgagttaagctttcaaatatttttcgctcttgtaatctctatgccaattagtttgccaaaatttctagatttttaagttataaaatttttgatttaaaatttatttttcctgattggtagcgcaatcaaagaataaatttctatttaatatgtggttaaaaagaaagaaaagaaaacaatttagtgaaaggaaactctatcggagagggaagaaccacgtccacatggtgtgtggatctgtttttctgatcatttggaattttgctatgttagaatggcaatgcatcaaccgcatcaggaaaccacgactcaagaacatgcccacatttactctttatattcgccgcttccagctatatataaattattctcacatgcatgctttcttatttccctatggtattttgaattattttttgaatagatttatcatgtgcttaattgtttgagagtatgaattcacacttgcatgatctatgatggttcatgtttacctgttaatagaagataagaagcttgacacatgcaaaaacaaacaccgatcactaaatttttattattactcatcatgaagtacttctttgtattatagtgtcgttagtataaacctgaggaatgtaagacttaacggattccggttgtacgtagactgaatcgttactatgaaaatttgtcattagtaaaatttgattttaaggtcatgcactttcaatcatttggatgcaaatttgaaatagattttcttatagattttttctcgagcaaaatatctcaaaagcactacgatcaaaagcttgtcagcgagacattgggacacgttggcacatagcaggacaactcactcatctaaccggtaaacggaccaacatcagacatgagattacaatcgttgacgtgtcattattatccacatggtcttctcttattggtatacattgttagatctcagattatgcagttgtagcgccagagagaagatctaattgcatgagggttaacttaacacgtgtcgactgttgcttcgttcaactttagatcagcatttaggatccaagtaggtgtacaattagattctcccaggccaagattcttcttcccatctgtagttctattatccacgtcggattatttttaattttactctattactattaattatatacgtatccaattccaagtgtattagattaagctaaagtatttatccctcacacagacaaattttattgttctgttagcaagtaatattgcactaaaccatctctaagctaatttcaggtcttcatttgttaatgtaatatttttgttgtcaactttaaatgtaaatagttttcttattttcttatgtcatatctttcctatttcatctaaaaaagaatatgttgaaataaattgaatagtggaattatgacttggaaaatcaaaatttggagaaggtttggcgtaatgagaagcacgagcatgatcgaaaaagtgttctatgtgagttgttctatttcaaagctcaccacgcaaggatacacatacgtaacttggtcaatacaatgatcacaagcaaacacacccactcatatataaatagagcatatattcctcacaagaatacaagatattatagagcaaagattgatagctaacttcagtaaatgtcgagctacatttccttcttcatgttactctttttgttccttatttctcctcgaacaaacgttgtctgtgcatcaagacctttattggaatccaataatccgggtcacatgagcacgaatacaatttacataaaaggtagcgaacaaggcgcatttcgcggtggagcgatgaacgattgtcttccaaaggggtttcacttcaactcagctcctagccgctacattaacaatcttcctttagattcaactctttgttctacaacagagaaagctattcctaatccataaaagtaataatcccctaaaatattacccgctaaattaagtatgtgcaaagattgatagctaaatcacctatttgttttttttttgctctatgcttgggttatttcttgaataaaacccatgtatgtattctttaattaattgtgtttgtatacttgtgtataatatttaagcaattttattatagatgaaaaaagtaattttatataaaaatgttgtttagtaaattaatcaacacaaatcagtttttgctaaatatgagaatttttctcttcaccacggttaaaacttaaaactaaaactgtatttattgagataatatatgttaataatatatgttcatacttcatagctttgtggaaattgagaataaccatatgtaaaatattttgagaaatg

SEQ ID NO: 6370 - DNA, 3000 bp, Unknown; identical to SEQ ID NO: 6362
  misc_feature (1)..( 3000): cDNA_ID_1814162_gDNA_ID_1621090_Annot_ID_55488 3000 nt of promoter + ATG

SEQ ID NO: 6371 - DNA, 3000 bp, Unknown; identical to SEQ ID NO: 6361
  misc_feature (1)..( 3000): cDNA_ID_1974108_gDNA_ID_1621090_Annot_ID_55491 3000 nt of promoter + ATG

SEQ ID NO: 6372 - DNA, 3000 bp, Unknown
  misc_feature (1)..( 3000): cDNA_ID_1814148_gDNA_ID_1621090_Annot_ID_55493 3000 nt of promoter + ATG
aaacactcaacataattactagtaaaagtatgatacatgaagtcagtgtcacttcctcagagagtaaaaagtccaccagttgcagtgactgcaaaatctacttaagctacttctagtcaaaactgcagtatccaaaatttgtgacaattacctcgtctattagtccctcataagttaactgggaacacataggagtaaccatgtcaacctgaaacagaaacgtaaaatttgaaactaatagcgccatgtcaagtaaaaggtaaccaccgcctaacaaggtatcagccagtcccaattccagattaagtgggattttaaccactttctatatctcttaacctttatatgcacatttccaaatccatcgtttgtgtcatataaaacataattcagacttcccaatgattacatcacaccaactctttaacattcaatccttgaaggatatctttgtatttaaggattacaaataacaggaaacacacattgtaatcttacctctctatccaatagaatgagtgtatccacttcaggccttcccacctgaaatagaacaaacatcatttagaatagtgaaaaaaggatacaaaaacaagatagcgaaataactggtgattatgacattcaaactattgcaggtattttacatcattcgaattgacaggttcctccacttgcatgcggtttagaatgtctgcaacacgaactgatgctttgccctttgccctcatttttgatataactccaaaagagaactataggaagagttagtaatgagatgatagttgtgatgacgagatgtaaagaataacgaaaatgtttaaacctcaagttcatgtatggcttttgcgatatgccaaagggagctaacatcaccatccacaaggcaatcctatcattaaaaaatcatgaacaagataattaggaaagctgtgattttaaggcctcacggaaaatggcacataaagttacaagaattggactcatgagagttctacacaccttttcagagagctcgagctcaaatgaaataacatcctcatctagtggaaccatatacaagggaaactctttcactgtaaccaggttatgcactttttcttgctcaagaatctgaaaatagcagaatgattttttttatcacccttattcaaaaaagtaataaaacaagcaaacgaaagcaacaatagtattagaggacgcaaataaccacataccttctcacacgcaacagacctacgaggaacaaagtaaacatagtagtctctctgaatcgcttttgcaatatcattctgaatgtgagacgctatgaatttcataaagctaagttgagagcgaacaagataaaccacttttgtgcattcagtctgaactggttccgcagtaagatgtcgtaactccaaaccaagttcctgttaagcaaagaacaacaaaaaatcaaatcaccactaatgttaaaaccaaactcaacctttaaaagaaaaacgaaattaccttaagcttagaggtcgggatgatcaatgagactgaaccactgagctttggatcaataaccaaacacttagttccacgaacctacaaccaaagacaccaaaaagaagagaaaacaaaaaagtcttgagaaatcggtaaatcatctccgaagtctattcatcctaatgattctcaatcatacgacattggtgaagtaattgcatagaaaagagaagaattcatagtaaaagagagacaaagcattggtttttattttcacattctcaaaagagatatgtttgatcaaatataatccgcgaaatttcctaactttcgtctcccaacccaaaaaaaaaaaaaaagatagagtaatgagacttacgtctttaagcaagtttacgagctccctctcagacttgtccctgaataagaaacgagaaacatatgatgtgagaggaaagaagaagaaacgatcaatcaatctctaagtaatgaaaatagagtcacctaatggatttcagattgagaggagcattctccaagctggggatctgcgccatggacgatgatcaagagatgatcgacctttctccgtttgtttttcctgcaccgtgtgatagcgacgatagtccaccgcagtggaagaacacggcggagaagattattaaatcacctaatgggcctcattctgtataaatgggcttagaaatgggcctcatttttaaacattgttttcatatgaaaaaaaattgcaacgatataaagtcagatttttttttttgggttgcattaaagaaatcaagagtgtatgtaccaacatgatagcaagaaaacgatacgaacatatgtgtcgctggtacaaatatggagtttatgcaagttgaagccgaccagaccacgattatcaaaatctcttacactattttaatgattttaatgattcttaggctgtgaatggtgaccaaaaccgcacccaaaaccgcaccgcaacagtgctgtaatagtatcaaaatctctactcatacatatgtatctatgtatttttgttactattttaaccgcaccgcacttctctcgtaccataaaacacaatcaccattcggagccttattctgtcatcaggggacaaatcactatgtttagagatgttgataccgtagatgagcccatatattaataggggatccactttactagattttgtatcgttgttatcgatatggtccatacacattttggacccgctaaacgtttatactttcacttgtaatgttcttaaaatttattcttgtccgctaaccgctaatatcgaaaccgaccttaaccaaaccaaaccaaatggagaaaccaaaccgaataaaatccacgaacgcgggaaccattttcatcacagtcgtgcctccctcttctcttcttcttctacttctttgaaacattctcttagctctctctatctttgttgtctcatactctctttctcttctcttctcggtgccctttcgtgcttcgtgaagactccagctaatg

SEQ ID NO: 6373 - DNA, 3000 bp, Unknown; identical to SEQ ID NO: 6359
  misc_feature (1)..( 3000): cDNA_ID_1814144_gDNA_ID_1621090_Annot_ID_55494 3000 nt of promoter + ATG

SEQ ID NO: 6374 - DNA, 3000 bp, Unknown; identical to SEQ ID NO: 6358
  misc_feature (1)..( 3000): cDNA_ID_1814140_gDNA_ID_1621090_Annot_ID_55495 3000 nt of promoter + ATG

SEQ ID NO: 6375 - DNA, 3000 bp, Unknown
  misc_feature (1)..( 3000): cDNA_ID_1814134_gDNA_ID_1621090_Annot_ID_55497 3000 nt of promoter + ATG
aacccaagcatagagcaaaaaaaaaacaaataggtgatttagctatcaatctttgcacatacttaatttagcgggtaatattttaggggattattacttttatggattaggaatagctttctctgttgtagaacaaagagttgaatctaaaggaagattgttaatgtagcggctaggagctgagttgaagtgaaacccctttggaagacaatcgttcatcgctccaccgcgaaatgcgccttgttcgctaccttttatgtaaattgtattcgtgctcatgtgacccggattattggattccaataaaggtcttgatgcacagacaacgtttgttcgaggagaaataaggaacaaaaagagtaacatgaagaaggaaatgtagctcgacatttactgaagttagctatcaatctttgctctataatatcttgtattcttgtgaggaatatatgctctatttatatatgagtgggtgtgtttgcttgtgatcattgtattgaccaagttacgtatgtgtatccttgcgtggtgagctttgaaatagaacaactcacatagaacactttttcgatcatgctcgtgcttctcattacgccaaaccttctccaaattttgattttccaagtcataattccactattcaatttatttcaacatattcttttttagatgaaataggaaagatatgacataagaaaataagaaaactatttacatttaaagttgacaacaaaaatattacattaacaaatgaagacctgaaattagcttagagatggtttagtgcaatattacttgctaacagaacaataaaatttgtctgtgtgagggataaatactttagcttaatctaatacacttggaattggatacgtatataattaatagtaatagagtaaaattaaaaataatccgacgtggataatagaactacagatgggaagaagaatcttggcctgggagaatctaattgtacacctacttggatcctaaatgctgatctaaagttgaacgaagcaacagtcgacacgtgttaagttaaccctcatgcaattagatcttctctctggcgctacaactgcataatctgagatctaacaatgtataccaataagagaagaccatgtggataataatgacacgtcaacgattgtaatctcatgtctgatgttggtccgtttaccggttagatgagtgagttgtcctgctatgtgccaacgtgtcccaatgtctcgctgacaagcttttgatcgtagtgcttttgagatattttgctcgagaaaaaatctataagaaaatctatttcaaatttgcatccaaatgattgaaagtgcatgaccttaaaatcaaattttactaatgacaaattttcatagtaacgattcagtctacgtacaaccggaatccgttaagtcttacattcctcaggtttatactaacgacactataatacaaagaagtacttcatgatgagtaataataaaaatttagtgatcggtgtttgtttttgcatgtgtcaagcttcttatcttctattaacaggtaaacatgaaccatcatagatcatgcaagtgtgaattcatactctcaaacaattaagcacatgataaatctattcaaaaaataattcaaaataccatagggaaataagaaagcatgcatgtgagaataatttatatatagctggaagcggcgaatataaagagtaaatgtgggcatgttcttgagtcgtggtttcctgatgcggttgatgcattgccattctaacatagcaaaattccaaatgatcagaaaaacagatccacacaccatgtggacgtggttcttccctctccgatagagtttcctttcactaaattgttttcttttctttctttttaaccacatattaaatagaaatttattctttgattgcgctaccaatcaggaaaaataaattttaaatcaaaaattttataacttaaaaatctagaaattttggcaaactaattggcatagagattacaagagcgaaaaatatttgaaagcttaactcggaaaaaaatcaaattcatcgagaaagttggaaaaaacatgttatcaattctctggagatttcatcatggagactaactctatacaatcgatttcgaaaattttacagtttatctttttgagaaaatattcttcatagtccgtattcaaacttccgtctccgagtcaagaggtgagaaacctctcctatgacatttagtttcttaaaataacacatgtacattttcttgatgaacataaagcccttttttcttttctttttaacataaaagatttaaaatatgaatgtctaagtcttataagaagtcatgttttaaagtggatgtgaaaattgagttcatgtgtatactaaaaatatgaagctctactttatgtgtgaatcttttataagtacaagtttcttagtataactacctctagtgaaagaaacaaattataacaaaataaaaaatataatgtttttatttaatttttacttttcaaaacttaatagttaataatagtatataatgtttcatttcattattataataataagttatttgggaagaaatttggacattttatgtactaccatttctgctctttcatatagagaataaaatgataatttattgattattttttatgatatattttttgtaaaatttaaaactaatagatttattttaatacatatcaaaatctccattatttctcatattttcaattagtttataaaaggataatgaatcgattcattgtactatagttacaaacttgacctaaccatggttaactctggtatatatgaatgactcacgttttaacggctctttactcatctagttgtcctctgttttgccctttcactcccctagactcctactttctctgatacaattttttgtttgtttcttgtgtaatttaaagattctctataaccttaatagcattcataaaccggattggatccattgtgagaga

SEQ ID NO: 6376 - DNA, 3000 bp, Unknown; identical to SEQ ID NO: 6366
  misc_feature (1)..( 3000): cDNA_ID_2105807_gDNA_ID_1621090_Annot_ID_55498 3000 nt of promoter + ATG

SEQ ID NO: 6377 - DNA, 3000 bp, Unknown
  misc_feature (1)..( 3000): cDNA_ID_1814266_gDNA_ID_1621091_Annot_ID_55502 3000 nt of promoter + ATG
aagcattaatggactattggtagatctatcgctaatatcaggttattggaacagtaacagctttgatttaacgtttgttatgagcttcagttctggtggttgctcttaatgaaagcaaagatttggacatttaccccaagaatatgtcggtgatcaggatgatgagaaatgcctttcccgtgtctgaaatgttgtttatgattttatatcctgtaaatttcaacaaggctacctgaaaaaagttcatgaagtaacccaaaaaggtacatgttaacaacatagcagcttgaaaggaaacttagaatgccattttaggtgggcttaatcacggttggaaacggaaacttactctaccctgattggcgtacaaaagaacaaacaaggagatcccaaacaccatatcagaccatatgttggcaaatgctttccggttctctagtctccactcatcacgcagttccaaactgttgaagaaaccaatgggaggaacacaaaaagaaacacagtgaggctatcaaaagaaactatctggtacacgatcaagatgggtttacgacctttgacatcaaaagaaactaaaaatgtggagtcgagtcttacgctttaccccgcatctcccaccataaatcatcgtcagaaagcggcggagatttgccaatctcaacttcaagacggtacctagctttttctctattaagttccttaaccatttctagcttctgatttcgtctcacatcaagcgtctgggcagcaagtggtacagtcttcacatatctttaagtaaaggcacagactaaataatcaaactggggactaacacaacgtaaatagagacataacctggggaattaacagcaaaaatgaagaaaatcacctgtctaagaagggcataagtagataatcatgagccaaaaagtctaatgcccatggaatgagaattaagaccgccaaaaactttgcctgtaaagagttacaacgtcaatgagcattgatcaatcatctggaagaacattacaatcactaacaaatgaactaagaatcacacatatcatcaattaaggaacaagatcaacagagagagctatgtagcataactcaccgattttgaagaagcgtaacgaaaaatacggtcttcgtaaagaatatcttcctcttctgcacctaaaaccatatccctcaccattttaaccaaccctccatctggaattgtcaattcatcaagctctaaattgtcgtcactaccagcagagtctcgggtccaagactcaacaaaactatcatctgaatccacaatccaatcctcccatttcttggtcacatcagcaacaacaccactatccccaatctcctcctgaccttcccgtagctcgacaatcgcctctgctcgtctcttccaagtctcgaatttctcttcatcagacatctcatcatcctttgcaagctcagtagtctcatcaacaatgtcgtcgtctctcaaaccaagccaattcccatcatcatcaaagaaaaacctctgccaccagcttcttctcctcttattattattacccgtatgactgttattcttctccgcactgggaacaaatctccaaagcttcttccttctcttaccccacaacgaaatcgaatcacaaggcttataacgaagaagagaagatgatgatgattcaggatctgggttttgactactgaatgataagcagtggcataagaccattgacgagctcatcaaggacatgaatcaaacccaacattgttcggactttaatctcaaagcaacaacacagattcttctacaaaacccagacaaaccagcatatctttctttgtaaattcaacaactttacaaagccctatacccggaatccggtgaagataagaattagggttcttcagctcagaaagttaccgagagagagaaccagaagctgaccccagttgtggatagtggataccagatgatagataaagccacgctcttttttttgttttgttatcttcttcttcaaattaagcttgtaaaatatctgttatccataaagattgcttttttggtttcaaataattaattacatttacatattattttgtagagtcaaaattgttgtttccgtcgtttttgattggctaaaaattgaatgactgtatatttacagaaataaattttaagtaaattccactttcttctttagtacagagttatggagttgctgaatggagtagaaactctagtttcgggaattcatcatcaccatcgtactaacgcgaagagaaacagattagttagatctgtcaagatcttaaactccgggaatcatgaaatccccagaaagtaaagtttccttttttgtgctctctattttctgtttgaggcattttaacgaacaccttccgtgcaatcactatcaattttgcaggtgcctgtgttttgatctttacgacaaattggttccatacaagaaagcttggtcatggcagaagagcattgtcgaggagaaaaagacattgattgatagaaaccaagactgcgctgatacagtgattttgttacaacactctcctgtttacacaatgggaactgctagtacagaggattatctcaatttcgatataaaggatgctcctttcaatgtttatcgaactgaacgtggtggcgaagtcacttaccatggccctggtcaggtaataatgtcaacaatgcattggaagtttctgtgtgttttctaatgagctcttcaagctgattataggaatgtttgaaaatgtagctagttatgtatcctataatcaatcttcgaaatcacgagatggatcttcattggtacctcaggatgcttgaagagattgtcatccgtgtgctttcctcaactttctccattaaagcttctcgtcttgacggtttaactggagtttgggttggtatgtctcatatttcaaatggatgattttgtaagtgatctaatatatattccgagattgatttctttttgtttgcaaatg

SEQ ID NO: 6378 - DNA, 3000 bp, Unknown
  misc_feature (1)..( 3000): cDNA_ID_3048294_gDNA_ID_1621091_Annot_ID_170723 3000 nt of promoter + ATG
aacgccatggtcctccaagctcaatgctcgtagctgcagccgctccaacatcaatgagaaccaggacagacgatcaggtgaacattccgacttcaagccagtgctcggtggggcgagaaagtgagaagcagagtaaagaagcattggacgttggtggagagaaagtgatggaatcagctaggactttgttgagcattggattcgaaatcaagcaatgctgattatatgtagtttatgagttttatagagttcatcgactcaattttcgcctccttgttcttgttatataataataataaaaaaccccatgaagattaccaactaaatacgttaacattcgtctgtgtaatgatggtatatgtttattgtgatattaaatcgctaattttagtgaatagcctctggttcgtctagagggtcttctgaaacttgaaagggactaaaagacgagaacaaaaaccctttctctctactctgtgtaaaccctagtgtgttcgtgctctccgatggcgagtcttcgatgctttcgtgagctgagccgccgcgctacgactgttttctccatcaaccagacgcgatcgatctcttcatttcatgggattgagttttccgggaccagcatttctcatgggaccgtaattccgaatcgatctctcactaggaatttgccatggtacagtcattggtatcgctctcaagatcgttgtttctcttcgaacacaaaggatactgatgaagatgaagaaagcagtgaaggagaggatgatgatgaggaggagggggaagactttgaggattcggcggatatggaagtagaaagggaatattcaccggcggagaaagtggaagaggcggaggagatagggtacaaggtgatgggtcctcttaaaccttcggagagacttttcaaaccctatgaaccagtgtttgccattgttcaggtctcgtctctgtgctatctcaattaatcctttagtttcatttctcactctcactgatgctgagtggttatttttatcctgtagattggttcgcatcagtttaaagttagcaatggggactccattttcaccgagaagttgaaattctgtgacatcaatgataaggtatgctagcttcaagctcttcttcgttaatctttgctattcttctctcaaagggctagactttaccgtatctctcgtaagaaggacgaacctttgcatttgtgtttatgatttatgattgttgctaaaacctttctctttatgtccctttgcagttggaactaaccaaggttcttctattgggctcggcaagccagacgattattggtaggcctattttgccagatgcgacagttcatgctgtagttgaagagcatgtaagtgtctcattgacttgcttggtgttttataatactagtgaagctgtgcttaagaataatttacaattgaaaagaggatagatgagagtttgcttgctgaatccggtgactgagagaaactaaatcaaactgtctgctgattagtttgtgaaagtcttgcaagtcattagattagtgttcatctatctctacatcatctgaatgtcttgatttaagatgggcttggaatgtagaaggatctactcatgtaccagcattactcaactagtttttccttgatgcgtgacaggctttggatgaaaaagtgctcattttcaaaaagaaacgaagaaagaattataggagaacgagaggacatcgacaggtatactttataactccttgtttagatagacagtgtgtttatttcatctttgccttcttctagttctttccactgtgttatgattgttgtttttgaccattcaacacttgtgtccaggaattgacgaagttgagaataaccgatatacaaggaattgaaaaaccagaaccgaagatcgtccataagccttcgaaagaagctgttacagaacagacgaaggctgagctagttgcttagagataaaatttgcttctttcttttttgctgatgccgatacatttgaagtaagttaaattatcacttgctgttcactaagaactagattttaaagtcgttgaaatgatgaaaaggccttcttggtagttagtggtaagtaactaggctcctgagatatgaaatgtgatttgcctttcactgtcttgttctccttgctcttcattttgtatttaaactggctcatgcttgtgggagctgtttgttgcttctgtttcagaaataaagatttgcggaaacatctctctccttatcttctctatgctttgtactttgtactgtactactgtggtttggttatggtttaatttacttcttcatgcaagtctcggtcacagatatgaaactggtggtaaattggtaataactgcaagtcacattacactcaaaatctcgattttttccactatgactctttagatcaggtgattattattgtaactatatatggcaaccacttcctcatcaacaaatgattcacagaattgatagtacttggaactgatttataatttcttttatcaacatcggaaaatcgtgtaagaatgccttgaaatatttgaatgtttgtaaatagtatcaaaaccattgtttgtataaatatgtataaagaacttaaacaaaagcaatttggagccaaagagaattataaagctacacgagtacgtaagtccatggttaagatcgggtcgggtggggacgggttggataaaagcaaacaatgagtcaagtaaaagaagaatcatcgtcaacaagagagagagagagataagcacaaacgcggcttttcttctccttataaataagagaagctcagtgcgttactcaaatggccgtcactttggtaacgtccttcgcttcttcgtcttctcgcttccatttccgctcattctcctcttctccgtcgtctctctcctcttgtttcgtccgattccagttcccctctcgccttagactcgcttttgccgtcacgcctctctactcttcttctagagcc

SEQ ID NO: 6379 - DNA, 3000 bp, Unknown
  misc_feature (1)..( 3000): cDNA_ID_2105518_gDNA_ID_1621091_Annot_ID_170722 3000 nt of promoter + ATG
gccattagaagccctgaagaaaatgaagaatacaaacaatttcgttttttccattgaaatattttgctattttcgtgctgagtcttatcatacattaaagtacgtatatgtttttcctctttcagtcactattttggaagaacgcaaaacaaactccacttttcttgcagttgtttcctctataaagtaagtaatttaccactgtactaatcttttcggggtcagtcatgatctaaactagatggatcaacacaacaaaaaattacctttgatatatcaaaattcgtagaacattgaccatattcattatgctatttatcaccacatcacatgataataaacaaacaaacatcctagatagtcttaagataaattttacatagtaaactaaacggaacacgtcaatgatttgacgtgacgcaggggtgattaacggagaaataaacggagttggtttaactatctacagtcaaacaaagactgaaagacattaatgccccttctttctctttcttttttggtatctttttttctttcttcttttgcttttaaagcagagaaggcataataaaggaccaaaacgcagcgttttcttccggagatcagtcggtcggaaagcggctacctttttgtctgcctagagaatttgttcgtttctttcttttactctcttcagacaaaacccacgagatacagaaaaagaggacaagagagaatcgtccatggaagaagacactggtatcgacgaagctaagacatacacggtggagaagagcgagaaagtggagccggagaaggacggactgagtcaattcagagacgaggaaaaatcacttggtgcggatatggaagatttacatgatgagactgtgcgagaaaccctaggcaaggatcaggttcaaggtaacggtttattctgcgcaaaattctttattggtttttatttatttattcgagactttattttttgacgaaatgatgtttgagtttaccaggtgttcgagaaaattcctctgtggaaccaaatgttgaagatgtattagaagtgaatgtgagtttgcttcagactcttctgctattcataaactttcttaacacttacaactttgattctctcattaacattgattgtgctagaacttgtaaagtttaactcatttcagtgtcttcgatgttactcgttcagtgattatacaataacatgggaataggattaatcgtaatggttttaacctttggccaagttcaatctgtatctgtatcagtttgatctgttacattttagtgtgtctgatttcttaggcaattctgaggacaagaatcactgttatcaaggcatgacatttaactgctttttgtatcacattggcaggagactgatagcgtcaaggaaactgttgtaagtgcgattgtgccggttgatgaagtggaagagaatcgtcaggtagaaacatctccttctctggctgcatcgtcagactcattgacagtgacgccatgtctatctttggatcctgcaactgcttcaaccgcacaagatttaccactggtttcagttccaactaaacaagagcaaagatcagattcgccggtggttaacagattgtcggttactcctgttcctaggacaccggctcgtgatggttataattggagaaaatatggacagaagcaggttaagagtcccaagggctcacggagttactacaggtgtacatacactgaatgttgtgctaaaaaaattgaatgctccaatgattcaggcaatgtggtagagattgttaacaaaggtttacatactcatgaacctccccggaagactagcttctccccgagagagattagagttacaacagctatccggcctgtttcagaggatgatacagtagtagaagagctatcaattgttcctagcggttcagatccgtctgcttctactaaagaatacatctgtgagtcgcaaacactcgttgaccggaaaagacactgtgagaacgaagctgtggaggaaccagagccaaaacgaaggcaagtttgtagaattttgcatttcggtgcttactcttcactttgaaagatgaaattaatagactttcttctctctatttttcagactgaaaaaagataactcacagagttcagattctgtctccaaacctggaaagaaaaacaaattcgtagtacacgcagctggtgatgttggtatctgtggtgatggatacaggtggcgtaaatacgggcagaaaatggtgaaaggaaatcctcatccaaggtctagaaaactaaacgcatgacccatctctttatccacatatgacatcttctaatacgcatggtgattgatttgttctgtttcaaacattcaggaactactaccgatgcacttcagcgggatgtccagttcgtaaacacattgagacagcagtcgagaacacaaaagcagtaataatcacatacaaaggagtacacaaccacgacatgccggtgcctaagaaacgccatggtcctccaagctcaatgctcgtagctgcagccgctccaacatcaatgagaaccaggacagacgatcaggtgaacattccgacttcaagccagtgctcggtggggcgagaaagtgagaagcagagtaaagaagcattggacgttggtggagagaaagtgatggaatcagctaggactttgttgagcattggattcgaaatcaagcaatgctgattatatgtagtttatgagttttatagagttcatcgactcaattttcgcctccttgttcttgttatataataataataaaaaaccccatgaagattaccaactaaatacgttaacattcgtctgtgtaatgatggtatatgtttattgtgatattaaatcgctaattttagtgaatagcctctggttcgtctagagggtcttctgaaacttgaaagggactaaaagacgagaacaaaaaccctttctctctactctgtgtaaaccctagtgtgttcgtgctctccg

SEQ ID NO: 6380 - DNA, 3000 bp, Unknown
  misc_feature (1)..( 3000): cDNA_ID_2134056_gDNA_ID_1621091_Annot_ID_170721 3000 nt of promoter + ATG
gctaaagcaaaattcttgggacttctttacggaaagtggaaagacaaagtcattcactgtccaacaaaagacactcacatgtccaaaataagggagcgaatcatcaaatctttagaaatctgagactgtggtcacagttcacaccaccatgaaaggagcttaaagctaaaggtcaaaagaggattaattctttacattgagaaagagtcatataaggacaaaacagaacacaacctgaaactggaaacttaaaatcgtattaatatcaatcctaacaaaagtctatgatcatgttctctatgtttatattctcttgactattgctatttctctcatcctatatattttctaacaaccctaaaacattaacaaaagaagcaaaccagaagcaacagaaacagaccagactaagctcaagatatcaaaatgtgaaatcagatgatgggaggaggaagagtctcccacacatcaaacacattctcctcactgtgcaatgcaaacaacctatccccaccaatagagaaatcacaaatggagccgccatagcttcttttcaacctagaagtcaaaacccagtctgatccacaaaacacagagatggaatcattcatagacgagaagagctggccttcatgcaaagcaagtttggggtaacaaggctcatcaggcatcttgcttttcatcaacctgctcctagaactccacctcacactactccctcctccatccatcctcagatcaataaaccctagatcttcaaactcattcaccacacatatcgaattgctctcttccattgctatcgcgtctctcactctcttctcttccgccattgtaagaaatccgatatcagaccaagaccagaccatgttcttctctcggaaatccaacaagctaatataacagttatctttccttggaaacaaagtagctacaagaagacaattcttaccactcaaccattgcaacttatcagcatctcctaaagaccaaccaggactctcgtaaaagaaatctacttgctttccagtactttgatcccaaactccaatcccatactcattacttcttcctttacagctcgtaaagatcttagaatcaggactaaaactcaaagctccagcactataactcttaacctgattatcatgactaacctgaaacttatacctaagctcaccagaagatgagctaaacaatcccattcctccatctcctcttcctaatctctcacaagcagagagtacaatgttaccagaatcaatccaaccaacatcgttcactctctggtaatcaagattaatcgttggatgctcctcaagcatccaatcaaagacatggacgacactcccatgagctatgcagcatccaccatccggaccagctcttatcgccgttccgtctccaggagctatgccggtgacggaacgagataggtggagtctgttaccgtcgaaaggtccccactttgcggttcgtaagtggtctattaagccgtagaacattgcttctttgtgaaggagacgctccgggatattaggcgggatgtttaagtctcctgttcggagaagatcgagaagaacagcgaagcaatctggattcctatcgatgaagagatccccgggttgtgaaagattccaattttcgtcgaataatgctccgaagaaggaatcgcgacctgcgttagcgagcgttgtcgctgtcgtttcgaagattctgccaccaacgttgaatttgatcctgtcatttgataaacccattatttctgatttctgaaaataggtgaaatcaatgatttttatggattcgaaccaaaagcattaatgacaagacaaggaagccatgaacgctcgaactcggattgaaaatattcgaaattcgatcggattcgaagaaattgaatcctgggaaaggataacgaaatgaaatctgatttatgattaatcaaattgaatacgatgatctggactctggatatttttttaaaaaaagctgagattcccagaagagaaaataaaacgatctgtcttggtctcggacatttttccgttgctcgggcatttaaaacgtaagaaacccaactggaacatggtgggacctactagagacaatactcgtgttactaccgtcagatgcttttagatattgtcgtctatcctgcggtcgagatttcgtgtaatttcaaagctaataccgtgatccatgataacgtttctaaagcccatatagatagatatcatcccattaacatatccttttttttgtatgctgaaatggggccattagaagccctgaagaaaatgaagaatacaaacaatttcgttttttccattgaaatattttgctattttcgtgctgagtcttatcatacattaaagtacgtatatgtttttcctctttcagtcactattttggaagaacgcaaaacaaactccacttttcttgcagttgtttcctctataaagtaagtaatttaccactgtactaatcttttcggggtcagtcatgatctaaactagatggatcaacacaacaaaaaattacctttgatatatcaaaattcgtagaacattgaccatattcattatgctatttatcaccacatcacatgataataaacaaacaaacatcctagatagtcttaagataaattttacatagtaaactaaacggaacacgtcaatgatttgacgtgacgcaggggtgattaacggagaaataaacggagttggtttaactatctacagtcaaacaaagactgaaagacattaatgccccttctttctctttcttttttggtatctttttttctttcttcttttgcttttaaagcagagaaggcataataaaggaccaaaacgcagcgttttcttccggagatcagtcggtcggaaagcggctacctttttgtctgcctagagaatttgttcgtttctttcttttactctcttcagacaaaacccacgagatacagaaaaagaggacaagagagaatcgtcc

SEQ ID NO: 6381 - DNA, 3000 bp, Unknown
  misc_feature (1)..( 3000): cDNA_ID_1012984_gDNA_ID_1621091_Annot_ID_170718 3000 nt of promoter + ATG
acattatcaacaccaacgtaccatcatcgtgtctgtgctatgattccaatttttgctctcttatgacgaacaaagacgtttcgactgtcactagacaaatgacaaacccgtagaaatttgtatattattaattactttataagtttagtattaaattaattggaaagataatatatatagtcctatagatactaaacaaataatttaaacaaaatatcgttaatgtaaatattataagttagacaaattgattgaaacatgtatttacctaaacgctcatcaaaagcttaaacgaatacgacatgtaactgcgattttgatatatgtctccattctatatggaacctcgatgtttgacctttctattgactactgtacatgttgatataccatggatcacgaatattcaagtaacatttagtcaattcttaatgtgtgcaaactgcaaagcctagcataatatacagataataaatttacgtaagaaaaaaagttaaagaacaatacaatgcatggtcgtctaagtaaaaatttatgttgaaatttctttacttctactcgtcattagttgaagagaaaaccttttttggtgatctaactcacatatgtacattaacctatttaaatccggttaataagatgatagcgaaactttatacaagttgtggatctctagactattatcttcgaaaattatatattttaaatgcatatatcaatgtgtgtttatacctatatgaatcatgcatgtcattcatattcaaagtttggtctcggtgggtttcgttagttatatactgattatggaaagcaagtgccgattcgtggatgaaggagtttcgtcttgtggtgaacgtggcaaagtaaaataaattgaaagtcttatcaagttttggtggacgaataaaattggaaggaaattgattgattgcaatggcaataacatcggtaactagcggacaagagagttcacatggaagctctgtaaacaatcaataatggtgtgtgttggttccaactagtatatcgatcattgattgcgaaaagacatcaaacacagacaatatttaacgaacttaactaataaaagtgaggctgttaaaaattaacttagttcttgcggcatatcaattattcaatatcattttcatgtactgttttggataaattttatatttttagtgtgtgatacttttgattggaaagtgtcacgcaattataagatgtagcacattttttacttaacggtaatcaaattggattggccaaccaagtgattggtcgctttttcaacctaggtctgcaaaaataatcttgattagacgcattttctcattggctactttgtaaattcacatatgtcttcaggatttgaaaaataatagtttcgtatattagagtctccaaatgctccaaagaaaactctagacctaattttagtttggtggactcagcacgaacctagctagactatcaagttaagggtaaaacataatttttaagacatgaacaacttcgtgagtcgtggcaagttatgttccaatcaagttgaatcacatcttatggacttttcgtgcattagtgtaccagggtaatgtgttgtcgcaactctattaatcgtcggatttttttttttcgtagatgtagttgggctcagcccatactgatttaaaagtcccattcttcaaattgcttttgaaggaaaacaagaagaaaaaaacttatcgttaggtatatgccaaggttagtttttgtggcgatcgtaaaagaagtcacctgaatctaaagaagcagacgatgaatgacgaacttggctttacacaattaagaggagcgaaagaaatcgccaagcaaacaaaataatgctattttcacgaacctaactaagaaatgtgaggctattaaaaagtgtttcatatatatgcgatcgacatctactagccgtaaaatgtcggtttcatatcatttatcaagctaatgagtaatgttaagtcctatcaatttggctcacacagttgcggacttttcatgtgaagcttagctaatgctaatttgttgcaatactttttttttgtcgacaagaatttgttgtgtatatagaaggatatacacgtatcactcgtaacgcatgttttcaataaaactcaaaacaaattagtgatctaaaaacacggcaatttgatgacataaactattacacgtcacttgtaacgtatcattctcttcattccgttttttaaaaggatagacatatttatacacgtcaaaaaacataatgttgtatctgaacttgaaactgaacttagtagaaatagaattttcgtataaaaggtcttattgtatttgtgaacaagctaattaatagacatagaaaaaatttagtggagaattgtattagtttataaatatttgtgaacaagctaaataatagacatagactccaattgatatttatcattacaatctaaaactctgaatttttttaaactaatacagttctccacaaaaaaaatactttgattttgagtatgaagatttaccaaaaatttcagtttttgcccaacttgccaacctgaaatttaggtttataaatataaatattagaaaggaccccatgaaattaggtttatatgagaacatattttaggaatattcgagttttggatttatcattttgaaatttataattatctttaacaaaaaattgataattatctaacccttttttttccccaataattcttaaccatttttgttattctgtattaaataaatattgactattaatcattgtttcgacttttctagtatgcaaaattttagtttctgacaaaaaaaaaaagactgaaaaaaacaaaaacccaactttaaaattgtggaagtccaatttgctgaagaaggtgaagaggtgagggctcttcacagccattcaatctcataagacatattgccggagaaactctctcggggggtcgcttcttctgcattttctgcttccca

SEQ ID NO: 6382 - DNA, 3000 bp, Unknown
  misc_feature (1)..( 3000): cDNA_ID_1814242_gDNA_ID_1621091_Annot_ID_170713 3000 nt of promoter + ATG
cagtggactctatgataggtgtagaggaagttttacaaaggaaaggaaaagacatgtgctatataattaaacaaacacgtaccacaaatctcttacgcccctcggaagtgttgagcgactttactgcccgagcatcagctgatgtcgccatgattcagagagccgtgtttcctaaacacatcaatctccaaaacagtcaatttcgattccaaaatccccaaactttacaattaaatccaggctaaaaaaaaaaaaagagaagcttctaagagcaactatgtatatcaatctaattgcttaattgcttaattgctaaagccttggaaattaaacaacaaaagtagagcttacgtttggaaacgaaatcacacagagggttgcgaaagcaaaattgcgtctttaaagagaaaaatcgaaaaggcttgagcttgagaattgagattgagcttgagcttgagaacgcggcggaggaagaaagggtttaagcttcttttttgttctcaaacaaggaggcggttgggtttaacgacccggttaggttttatcctggtttatcgtttaatcgaaccgaatgttcgggttttgacgtatatttctggttttccataaccgagatccataattttagacatttttatttccctttttagcccaatcttaacattcgaaaatcgtaacactggccaacaaaatattgagacgcgcgttaactcatcaacatcttcttctctcaaattaaaatagcatttcgagcacgtccagcactcagcttcatctacaatcacagcaagccaaattaagctttcatgtttctcaagtagagtttttttagtataatttaagagaatgaaattacatttaaggaaataagatatgtttatttatttgtattagactaatagagtaagaaccaagactttaatcagagtttgtcagattcatacaaggttaaataattcaatattttcccaaggcctagttaagcccaccttttgatatttacagattatatttatagttcattataggtgaataagtagaacttgggaaatcagacgtgattgtgtaccaaactaagatcgtaagagccagtttttcaatttgaacaaagccgtaatttttgagggagttcctcaaatttattgggttttgtcaggattgagtctacaatggttgtgcaccatatggtttattttcctgccttcctattgtaaacgtattgttttatataaacaatagaaaaaactactgataatatgaaataaaactaatgtatcagtatactagatgggaccaatagtttatttaacatagtagcatttttgtctttactatctgtttattttttctatatggaatttaaattatcattcgtaacttattttacacccccttagttaattattttggtatacattatgattattaagtaaaaacaaaaataattattgcattctcttgataatactaatacatgagatgatagatctctctttctgttgtgtagtacatcaatgcttaccaacatttgtaattaataaatgggaagtgtattaaagccgatctctacctcttgtgagtttgtgcaaaactcagaatgtcccatgtgcttaatcatgcatattgcataataatgttctttacttatctttgtcaatttaatattaatcttaatcaaatactatcaaacagctgaaaaactgtatacgatggtaaaaaagaatttttaaggtaaatgatgaatttattagaccaaaaaatatttaacaagtataaaaaatacatggtaacatgacatgatgatgatgacgatgttctgttatgttatgttctcgtttgagaggatcctctttcccaaatgttaatcagatcggttaaaacaacaatttcatcgatcggtatcatattaatcagaaaacaaaacaagaataatctataaaaagtgatcttattcttatcgaacacgagtatcgtctaaagggatagcatgtttgtaatcttggggacaaattgtaaacagtaatatatgaagagaacattatcatgaaccgttgatgaatgaatgaatgtacccaaatgaatagagtataattgtatgcatttatactgcatgtctaaatattatatgtctaaaatagttgtcacaagaaaaagtgttggctctggtgttatcttgtagactattgcatttttggactagcaaatatttatctcgtggtacgtagttgccgggacaagtttaaaactccgactgattttaataaaaaagatcaacaatagagatttgtattttattttatttttgtagttggcatccttaacataaatccaaagaattttattcagcattcaaataaaccaattttaatgttaccgaatgaaaatcttatacaattatcttaaacatgagttttcaaaaatgattaatagaaaaacctatgttatatatatagaaatttaataatatacggtattagaaccacattctgtcttaaataaaaaaaaaaagataattaaacatacgtaaatcatttgagtgaagttagtacaaccgaattttttttttttttttttttttttagtacaaccgaattttaagttagttttattactttaagcctgtcattcgatcgactatgatatttttagaaatatatgtttcacttactttttgtagttactacaaaattgtgaaaagtatattatcaacaaaggattataaaattgaagaaatcatgacttcagtgatcgaattcttttagtgattaaaaaaatcaagaaattatgaaaataacacgaaataattaatttgcaaggatgataaaaaaaatggtaaatttggtaaacgtatttaacatgtcaaagtcaaacccttcaaatctcaaatattacaatctccatccctcttttaaacaccataaagccttaaacctcaaaagacatttcaacaacattcattttcattctcactccccaccaaaaaaaaaaaaaacagaagcc

SEQ ID NO: 6383 - DNA, 3000 bp, Unknown
  misc_feature (1)..( 3000): cDNA_ID_2134041_gDNA_ID_1621091_Annot_ID_170711 3000 nt of promoter + ATG
ttggtggaggagtgtcgtcgagaacggatgagggccaaggagtggaggagaagatgtggtggaggaaatcatcgtggtcgaatgttgcaggagattgaagatgtggagaaggagatgatgaaggagttagaagagacgaggagttcatggcttctgttttttttttttttggtggggagtgagaatgaaaatgaatgttgttgaaatgtcttttgaggtttaaggctttatggtgtttaaaagagggatggagattgtaatatttgagatttgaagggtttgactttgacatgttaaatacgtttaccaaatttaccattttttttatcatccttgcaaattaattatttcgtgttattttcataatttcttgatttttttaatcactaaaagaattcgatcactgaagtcatgatttcttcaattttataatcctttgttgataatatacttttcacaattttgtagtaactacaaaaagtaagtgaaacatatatttctaaaaatatcatagtcgatcgaatgacaggcttaaagtaataaaactaacttaaaattcggttgtactaaaaaaaaaaaaaaaaaaaaaaaattcggttgtactaacttcactcaaatgatttacgtatgtttaattatctttttttttttatttaagacagaatgtggttctaataccgtatattattaaatttctatatatataacataggtttttctattaatcatttttgaaaactcatgtttaagataattgtataagattttcattcggtaacattaaaattggtttatttgaatgctgaataaaattctttggatttatgttaaggatgccaactacaaaaataaaataaaatacaaatctctattgttgatcttttttattaaaatcagtcggagttttaaacttgtcccggcaactacgtaccacgagataaatatttgctagtccaaaaatgcaatagtctacaagataacaccagagccaacactttttcttgtgacaactattttagacatataatatttagacatgcagtataaatgcatacaattatactctattcatttgggtacattcattcattcatcaacggttcatgataatgttctcttcatatattactgtttacaatttgtccccaagattacaaacatgctatccctttagacgatactcgtgttcgataagaataagatcactttttatagattattcttgttttgttttctgattaatatgataccgatcgatgaaattgttgttttaaccgatctgattaacatttgggaaagaggatcctctcaaacgagaacataacataacagaacatcgtcatcatcatcatgtcatgttaccatgtattttttatacttgttaaatattttttggtctaataaattcatcatttaccttaaaaattcttttttaccatcgtatacagtttttcagctgtttgatagtatttgattaagattaatattaaattgacaaagataagtaaagaacattattatgcaatatgcatgattaagcacatgggacattctgagttttgcacaaactcacaagaggtagagatcggctttaatacacttcccatttattaattacaaatgttggtaagcattgatgtactacacaacagaaagagagatctatcatctcatgtattagtattatcaagagaatgcaataattatttttgtttttacttaataatcataatgtataccaaaataattaactaagggggtgtaaaataagttacgaatgataatttaaattccatatagaaaaaataaacagatagtaaagacaaaaatgctactatgttaaataaactattggtcccatctagtatactgatacattagttttatttcatattatcagtagttttttctattgtttatataaaacaatacgtttacaataggaaggcaggaaaataaaccatatggtgcacaaccattgtagactcaatcctgacaaaacccaataaatttgaggaactccctcaaaaattacggctttgttcaaattgaaaaactggctcttacgatcttagtttggtacacaatcacgtctgatttcccaagttctacttattcacctataatgaactataaatataatctgtaaatatcaaaaggtgggcttaactaggccttgggaaaatattgaattatttaaccttgtatgaatctgacaaactctgattaaagtcttggttcttactctattagtctaatacaaataaataaacatatcttatttccttaaatgtaatttcattctcttaaattatactaaaaaaactctacttgagaaacatgaaagcttaatttggcttgctgtgattgtagatgaagctgagtgctggacgtgctcgaaatgctattttaatttgagagaagaagatgttgatgagttaacgcgcgtctcaatattttgttggccagtgttacgattttcgaatgttaagattgggctaaaaagggaaataaaaatgtctaaaattatggatctcggttatggaaaaccagaaatatacgtcaaaacccgaacattcggttcgattaaacgataaaccaggataaaacctaaccgggtcgttaaacccaaccgcctccttgtttgagaacaaaaaagaagcttaaaccctttcttcctccgccgcgttctcaagctcaagctcaatctcaattctcaagctcaagccttttcgatttttctctttaaagacgcaattttgctttcgcaaccctctgtgtgatttcgtttccaaacgtaagctctacttttgttgtttaatttccaaggctttagcaattaagcaattaagcaattagattgatatacatagttgctcttagaagcttctctttttttttttttagcctggatttaattgtaaagtttggggattttggaatcgaaattgactgttttggagattgatgtgtttaggaaacacggctctctgaatcatg

SEQ ID NO: 6384 - DNA, 3000 bp, Unknown
  misc_feature (1)..( 3000): cDNA_ID_3092701_gDNA_ID_1621091_Annot_ID_170706 3000 nt of promoter + ATG
ctcattccatgggcattagactttttggctcatgattatctacttatgcccttcttagacaggtgattttcttcatttttgctgttaattccccaggttatgtctctatttacgttgtgttagtccccagtttgattatttagtctgtgcctttacttaaagatatgtgaagactgtaccacttgctgcccagacgcttgatgtgagacgaaatcagaagctagaaatggttaaggaacttaatagagaaaaagctaggtaccgtcttgaagttgagattggcaaatctccgccgctttctgacgatgatttatggtgggagatgcggggtaaagcgtaagactcgactccacatttttagtttcttttgatgtcaaaggtcgtaaacccatcttgatcgtgtaccagatagtttcttttgatagcctcactgtgtttctttttgtgttcctcccattggtttcttcaacagtttggaactgcgtgatgagtggagactagagaaccggaaagcatttgccaacatatggtctgatatggtgtttgggatctccttgtttgttcttttgtacgccaatcagggtagagtaagtttccgtttccaaccgtgattaagcccacctaaaatggcattctaagtttcctttcaagctgctatgttgttaacatgtacctttttgggttacttcatgaacttttttcaggtagccttgttgaaatttacaggatataaaatcataaacaacatttcagacacgggaaaggcatttctcatcatcctgatcaccgacatattcttggggtaaatgtccaaatctttgctttcattaagagcaaccaccagaactgaagctcataacaaacgttaaatcaaagctgttactgttccaataacctgatattagcgatagatctaccaatagtccattaatgcttctctttataggtaccattctgaatctggatgggagacattgttagagataataatggaacattatggtcttgaagttgagcaatctactattaccatttttatctgcctagttcccgttattatggacgcttgtgttaagctctgggtatcttcttttctccttttttatgctcttttgatttctatgtctctgctttgtttcgtcttctttgctcattatctcgtctgcatttctcaactgtttttttctgcttcttatgtagctgtttaagttccttccaagactgtctccgcgagtttccaacatattccaggagatgaaacgtcactgagtagtacccaccattgaaaccctccacttgagttctgtgtctctatcacacaaaccattcttcagctttatttacgttcagatagacataagagaaacataggctatttttttggtcactcatcttgatcttaaaatatattttttggttgaatttttggtgaacgattgagagagcactaatctgttggctctctcaccagtacttggtcatgtacacaataaacaaacctacaaaagaagccctttcggatatgggctttgggccttggaatttgggctttgggtgtatgtttacttgtgaaatagtagtaatcttctttacggtaagttacaagtctcgtcactttttacttgtgtcttgggttatcttttttgcttttttatggttgatttgatgattaagatttaagagctcaaacttccacacaaagctctctcatgcctttgttgaatgaagacacttttctctcttttggaccaagctctcaatgtcttaaaagctgaccatgcaaataaatgtacaatgttttgattagcaaagacatttactaggttaccctctctctactagacctctaagcggatcagttagattcctttgtagaaaaagttatctacaatgaaaacgaactgtctgcaaatagtgttattaattgatataattgtaattgcccccatttaacatggcggattttacgggccattgcacagttaaaacctcaaataatcatcattttataagcaaaaccaataaattaaactgaatcatcattagtttaactttacaccatttgctaatagttttggtcaaaatctgaagctgacgaagtccaaagcacacagaatcgtgtcagaaattaaaagcatacttgtccaaacaagacaatgtctccttttttgttattgtacttaaaaaaaaaaggaattggaacaagaaattgcaaagtgaaaacgagaccaaattgaaaaaaacagagcaagtggtattaaagataatttaggtaaataagaaggaggaatgtctgacaagacttcccattaaaagccattccttgcagcctttgaccaaatcttagcccttcgttgtgtaactctcttttcaagacacaagcacaataaatatgaacatcatcacctaaagatgaacacaagtttttaaaaacttaacccaaatattttacttgttacatacaacagaatttcattttgaccaaaacaaaaggattttttttgtattacgccatcagaatttaccaaaccatggacgaggccattcaaatattgtgtgacattaccatttctatttgaaaaaaaatctagactggcttctttcttatttatcatcatagactcatagtcatatatattcaatcctaagaatctaaagattaattatgattctataaaaacccctttaataaaacatcaactctaaaaagaaagaagagaggtgtagaagttgtttttttataaaacagctcatatcttcttctttcccccgacaagttcggttcccttcttctctcctcctccaccttctctccattttcttacctctcaacaagtttacacaaacaaaaaaccaaaaaaaaacaaaaaaaaaaacaattttttaaaattcttttcttagacaaagacagagacagagagaggggaagattttgggtttggtgtttttctccttttcttcattgaaagttgtcttcttttttaatcttctttgattaaa

SEQ ID NO: 6385 - DNA, 3000 bp, Unknown
  misc_feature (1)..( 3000): cDNA_ID_3092693_gDNA_ID_1621091_Annot_ID_170703 3000 nt of promoter + ATG
gtgtcttcattcaacaaaggcatgagagagctttgtgtggaagtttgagctcttaaatcttaatcatcaaatcaaccataaaaaagcaaaaaagataacccaagacacaagtaaaaagtgacgagacttgtaacttaccgtaaagaagattactactatttcacaagtaaacatacacccaaagcccaaattccaaggcccaaagcccatatccgaaagggcttcttttgtaggtttgtttattgtgtacatgaccaagtactggtgagagagccaacagattagtgctctctcaatcgttcaccaaaaattcaaccaaaaaatatattttaagatcaagatgagtgaccaaaaaaatagcctatgtttctcttatgtctatctgaacgtaaataaagctgaagaatggtttgtgtgatagagacacagaactcaagtggagggtttcaatggtgggtactactcagtgacgtttcatctcctggaatatgttggaaactcgcggagacagtcttggaaggaacttaaacagctacataagaagcagaaaaaaacagttgagaaatgcagacgagataatgagcaaagaagacgaaacaaagcagagacatagaaatcaaaagagcataaaaaaggagaaaagaagatacccagagcttaacacaagcgtccataataacgggaactaggcagataaaaatggtaatagtagattgctcaacttcaagaccataatgttccattattatctctaacaatgtctcccatccagattcagaatggtacctataaagagaagcattaatggactattggtagatctatcgctaatatcaggttattggaacagtaacagctttgatttaacgtttgttatgagcttcagttctggtggttgctcttaatgaaagcaaagatttggacatttaccccaagaatatgtcggtgatcaggatgatgagaaatgcctttcccgtgtctgaaatgttgtttatgattttatatcctgtaaatttcaacaaggctacctgaaaaaagttcatgaagtaacccaaaaaggtacatgttaacaacatagcagcttgaaaggaaacttagaatgccattttaggtgggcttaatcacggttggaaacggaaacttactctaccctgattggcgtacaaaagaacaaacaaggagatcccaaacaccatatcagaccatatgttggcaaatgctttccggttctctagtctccactcatcacgcagttccaaactgttgaagaaaccaatgggaggaacacaaaaagaaacacagtgaggctatcaaaagaaactatctggtacacgatcaagatgggtttacgacctttgacatcaaaagaaactaaaaatgtggagtcgagtcttacgctttaccccgcatctcccaccataaatcatcgtcagaaagcggcggagatttgccaatctcaacttcaagacggtacctagctttttctctattaagttccttaaccatttctagcttctgatttcgtctcacatcaagcgtctgggcagcaagtggtacagtcttcacatatctttaagtaaaggcacagactaaataatcaaactggggactaacacaacgtaaatagagacataacctggggaattaacagcaaaaatgaagaaaatcacctgtctaagaagggcataagtagataatcatgagccaaaaagtctaatgcccatggaatgagaattaagaccgccaaaaactttgcctgtaaagagttacaacgtcaatgagcattgatcaatcatctggaagaacattacaatcactaacaaatgaactaagaatcacacatatcatcaattaaggaacaagatcaacagagagagctatgtagcataactcaccgattttgaagaagcgtaacgaaaaatacggtcttcgtaaagaatatcttcctcttctgcacctaaaaccatatccctcaccattttaaccaaccctccatctggaattgtcaattcatcaagctctaaattgtcgtcactaccagcagagtctcgggtccaagactcaacaaaactatcatctgaatccacaatccaatcctcccatttcttggtcacatcagcaacaacaccactatccccaatctcctcctgaccttcccgtagctcgacaatcgcctctgctcgtctcttccaagtctcgaatttctcttcatcagacatctcatcatcctttgcaagctcagtagtctcatcaacaatgtcgtcgtctctcaaaccaagccaattcccatcatcatcaaagaaaaacctctgccaccagcttcttctcctcttattattattacccgtatgactgttattcttctccgcactgggaacaaatctccaaagcttcttccttctcttaccccacaacgaaatcgaatcacaaggcttataacgaagaagagaagatgatgatgattcaggatctgggttttgactactgaatgataagcagtggcataagaccattgacgagctcatcaaggacatgaatcaaacccaacattgttcggactttaatctcaaagcaacaacacagattcttctacaaaacccagacaaaccagcatatctttctttgtaaattcaacaactttacaaagccctatacccggaatccggtgaagataagaattagggttcttcagctcagaaagttaccgagagagagaaccagaagctgaccccagttgtggatagtggataccagatgatagataaagccacgctcttttttttgttttgttatcttcttcttcaaattaagcttgtaaaatatctgttatccataaagattgcttttttggtttcaaataattaattacatttacatattattttgtagagtcaaaattgttgtttccgtcgtttttgattggctaaaaattgaatgactgtatatttacagaaataaattttaagtaaattccactttcttctttagtacagagttatg

SEQ ID NO: 6386 - DNA, 1432 bp, Unknown
  misc_feature (1)..( 1432): cDNA_ID_1808149_gDNA_ID_1621091_Annot_ID_170739 3000 nt of promoter + ATG
ttcggcaaatctgtaatcttctgtatatgccaaatatgtaattcttagacttaggaaaaaatggtcatctcttcaataataatacttctaattaaatggtcctcactaaaacaatgtttacttaataaaacgtataaacaaatagattttgttacatataaaagtataacctaaaatgcatgcagcaaatttctggattgttagcatatagctcagaacaatcggaaacaagatgtgctgccacctgaaacaaacatactaatatatgattattaagttgacatgacctaaggggaatctcgtgagattcgttttttgacaacttagctttggatccagaatcaaacatagcccacacaaatgaaaataggataacatggattccacaaactcttcacactttttatattatatatagtacttgtgattttataatataaaataaactatatcaatgatattagctagatatttaattcgcgttgaatgtggatactacaagagtttgatagattaaattgattcaagcaaatattttagtgggaatttgtaaaacactacatcttcgttatcgacttgggtatgagactaagagacaatatatatatattctattaaaaaaactcactgttacatgcgataaatggatgaataattcttgcttaattaagtttgagtatattactttgtttgtgacaaccgaaatagtgtcaagaacttcatatcactcggtggattactttatttgattgaatcttagttgataacgaaatcctttctttttctatgtatttcgattattaatgtaatcagaaaattttaagtattttttcacgttatccaactttgagagtactgtccttgtgttggccaataagtggttgaatatatggtaaaagtataaaagctcccatcatgttggacctactagctttgctatatataaaatgtcctgtcattgcataacgtaccactttctgaatctgttttacgtgcctatcaatgatttgtctttaacacttaccgtaatattctacaattaagttcaagtgcctagattttctaaatgtgtataaagacattatatatggcaaatgatcctttagataaccatttcatttaaatcaagcattcgattcgcattcatagataaaatactattcaccggtccagttctaactagccatccagtctggttagaaagcaaaattgtttattttattttaggttcagttttcagatcggttttctaacactgttttggtttggttctcgtatcggttcaaccggattggatagtcataaagaatttgaagtccttaattaagcccaaaacaagtagagcccatatatatactaacaaagccgtgattagggtttttggttttcgtcagaagatttcaaggtttagggtttctgcaattcaaccatg

SEQ ID NO: 6387 - DNA, 3000 bp, Unknown
  misc_feature (1)..( 3000): cDNA_ID_2134078_gDNA_ID_1621091_Annot_ID_170732 3000 nt of promoter + ATG
gcagccgcgaacagaacacgataagtcttcccccgggtacaccggcttatggcaaacaagacaatcaacctgacaccaaatcccatatagtcattatgtcaataaatctaataacttagtcactaattgacttgaagattcgaatgactttaaaagtaaactagtagtcaaacaatatctaaatgaatatgagatcttacacggacatcactaaagccaaaaaaaggtgatgaattcaattcacagatgcaatatacttcaaacaaacttcataactcaagatattatgtatatcctaaaatccaaatcccatgtagtctatatgtcaataaatctaaaaacttcacaagtcattaatttgacataacaaacaacataccattttcttggcaccaacaagaaaaggaaggaaacatgtcgactctgaaacaccagaagccactcttctcttgacccaatccttcacatgatcatccaagacaaaccctttcttgactctgtcagacggattctgtttccgggtaaaagcagtgactccattagcaattttaatgtccttgacctcttcctccggtggaatcattggtaaatgtttcccattgcattctccggctagattttccggggaattgatagatttggctaattcagggcctgaagccgccggaagaaaagaagggcaacaagtgagagcaacagatgcagacatagacatgtttcccagatctaacatcctaaactcgaaagtacaaaagatggaagagtaagaagaagaagacagttacgttttgtctttgttgggtaggcgaaaagcgaagagacatgaaaaaatatggagggaatttaaggcgggagatttgtcctaaaatattatacaaaaaggtccttgtattttaaatattgttttaattgcccccaaacattttttctgctagttaaatttctttaccaactaaaatcccccacattcatatctaccaataacagtgctacacgcaatgattaatgccggttcccaaaacggaactgaacaaatagctaaaattaatcaaatcatgatttgaaagtatatcgtattgatcagtgttcggtttgttagttataaacaagatatttcgttttcgtttttggatatgtttacatgtcattttaggttcgttatgtcacaacttaaatcaaattatatgctttctaggtatgttttaattaattactctcttttttttatcatacatctttacagactcacgaaaaatgatctatgatttcatctagtgaaagataaatggattaatcagtttgtataacatcttaatttcgtttttttttttcatttcgttagtgtctattgtctaaatttcgataattcagttttcatttgattactatactcaaacaaaatacctagcgtaaattgctttgttagaccatatttagcaacaaaatctaataaagtattgatctttgagtctaggtttccacagttcaccacgcaatactcacctttctttatacactttacaaagataatgagtaatcgttaaataatccaaagaatttactcatccatgtacacatagtttatacttaatcctcttagcaagaaattatggcgtctaagaatcgatttagatgaaaaacggaccaactaagcaaactagaatatatgttcacttcacgacaactttgtatataattatacacaaaacaatatacattcattttgtatgatatacaacaaatcttttgaaaatactacactcttttctttaatgtatttttaggctaatgttgaaatattcttgtatttatattatgaaatttgaattagaccggatcaaaccggatccacgttatcttgattttaaaatgaagaactccaaataaatctagattacaaactgattatcatttgctaaaaagatcctaaaggttatcatttgagattcagcaggcgaacaacaaaaattattactatattcgtacggttccattcgatttttgttcactcatttgttgttactacactttactactcaaaatttgttaccctcgtttagtccgattcgatggttcctcatcgttcattgcggtgaattactatgaaagtacaaattaaaaataatctgaaacattgatgataacaatgtagcaatgtagtcgtaacatgccaacatcgaattctgggccaactatattttgctttggtaagcgaaccattcattcagtttttaattattatatccaattgtttgacgcgttttaaataaatcaataacataatccatgttcataccaattaaatatagatatgtatgtacgtgttgtcttgtcttatgaatcaaccctccttggagaatcttatgccataaagccaataaaaagttacctactctttcaatttacctcgttcgtttaatctgttttgatcaacactccccatattatcaaatcatttaggaaacgtataaatgaaacgaaaatatatgttttagttactcaacaatgttattaagggtcaggcaacaaaaaaatcttgaggggtaaaaacaaagttctcgatttaataattatagactataggtttaaacagagacccacaaattctgcatttctcaccttccaactgtaactttaatatttgtttcaaattgacacggcgggtaaaaataatcaggtgtatcctccctcacactaaggcgaaactaacatactaataaggaagagacacgtgtaaaaaagaccggtcaaagacgctacgtagataaaagtcacgaagcttgctcgtttttaaaattcaaagaggtttcatctccgtataagtaggcgacgaagcataccacgaagatcgaaaaaaaacaaatcagattctcaaatactgaaaataaaaagaagaagagagaaatctacggtggtgggtgattcgccggagttcaatttcgtagctagatttctcctccttttccccccgacgagctgtgcgagagagggaggggaatc

SEQ ID NO: 6388 - DNA, 3000 bp, Unknown
  misc_feature (1)..( 3000): cDNA_ID_2106236_gDNA_ID_1621091_Annot_ID_170731 3000 nt of promoter + ATG
accatttagcactactgctaattgcaatcagcacacaacaaaaatgggatttgttatttgaaagcacttatgttgcatgtctactacttaaattagaataaacaatgtcacagaataaaaaaggaagaatctttacgtgatgcagagtttgatcgctggagaagtaaacatcttttgacattgccattgacggccatggccagcgaattgttgctctgtcattaggacccacaaatcccccaaaaagattgaaatttgtttaattttcctcaaaacaaaaaatgacgattttgacctcgagatttttcttacccggagagaaggctaacaaagccggcgaggccaagctccgtcgtctccattgaactcacaaccatcatccaagtaaatatcgcaaatccacacaaatgcctgccaaatttcaaaaccccgtttacaaattttcaaccaagggaaaaaaaaatcagaagaaaacgaaaacatacgtccagatgttgagagtctcattgtgccatgagaaagcgctgaggaaagtttctttgattgaccactcacatcgataatgattgtgtatgaactcgttatctttcaaatacctaggtaactcctcgaacttcatcaatctcttctcagatctcttcttttcgccggaatccatacctttaccatttcttatcttcgtagattccttcaccgttctccgtttctgcatgattcccctccctctctcgcacagctcgtcggggggaaaaggaggagaaatctagctacgaaattgaactccggcgaatcacccaccaccgtagatttctctcttcttctttttattttcagtatttgagaatctgatttgttttttttcgatcttcgtggtatgcttcgtcgcctacttatacggagatgaaacctctttgaattttaaaaacgagcaagcttcgtgacttttatctacgtagcgtctttgaccggtcttttttacacgtgtctcttccttattagtatgttagtttcgccttagtgtgagggaggatacacctgattatttttacccgccgtgtcaatttgaaacaaatattaaagttacagttggaaggtgagaaatgcagaatttgtgggtctctgtttaaacctatagtctataattattaaatcgagaactttgtttttacccctcaagatttttttgttgcctgacccttaataacattgttgagtaactaaaacatatattttcgtttcatttatacgtttcctaaatgatttgataatatggggagtgttgatcaaaacagattaaacgaacgaggtaaattgaaagagtaggtaactttttattggctttatggcataagattctccaaggagggttgattcataagacaagacaacacgtacatacatatctatatttaattggtatgaacatggattatgttattgatttatttaaaacgcgtcaaacaattggatataataattaaaaactgaatgaatggttcgcttaccaaagcaaaatatagttggcccagaattcgatgttggcatgttacgactacattgctacattgttatcatcaatgtttcagattatttttaatttgtactttcatagtaattcaccgcaatgaacgatgaggaaccatcgaatcggactaaacgagggtaacaaattttgagtagtaaagtgtagtaacaacaaatgagtgaacaaaaatcgaatggaaccgtacgaatatagtaataatttttgttgttcgcctgctgaatctcaaatgataacctttaggatctttttagcaaatgataatcagtttgtaatctagatttatttggagttcttcattttaaaatcaagataacgtggatccggtttgatccggtctaattcaaatttcataatataaatacaagaatatttcaacattagcctaaaaatacattaaagaaaagagtgtagtattttcaaaagatttgttgtatatcatacaaaatgaatgtatattgttttgtgtataattatatacaaagttgtcgtgaagtgaacatatattctagtttgcttagttggtccgtttttcatctaaatcgattcttagacgccataatttcttgctaagaggattaagtataaactatgtgtacatggatgagtaaattctttggattatttaacgattactcattatctttgtaaagtgtataaagaaaggtgagtattgcgtggtgaactgtggaaacctagactcaaagatcaatactttattagattttgttgctaaatatggtctaacaaagcaatttacgctaggtattttgtttgagtatagtaatcaaatgaaaactgaattatcgaaatttagacaatagacactaacgaaatgaaaaaaaaaaacgaaattaagatgttatacaaactgattaatccatttatctttcactagatgaaatcatagatcatttttcgtgagtctgtaaagatgtatgataaaaaaaagagagtaattaattaaaacatacctagaaagcatataatttgatttaagttgtgacataacgaacctaaaatgacatgtaaacatatccaaaaacgaaaacgaaatatcttgtttataactaacaaaccgaacactgatcaatacgatatactttcaaatcatgatttgattaattttagctatttgttcagttccgttttgggaaccggcattaatcattgcgtgtagcactgttattggtagatatgaatgtgggggattttagttggtaaagaaatttaactagcagaaaaaatgtttgggggcaattaaaacaatatttaaaatacaaggacctttttgtataatattttaggacaaatctcccgccttaaattccctccatattttttcatgtctcttcgcttttcgcctacccaacaaagacaaaacgtaactgtcttcttcttcttactcttccatcttttgtactttcgagtttaggatgttagatctgggaaacatg

SEQ ID NO: 6389 - DNA, 3000 bp, Unknown
  misc_feature (1)..( 3000): cDNA_ID_2134074_gDNA_ID_1621091_Annot_ID_170730 3000 nt of promoter + ATG
atagaatggagtatgcaggagtgctttgtctgcaagcaaagaacacaatggcggtgtgttaagtgtccaatggctgctcatgataaacattctccatggtcaaaagaaatacttcacttaaaagaccaaccaggaagagcagtttgttggaggcatccaactgattggcggctagacacaaaggttgattttttagtttaccgctttcataagatacttcttgaagcttcttacgatttgtactttcatagagttttactcacaggactgacaaaatctctgttgattgagcagcatgcagttgcacagagtgagattgaggtcagtgtttctttgccacgtgccaaatgtgactgtagtaaaggaaactaattcttacatagacttgccgctcgaaaatcaaaaagagggaagagatttgaaagctggatattttgtttttatcttacacaatttcaagagctaggcactgaatgtttatctactttcttattcaggaagtcttttgccagttgcctttgccatatgtggaagaggagtttaagattgacttagcatggaaagattctgttgtgaaggaagatccgccttcttatgtgcacattagacgcagtatcctttatagtttccacattcaatatttctgccttaaaagtacataattctcattttttcacaacattagtgtgtcttttccttgactgagttaagatatttacctcgttaagaaaaagcgtgataatgctaatgatggtgttgggtgcacaaattgtggccctaattgcgatagaagctgtgtttgcaggtatatttgttaattaaccaaacaaattttctctgttaacattcatttcgttttgaatagtttccgttttgaaaaatttctctcagggttcaatgcataagctgttcaaagggatgcagctgtcctgaaagttgtggaaacagaccattccgcaaagagaaaaagatcaaaattgttaaggtaaaactagtctctagtttatgattcttgcattacactcttcttgtgtttttttatcttgacatgtcatgttattggttttacagactgaacattgcggttggggagttgaggcagcagaatcaatcaacaaagaggacttcattgtcgaatacattggtgaaggtaaactatcttgatttggtctttgagccttatgtttgtggtggaaagcgacagagtttttagtgatttgttttcactctatccacagtgattagtgatgctcaatgtgagcaaaggctttgggatatgaaacacaaaggcatgaaagacttttacatgtgtgagattcaaaaagacttcacgattgatgctaccttcaaagggaacgcctctcggtttctgaaccacagttgcaacccaaactgtgtattggaaaagtggtaaagcatatattatttcatataaatatgtcgatgatgctcgagtaagagagcatgagtcagtttgattattttgttctaacaggcaagttgaaggtgagacccgtgtgggtgtctttgcagctcgtcaaatagaagcaggagagccacttacatatgactacaggtcaagttcttgaccatttgtttcttttatgtgcttataattagcctaagtaatctgagattctgatatattagcttctctctttgtgtaatggcagatttgtgcagtttggtcctgaagtaaagtgcaattgtggttctgaaaactgtcaaggttatcttgggacaaagaggaaagaaccaaactgtttggttgtatcttggggagcaaaacgcagaagattgtttcaccgacctatagcccgtaaaccgcagcaagattagctgcaaaatatctataaacaatgtgctttgatagtttgtctgttgtcgttatctagtaatctctgtggagatatagaaccaatcgtgcttgtaaccgaagcttaggcccacaattgtataactgctagctgaagccacgggatagaccggtcggttataccatacattctttcagttccattacaacacaattattatttaacccttgtcaaatttgaatctgatttaagaaaatacattcccttaaaaaaaactatctaaagatctcgcactatcatggcagaaaattcgacagaacaaattttttgatataaccaaacagaagaaaacaaattatataaagactacaatcatattacaaaatcgctatagcaatctaagtatcaagtttcatcatgtgactggtttcgctctgccttgagctcatcaggtgatcgagtttcagatcacgaccagttgattaagggtcggcctagtcccctttttttgtttttattacagaaaatacaaaagttacagagaatacaaggtcgggttgcagatcacgacgttacggatcatcgtggaatgtgggtagaaagactcataagactccatgaattcgatatgtacctcaatggtgcgaggatcaggtttcgggatacgtctttgttgttgttgaagtttctcgactttgttgtttgatgaaaatatgaaattaatgtattattgatagataagtaaacaacaaaatagtaaaacccaaagatgaaccaagtgacaaattgtgacaactacatggtagctatcctaattatcgaacataaatttttcatcaaaagtctttaacgaaccaagtgaatgacatgtttcaaagtcgaatactaattattgtactggtttaaaagatttgttccaaattgatatgatttaaaccagaagtctccgtatgaaacggagacttactcttcggcaagagaaggttttagtcaaaatccccattttttaaaaattctcaacaaaacgcctaaaaactgaaagtgcttattcctcttctccggcgaaccaaagatcaaacctttgcgagagaatttccctctttttcggcaacgagtatatccaatcagcaaggaattttatgatcgcttgataaattgaaactatttggagtgggtagtgatg

SEQ ID NO: 6390 - DNA, 3000 bp, Unknown
  misc_feature (1)..( 3000): cDNA_ID_3092513_gDNA_ID_1621091_Annot_ID_170726 3000 nt of promoter + ATG
acacaaactattaggagcacaagatgaaggatacaagtcgtcaatcttatgtttcagtggtcatcaataataacacaaactattaggagcaaacaaaacaatttatttaaatctcttttgaatatgttttagctcaaatcaataaataaaggcgccgagaaaaaaacagagctcatttgcacaacaatcagtatagtccaaagcttaagcaagtgaggacatgtgttctagctttcctcttgagcaggagcagaaacaggaggagtaggttcaagcattcttacagaacgaggaagcataaactcagcaaacacagggtagtgagatgaaggatacaagtcgtcaatcttatcatttacgatctcgcacattacaggaactatagatctacctctgtaaagtatccaatccgtgtgtagatcttgcgtctgtcggtcccagcagaggcataacgctctgaatatcagcttcaggaactcgaccgttccctgcttgtcacctgaacaaaggcccaacatgttatgatctagaagctttggagataaatgatttttatagctcatgagagggtggaatgtttcacacctttgaaatcatggtatgttcttatgagagcgacgttttttcttactcgggcacttggccatgcgtctctcatatctcctaccacaccatgctctctgcaagttgaatgatgcccaaaagccattcatcagcagtcaaataagtaaatatgctttgatttgaaactagttgatcagtgtgtgaagaatggtttagccattcttgcattaactaggagccctgaaagaaaactctaggagattggtaaaaagcacaaaacttgtgaatgtgatattaaggtacctagatctgcccaacagaaaccgccctgttgttgattccttctgtgtgttgaatcctccacagtacacaaccggcaaagtgggaggtaatgatgctatgtgttgccatgtgagtaaagcacttcgcctacgggcacgagggctgatttcatccaagtttgtgttgactatctgaaacgaaaaaccaggcggctccgctcctttaagttggaatgtgtaggcagcttgtcaaagaaaaccaaaatactgatatataggacaaaaacaccaaaatcataaactaatctaattatagtttaactaaaatgaacccaactagtaaaaaggatatagcccatgtcgctatacaaggaactgcggaaccccatgccgtgcttccagggaccgagggagactctgacaaccaaaaagttccaccctctagcagctctaccttcaattagtataaagtatagtatcaagcagcgtattaattatttagagcgtagttatgtattgtcttatcaaccgaattaatactttttccttgttgaagaagatggtgcagtgttcatcattagcatccccaggtcctgttcttgatatgccaaattgatcataggctgcaagcaaagagtactaccatctatttaagttcaaagaaacaatgcaaactgaagtattattaaggcatgtgaaactagaagctaagctccatggttcacagtaacaaaaaccagataaacaataccaccatcatttcaaagaaagcacctgtaaatgtgagaatatcatgcattccattgccataaaacagatgcattaagtgcactagactccggcttttgtagcctaaaaacactaacttgaacttgatgcaaaaaaggatacggattgacaaattggctatcagatttaagcaataccaacatatactaaaaatagaattaaatctagtagatcacaaatagatttacatagtagattgagaacaagaagagtggtctacgattgataacaagattcacactagtctgtgaacttaagaagaagcagactgctgtatacaaacagggttcaattagacctaactcacaccatttaagtagagattagacttccataaatcaaagagaattcaattatacctggcaacccctgctgaagataatccaactgcgacttcacacctaaccaatgtaaacatgataacaaaagatcaaaacgaaaatcctatctctgttcaatatttcagaaggcaagaaaaagcacaagaatcaatctccagcattcaggaaaaagaagccttcttggagaaccaatataaagaaggaagcaagatctaacaagcattgaatcaccaatacgaagaaggaatcaaagatctaacaagcattgatccattgtggctaaagattattaccttgttgggtacagagaacaatgggggagtaactagtgatgacagtgagacacaaatctttccttttgagccatgaattagggctttcttcaggtagatcatcgtgaagattgaatgacatcacactcaaagacacactcattgttttgtctcctttcttcttcttcttcttcctctagttttctctcttctttctttatggtttggtaagacgaataaaaacaaaggtctctctcacatcagcagcagctcatcgtcgtcgtgacctacatgattttcaataataagtcaaaagcttatcaatttttatgtgaaaaaacagctcaggattcgaagaaagaaaatcaatcaacataatttattatattatattattgaggaatccaatacgaaccttgttgtttcagactcttatcaacaacaacagtggagaaaatgagtcttggacatttgacgacttttgctggaaaatctgtgaaagtcatgccctttgatcaccaaaagtctcttaaagccatttcctgatacatgtataaatcagcaacttcagaaacaaatcaaatcggaaacgggggaagaagaagaagaagagtaactaatcggaggagggaccggtgaagtcacggtggagggaccggtggagtcacggtggactaatcgtcggctttttggtctctctctagatttttttaaggtttaaaattaatttcagacaagcttcgaacccgagac

SEQ ID NO: 6391 - DNA, 3000 bp, Unknown
  misc_feature (1)..( 3000): cDNA_ID_3048291_gDNA_ID_1621091_Annot_ID_170724 3000 nt of promoter + ATG
ggctttggctctggacctgaactagagaagaagcttaagtatgctgaacatgtttcttatggcgttattttcgggaaagaactcgttaattctccagccaatgttctcactcctggtgaggattgtttcttgagcatcagtcttagacttttcattttttttttttttaataatgtgagcatcatgtctgttgaagtttatttcaaacatttttctctaatctgctttgtatcttacagccgtactagctgaggaagccttgaatctggcttccatgtacagtgatgtcatgactgccaacatcttgaacgaggagcaatgcaaagagttgaagatgggttcatatcttgctgtagctgctgcttcagctaatccacctcatttcatacatcttatctacaaaccttctagtggccctgttaaaacaaaacttgctcttgttggaaaaggattgacatttgacaggtactagagctgttggcttctgtttgccgcatcaatctctttatttaatacttattagttattgaccagatggtttttgttcacagcggtggctacaacattaaaaccgggcctggctgcttaattgagctcatgaaattcgatatgggaggttcagctgctgttcttggcgctgcaaaagccattggtcaaattaagcctccaggtgttgaggtaagtttatcacacggagcttgcgtttctgagttaaatgaatgtacctaaacaaatgcttcgttgcacaatcaggtgcactttattgtcgcagcttgtgagaatatgataagtggtactggaatgagacctggagatgtcctcacagcctcaaacggaaagacgattgaggtatcataacaccgtttccatatgaattcagcttcaaaaggttcgagctttccattgttagttttacgccaaactaattgtgggtggtattgcaggtcaacaacaccgatgctgaaggtcgactaacacttgcagatgctttagtttatgcttgcaaccagggtgtcgataaggtattgtttcaaagattcttcgacttattaatacattctttctgttggtttttctctcaagtctcaacttgtgaattacaatatttgcaggttgttgaccttgcaacattgactggggcttgtattattgctcttggaacatcaatggcaggtacatagtcttgtgttttaaataagacagaataaaattctttcgtgatggttgactattggtttttctgcaggcatatatacacctagtgataagcttgcaaaggaggtgattgctgcatcagagaggagtggagagaagttatggagaatgcctatggaagagagttactgggagatgatgaagtcaggtgttgcagatatggttaacactggaggccgtgcaggtggatccattaccgcggctcttttcttgaaacaggtgagtatatcataagagtggaaacaaaagaacacatttcaatactgacgctattgttctctaacgaagaaccgggtttggttaatggttgcagtttgtgagcgaggatgttgagtggatgcacatagatatggctggaccagtgtggaacgagaagaagaaagctgcaactgggtttggagttgcgacactagttgagtgggtacagaaccattcttcttcttaagatgaagtctggtgatctctgactgatgtgaactagttgtgtttttgctttgtgtggtgggacaagttttttttttttgtgcaactaagtatgacaagttaaatcaatcagaagattagttttgttgttgtatgcttacctagtctaaacttaaattcaacaaccaccgtgagagacacagttgagccaccgttgttgctgtgtcccgtcatgttgttgtatttgaatgggtccgtgagttgttgagaaggagagatagtcgccgttcatcaccactacagccaccgtgtgtcaccggagagtgacaccacgagtcacaggatgtcaaccgctgtcaccggagtagtcgtagtccatcgccaaggccgttaagggtaaggaaaccctagatctattatgtaacttgctcaggaagtttttggctttctcttatgatctgtgctttgttttggttttgattgttgagctatgagaccttactgccgtgagcttaaaccgcctcatcgagccccgagcagatccaccgagagtaatcgccgagaaaggtaacggcgaaccttatctcccgtgtttgttgttgattattgaaccggatcttaaccagtctaaaccaatgactcttaatttagttaagaccagaaccgaaaccaatgacaatttgcgttgttggtgtattattacgtctgtgtggtgtaactagattataagaatttggtttggtttaattattaaaccaagtctaattaatttaattggaagaataccaaatcaattaatcgagatttctaaatttggtttggttattagattaaatcatgtatttttaattggatttcacctattgatccacaaatgagttacaaaagtgataatactgacgtgtttttcaatttcttttatcacttcgtgtaagaatgccttgaaatatttgaatttctataaatagtatcaaaactatgttttgtataaacaactttaaatttgaaggcaacaaataacagtagtaagtatttcagatatggttatcaagataagtttagtaatagtgaaacatgatcacattaaaatttgaaaagaagtctacagctaatcaagattgttaagatcgggtcggataatagcaatagtgagtgagtcaagtaaaagaataatcatcgtcaacaagacacgacggtcggacgcgggcggacgcaagaagagactgggccactctaattttctaagataactctaatttcatactatatatatatatatatatatatatgtctgcatcagccactctgttcttctccttataaataaatataaagaagctaagctcagtggagacttctcaa

SEQ ID NO: 6392 - DNA, 3000 bp, Unknown
  misc_feature (1)..( 3000): cDNA_ID_3092689_gDNA_ID_1621091_Annot_ID_170701 3000 nt of promoter + ATG
atcccataatcacttatattgatagtgaatatatcagtaagaaagatactgcatggtagtttatgctaatatcctcctgaaagaaagagataaacagcactgatgagctcaaggttctgatgaaaccacaaaaatacattacattaccttcaggcttcagaaattgcaggcttcacttatggtatctctttcagatccatatttagcgtagtagcacatcaacaaaacatcacttagaaaaggctcagatcagtttgagaaatggatccgtagcaaagcagagcacatcatatactcgtgaaatgatcacactggcatccctcagagataggtccaagcaataacaaaaagcatggattagaatctgtggccatgtaaaattaacaatcttctaaatcaagttcagcaaatatttacgaactattccttacttgagttgttggaacattctgcatcagtgatgctgcttttgaaatgcagaaagagaacagtgcttagatagaatcttcatataggactccacgattttccttggtaatcttcaatctgtaattcaggttcaattttactgaatccgtagcatttgttcagtttccgtctttgcataaccctccttacttcttctgcagcatggtagttaccagattctgtgtgaatcttgctaagcaatacataattggctggattatcgggttcagatttcattagctcgtttgcaataatttttcctgcaacatcaagcctgccatgagtctcgcaagcagatagcagagaactccatattctggcacttggtttcattggcatatttattgtgacctcaaaggcatcgtcaatcttcccaaacctgccaagaagattgatatagcaagcataatgctccaatgtgactggcatgtggtatttcccagcttgtgtgaatatggtttgagcttcttctaccaggccagcatggttgcaagccgataaaattgcaagaaacgccatatcatctacttcatgtccaccttttatcatccctttaaagatttctaaagcttctgaaccatgtccatgaagaccgtatgcgttaatcattgagctccatgacacaagatctttctcagtaagttcataaaatacttcacgcgctgcagaaagactgccacactttgcatacatatctatgagggcgtttcccaataagatatgtgacatgaagccacatttcaggatttgagaatggactgtagatgcaaaactcaacaatgtcgaattggtacaagctgagacaattgccaatagagtaaccgagttggcttcaattccttcttttctcatttgatttaacagattcataacttcagagcaatctccagtctccgcatagccgctaatcattgaactccacattacaacatctctcacttttgatgtttcgaaaagaaccctagagagacttacattaccacatctgcagtacatggtcataaaagcagctgttaaccgctcgtcagcatggcatccatgacgaaaagaaaatccatgaatctccttcaccagacttgagccataattcaattctacacatgcaggtaaaacagacaacagtgtgacacgattgggcctcaagttttctctctgcattgctcgaaacaaatcaacgcccatttcataattctgatttgcaacacaaccggagatcatggcagtccatgagacctcattcttcacctccatctgatcaaacacatggaaagccgccgcatgatcatcaaactttaagtacatatcaaccaaagccgttgataatagaactgattcctgcatcctctcatcaacaagaacaagagcatgaaacattcttgctaccttactgctgcttcccatgcgagtgcagagagccaatagagatgcaaccagctcggacttgggaataaaaccataaaaatacatctccttaatcaacttcatcgcttcatacaacaacccatcctggcaacaactattgatgatggaacaatagctaactgtatctctgtgaagcatttcatcgaataccttacgtacagcatattttctcgagaatttcgcatacatagagatgagagaattggaaacaactgtatcacaatctgcacctgctttgagacaaaggcaatgaagctgtgcgccaagtaagaaaggctcttgttgaaaagcgcaagctttgatgacagaaggaagaatagctgtgaagccattggtccctaaagaatgaatctttagcttgtacagtctcaatgcttcatcgtagaattggtccgacaccaaacccttcagcttattgccgagctccaagtttaagcgggaagacaacgcccttgacattataacacgacggcctagtttaacccatctcatcggacgggtaataatgacgtgcccactatgactgtattatctttgagaaatagtttgtgtttgattcagtaaacaaaaagcacccatggcctaatggataaggcgcttgacttctaatcaagcgattgtgggttcgagtcccactgggtgtgtatttaataaatacaatttaatctttttcaaccttattatattcaattttttgtttgttaatattcaatttaaagcccaataaagttggaagatggtgggctagtaatgggtcgaggtttttgaatacagaagcacgtggagatcacgtgcgttgacgtcaaggtgtggctgtaccggtggatctcgaattcctcccctttggcttctcgaaggagaagaaaagtgtcggagagaaagaagaagccaatcatcatcgccagttgttcttctcttcgagatattcaaatcctccgtctctagagaatttcatatcaagagaatcaggcaagtgggcgattctctgatcccgagtcaaaccatttctggcttctcaagtctcctcaggttctgatgaatagattgtttgattttgcagtggtttctgtagtttgtggtggtggtggttggaaggtaagataggatatg

SEQ ID NO: 6393 - DNA, 3000 bp, Unknown; identical to SEQ ID NO: 6385
  misc_feature (1)..( 3000): cDNA_ID_1814264_gDNA_ID_1621091_Annot_ID_55503 3000 nt of promoter + ATG

SEQ ID NO: 6394 - DNA, 3000 bp, Unknown; identical to SEQ ID NO: 6384
  misc_feature (1)..( 3000): cDNA_ID_1814257_gDNA_ID_1621091_Annot_ID_55506 3000 nt of promoter + ATG

SEQ ID NO: 6395 - DNA, 3000 bp, Unknown
  misc_feature (1)..( 3000): cDNA_ID_1814254_gDNA_ID_1621091_Annot_ID_55507 3000 nt of promoter + ATG
aaaactgtcttacagtgtcatagtggaagctgtcaaggtagatagtctgcagaggctatgctcgtctttggaaccattatttcgaagaattgtgagtatgatactattccgaagtttaacttccacatagaccaaatcttgagaagcctgtaagagcgataaacttggtaatgatgtcgatcaatggacaggtcagtgaagaggtggaacgtgccatatcaaggttggagaactcgaaatctacttcaaggtattttatctagctatatacgatatcattttctggactggttccatgatctttacatcaatttgagttttcagatctacagaaccgaataagattcaaggcctcgatggaagaaatctgcaacttcggttcagaacacgaatgcctcctcatttattcacaggtgggaaagtcgagggagagcaaggctcagccattcacgtggttcttatagatgcaaacaccggaaatgtaatccaaacaggagaagaatcaatgacaaagctgaatattgtcgtgttagatggagacttcaatgatgaagacgacaaagattggacgagagaacattttgagagctttgaagtgaaggaacgcgaaggaaaacgtcccatcttgactggtgacagacatgtgataattaaagaaggtgtaggaactcttggaaaacttactttcactgacaattcgagctggattaggagcagaaagtttagacttggtgttaagcctgcaacgggatttcacatccgtgaagctaaaacagaaccatttgctgttaaagatcacagaggagaacatgagtatcttaaaactttggactgacttgataagcagagagagatagagtttcttggattgtctaccttaatcttggattattttttggcggtgttttttgcagtatacaagaaacattatccaccggttttacatgatgaagtctggagattggataaaatagcgaaagatggagcgctacacaagaagctactaaaatctaacattgtgactgttgaagacttcctacagatactcatgaaggatccgcagaaactaagaagcgtatgtgcatctttaatattgtgagtatctacacaagaaaatgattgtttcttgcttatgttctttctttgtgtgtatttaacagttacttgggagtggaatgtcaaatagaatgtgggataacacggtagagcacgcaaagacttgtgtcttaggtgggaaactttacgcctattacacagatcaaacacaccagacagctgttgtctttaatcatatatatgaatttcaaggcctaattgccaatggccacttcttgtcttcggaatctcttaaccatgaccaaaaggtaactcatctctctgtaaagctagcttcttttttttattcttccctttagagtctgcagtctctaaggatcctactcaaaagtggtgaaaacttttgaacttttttggaattcaacagatttctgcagacactttggtgaagactgcttacgagaactggcataaagtggttgagtatggcggtaagctcttgaattgcttaccagttgctaagaagggaataaaaagcttgccagagccaaaaatggctcagaaccatcaaacgcagcagaaggctctgcaatgccaacagactgtgaatggctactcatcagatcctcagcatctgatagagtatccttttgtccaacaaccttgctatcagttacgagactacacatcgatggagagttcttcagtttcaggctcatataatggaggccttgaagatattttcacggaggaaattcgagcgaggagttctgagatgctcgagacggataacatgcagagattgctcaagacatttgggatatcaggcgggtttggtaacagggatgagtccatttacggtttcagtgatcagtacgaagctcagatagacaagggttatatgagagaaggaggtagaggcgcagggaaagctgtagtgggatggcttaagctcaaagctgcattgagatggggtatctttatacgcaagaaagctgcagagaggaggcctcaaattgtggagatcgactaagaaagtactacaaaaaaattccgagagcttttcttttgtataaataaacttgaagcaattacttttttaaagaggatcaaccagtatatccttccatatctaagcattggagaaaaaggttaaacgactggttatcagtcagacaaagagtcttaataccgaaagtctcagtattcgtcctctttaagataatctccacaccaaatacatacgaatggagtgaaggttcctatatatattgacaaagaaaaattaaggatttatgaacagaatgaatttaacattgcatcaacttacttagcttaccattaaattacggagtaaaatctgaagacgtggaaaatcgaggtgagatggctggactggactagaccatcatcgagatatctccagcactcatatcaagaacataggtttcggttataaaagcctcccatgcacttttttttagagatctttctttgtgattgcttgatcggccgtatcaaaagcggttgtggattgctcaatatcaacaagagaggtaggagttgtagatggccgccggagcacagcagtttcaggagcggttgtggattgctcatcttcagagatatcaacaagagaggttggggttgtagatggccggactccagcagtttcagagaagccagctccttcgttaggcaaactcattctcgcagacgtggccctagttagtagcgcgccaaggcactatataagtgacacggcagggataagtcaaacttaaaggccgacttgactaatgggccctataatgttaggcccatgttttgagagagcaagtagagagaagaaacaagcaacaagaagttccttcctcagcctctttccgatttcttcttcagtctctctccactggttcgtcgacttcgtagaagcaaaaaatg

SEQ ID NO: 6396 - DNA, 3000 bp, Unknown
  misc_feature (1)..( 3000): cDNA_ID_1814250_gDNA_ID_1621091_Annot_ID_55508 3000 nt of promoter + ATG
gtgtaatttctgaatcaaatgaaaaagtacatacagtgccatttaggaaaaaacaattaaaagggtcaaattgtaaatttaaacgaactgtgtgaaacaaaaagaaagtgtagcgcctttttggaaaggaaaaagattatggaacccaaaagtgtaaaatcgtaagagtgattacgtgagaaatgtaccaccgacatctgaaccggggggactcatcaaaacgtggtcgttttattgtagtttctccgcgtttggtacatcaacacttgtagctgtgtatctttctaattcttcctttctttcgctgacagtgcttgctcacacactaatcgcaattgttgctgcattgccgactctgattcgttcgatttcagcattttgttcttccgaagcgatgcctcgtcgatccggagattgcatgagatgtctggtgattttcgcggttgtatcagctttagttgtgtgtggacctgctctttattggaaattcaacaagggtttcgttggatccacacgtgccaactctctttgtcctccttgcgtttgtgattgtcctcctcctttgtctcttctccagattgctcctggtatgctttacctttattctgatttggatcttacatgttcctcgttttatgattagatccttttacaagtttttcttgtgaaatttagttccttttcgagtaatgatcataattttgaggtgcccttttcctcgaatttcgttttgctctagtttatttggatctttgctctgaagcatctgattttttcaatattggatctttcaatcaaagctgtctcttttaggtttaatttcagtaagaaagaatctcgacttgtatattgtttaacaagttgaatttttgttttgtttgcagggctcgcaaatctctctattacaggttagatctcgattctgagcttgactttgttttagctgctatgcttgtgttgtttcctttattggttttctatcatgttgcaatatggtttgacagttattgagaagcttttattttgtaagattggtttcccatttggtatttgataccggaaaatgaattctgtcttgtgttgtgaacagattgtggaagcgacgatccagagcttaaacaagagatggagaagcaatttgtggaccttctgactgaggagctgaagctgcaagaagcagttgcagatgagcatagccgtcatatgaatgttacccttgcagaagctaaaagggttgcatctcagtatcaaaaggaggctgagaagtgcaatgccgccactgagatttgtgaatcagctagagagagagctgaagctttgttgatcaaggagaggaagattacttctttgtgggagaagagagctcggcaatcaggttgggaaggtgagtaaactgattgcacttctcagtctaccttaaagtgtttctctctgagaaatcgaattgtcacagctctaaaaggaaattgtttagttgtcaaggcaaagtcctatcttccacgtttctctatatacagtatgtagttttttgttttgcccttgatcggaatgtagctaaagaaaggccttgtatcaacttttattcatatataattgtccatttctttactatgaagcttcacttccttctcttgttagataagaagtcgtcatgtattttatggttcatgttcattgaaatccccaaaccatcatattctcaataaccaagagctgaaacaaagagtgagcttaatatcccatctaaacaaatccgagttcagaaagcacaagaggatcaagaaagtcacttggactctgttttcttctttgcttaaaaacctaataaagactgttttcagacatcaagaaacaggagagtttgtgaacagagaggagacaaaaagtagaaagtcaaacgcacttaggttgacataattatgatctcaccaggtatcacgcggtttcgattttcaatattccttcattcacaaaaacagctgtatttttattttattttatttttagggttcgccattaaagtgctctgtttattctaatattcagagggacagaatctataaaagcgatctacggctaaaagaaacagatctcgtttcagtgactcctgcaaaccgtccactccatgtggattgcacaaaaagttctataaagaaaatatagcttttagactttggtcctagattcaactaatctctttttctatttcttctgtgttcttctctgaagcttccattgtgtaggacttatgctcttttctcctacttagggaaagtgcattaattcgtatctatctaggcacagagattgttgataacttatcgtactttaaatggaaaattctatgaacaacagaggacatggacacaatcaagaacatgcagacaacttgccagaatcaaagagacagaagcttcctgctttggcaaggtaactcatattttatatgttagtgtgtcgtaaattcgattgttttggctaattctgaagtctttttgtatcggaccttgttttgagttgttcattagttacactgtccaaagagcatagtactgtggaaatatcatacttttcaaattttcgatagtcttgcttagcctcgcaaggcctcaaattttctcagacgtcgttgtatgaaaaaaaaactgtcttacagtgtcatagtggaagctgtcaaggtagatagtctgcagaggctatgctcgtctttggaaccattatttcgaagaattgtgagtatgatactattccgaagtttaacttccacatagaccaaatcttgagaagcctgtaagagcgataaacttggtaatgatgtcgatcaatggacaggtcagtgaagaggtggaacgtgccatatcaaggttggagaactcgaaatctacttcaaggtattttatctagctatatacgatatcattttctggactggttccatgatctttacatcaatttgagttttcagatctacagaaccgaataagattcaaggcctcgatg

SEQ ID NO: 6397 - DNA, 3000 bp, Unknown
  misc_feature (1)..( 3000): cDNA_ID_1814246_gDNA_ID_1621091_Annot_ID_55509 3000 nt of promoter + ATG
atggtgtttaaaagagggatggagattgtaatatttgagatttgaagggtttgactttgacatgttaaatacgtttaccaaatttaccattttttttatcatccttgcaaattaattatttcgtgttattttcataatttcttgatttttttaatcactaaaagaattcgatcactgaagtcatgatttcttcaattttataatcctttgttgataatatacttttcacaattttgtagtaactacaaaaagtaagtgaaacatatatttctaaaaatatcatagtcgatcgaatgacaggcttaaagtaataaaactaacttaaaattcggttgtactaaaaaaaaaaaaaaaaaaaaaaaattcggttgtactaacttcactcaaatgatttacgtatgtttaattatctttttttttttatttaagacagaatgtggttctaataccgtatattattaaatttctatatatataacataggtttttctattaatcatttttgaaaactcatgtttaagataattgtataagattttcattcggtaacattaaaattggtttatttgaatgctgaataaaattctttggatttatgttaaggatgccaactacaaaaataaaataaaatacaaatctctattgttgatcttttttattaaaatcagtcggagttttaaacttgtcccggcaactacgtaccacgagataaatatttgctagtccaaaaatgcaatagtctacaagataacaccagagccaacactttttcttgtgacaactattttagacatataatatttagacatgcagtataaatgcatacaattatactctattcatttgggtacattcattcattcatcaacggttcatgataatgttctcttcatatattactgtttacaatttgtccccaagattacaaacatgctatccctttagacgatactcgtgttcgataagaataagatcactttttatagattattcttgttttgttttctgattaatatgataccgatcgatgaaattgttgttttaaccgatctgattaacatttgggaaagaggatcctctcaaacgagaacataacataacagaacatcgtcatcatcatcatgtcatgttaccatgtattttttatacttgttaaatattttttggtctaataaattcatcatttaccttaaaaattcttttttaccatcgtatacagtttttcagctgtttgatagtatttgattaagattaatattaaattgacaaagataagtaaagaacattattatgcaatatgcatgattaagcacatgggacattctgagttttgcacaaactcacaagaggtagagatcggctttaatacacttcccatttattaattacaaatgttggtaagcattgatgtactacacaacagaaagagagatctatcatctcatgtattagtattatcaagagaatgcaataattatttttgtttttacttaataatcataatgtataccaaaataattaactaagggggtgtaaaataagttacgaatgataatttaaattccatatagaaaaaataaacagatagtaaagacaaaaatgctactatgttaaataaactattggtcccatctagtatactgatacattagttttatttcatattatcagtagttttttctattgtttatataaaacaatacgtttacaataggaaggcaggaaaataaaccatatggtgcacaaccattgtagactcaatcctgacaaaacccaataaatttgaggaactccctcaaaaattacggctttgttcaaattgaaaaactggctcttacgatcttagtttggtacacaatcacgtctgatttcccaagttctacttattcacctataatgaactataaatataatctgtaaatatcaaaaggtgggcttaactaggccttgggaaaatattgaattatttaaccttgtatgaatctgacaaactctgattaaagtcttggttcttactctattagtctaatacaaataaataaacatatcttatttccttaaatgtaatttcattctcttaaattatactaaaaaaactctacttgagaaacatgaaagcttaatttggcttgctgtgattgtagatgaagctgagtgctggacgtgctcgaaatgctattttaatttgagagaagaagatgttgatgagttaacgcgcgtctcaatattttgttggccagtgttacgattttcgaatgttaagattgggctaaaaagggaaataaaaatgtctaaaattatggatctcggttatggaaaaccagaaatatacgtcaaaacccgaacattcggttcgattaaacgataaaccaggataaaacctaaccgggtcgttaaacccaaccgcctccttgtttgagaacaaaaaagaagcttaaaccctttcttcctccgccgcgttctcaagctcaagctcaatctcaattctcaagctcaagccttttcgatttttctctttaaagacgcaattttgctttcgcaaccctctgtgtgatttcgtttccaaacgtaagctctacttttgttgtttaatttccaaggctttagcaattaagcaattaagcaattagattgatatacatagttgctcttagaagcttctctttttttttttttagcctggatttaattgtaaagtttggggattttggaatcgaaattgactgttttggagattgatgtgtttaggaaacacggctctctgaatcatggcgacatcagctgatgctcgggcagtaaagtcgctcaacacttccgaggggcgtaagagatttgtggtacgtgtttgtttaattatatagcacatgtcttttcctttcctttgtaaaacttcctctacacctatcatagagtccactgtttctcctcattagtaagctcacttatctgttttcgttgtgctctctaatatggctgtttgtgctttattatttctggatg

SEQ ID NO: 6398 - DNA, 3000 bp, Unknown
  misc_feature (1)..( 3000): cDNA_ID_1814242_gDNA_ID_1621091_Annot_ID_55510 3000 nt of promoter + ATG
ttctgaaggctcagccttcaccttatccaagttcctatagttgctgatgttgtcaatgtcatttgttcgttgagaagcagacttgaactgcatccagaaataataaagcacaaacagccatattagagagcacaacgaaaacagataagtgagcttactaatgaggagaaacagtggactctatgataggtgtagaggaagttttacaaaggaaaggaaaagacatgtgctatataattaaacaaacacgtaccacaaatctcttacgcccctcggaagtgttgagcgactttactgcccgagcatcagctgatgtcgccatgattcagagagccgtgtttcctaaacacatcaatctccaaaacagtcaatttcgattccaaaatccccaaactttacaattaaatccaggctaaaaaaaaaaaaagagaagcttctaagagcaactatgtatatcaatctaattgcttaattgcttaattgctaaagccttggaaattaaacaacaaaagtagagcttacgtttggaaacgaaatcacacagagggttgcgaaagcaaaattgcgtctttaaagagaaaaatcgaaaaggcttgagcttgagaattgagattgagcttgagcttgagaacgcggcggaggaagaaagggtttaagcttcttttttgttctcaaacaaggaggcggttgggtttaacgacccggttaggttttatcctggtttatcgtttaatcgaaccgaatgttcgggttttgacgtatatttctggttttccataaccgagatccataattttagacatttttatttccctttttagcccaatcttaacattcgaaaatcgtaacactggccaacaaaatattgagacgcgcgttaactcatcaacatcttcttctctcaaattaaaatagcatttcgagcacgtccagcactcagcttcatctacaatcacagcaagccaaattaagctttcatgtttctcaagtagagtttttttagtataatttaagagaatgaaattacatttaaggaaataagatatgtttatttatttgtattagactaatagagtaagaaccaagactttaatcagagtttgtcagattcatacaaggttaaataattcaatattttcccaaggcctagttaagcccaccttttgatatttacagattatatttatagttcattataggtgaataagtagaacttgggaaatcagacgtgattgtgtaccaaactaagatcgtaagagccagtttttcaatttgaacaaagccgtaatttttgagggagttcctcaaatttattgggttttgtcaggattgagtctacaatggttgtgcaccatatggtttattttcctgccttcctattgtaaacgtattgttttatataaacaatagaaaaaactactgataatatgaaataaaactaatgtatcagtatactagatgggaccaatagtttatttaacatagtagcatttttgtctttactatctgtttattttttctatatggaatttaaattatcattcgtaacttattttacacccccttagttaattattttggtatacattatgattattaagtaaaaacaaaaataattattgcattctcttgataatactaatacatgagatgatagatctctctttctgttgtgtagtacatcaatgcttaccaacatttgtaattaataaatgggaagtgtattaaagccgatctctacctcttgtgagtttgtgcaaaactcagaatgtcccatgtgcttaatcatgcatattgcataataatgttctttacttatctttgtcaatttaatattaatcttaatcaaatactatcaaacagctgaaaaactgtatacgatggtaaaaaagaatttttaaggtaaatgatgaatttattagaccaaaaaatatttaacaagtataaaaaatacatggtaacatgacatgatgatgatgacgatgttctgttatgttatgttctcgtttgagaggatcctctttcccaaatgttaatcagatcggttaaaacaacaatttcatcgatcggtatcatattaatcagaaaacaaaacaagaataatctataaaaagtgatcttattcttatcgaacacgagtatcgtctaaagggatagcatgtttgtaatcttggggacaaattgtaaacagtaatatatgaagagaacattatcatgaaccgttgatgaatgaatgaatgtacccaaatgaatagagtataattgtatgcatttatactgcatgtctaaatattatatgtctaaaatagttgtcacaagaaaaagtgttggctctggtgttatcttgtagactattgcatttttggactagcaaatatttatctcgtggtacgtagttgccgggacaagtttaaaactccgactgattttaataaaaaagatcaacaatagagatttgtattttattttatttttgtagttggcatccttaacataaatccaaagaattttattcagcattcaaataaaccaattttaatgttaccgaatgaaaatcttatacaattatcttaaacatgagttttcaaaaatgattaatagaaaaacctatgttatatatatagaaatttaataatatacggtattagaaccacattctgtcttaaataaaaaaaaaaagataattaaacatacgtaaatcatttgagtgaagttagtacaaccgaattttttttttttttttttttttttagtacaaccgaattttaagttagttttattactttaagcctgtcattcgatcgactatgatatttttagaaatatatgtttcacttactttttgtagttactacaaaattgtgaaaagtatattatcaacaaaggattataaaattgaagaaatcatgacttcagtgatcgaattcttttagtgattaaaaaaatcaagaaattatgaaaataacacgaaataattaatttgcaaggatgataaaaaaa

SEQ ID NO: 6399 - DNA, 3000 bp, Unknown; identical to SEQ ID NO: 6381
  misc_feature (1)..( 3000): cDNA_ID_1012984_gDNA_ID_1621091_Annot_ID_55513 3000 nt of promoter + ATG

SEQ ID NO: 6400 - DNA, 3000 bp, Unknown
  misc_feature (1)..( 3000): cDNA_ID_1814227_gDNA_ID_1621091_Annot_ID_55515 3000 nt of promoter + ATG
gagctacaatctccgtgcagctcatgagtctatacaagagaactggggaaaggtactaaccactttcttatctcgtaaatttgttgtgaataacatgacagtaatttgaaccacaacataataagtgttcctttgggaagttaataagacactaaaagtttcctgggctacttcttttggggtgttgttgcagtatacaaacttggctacatggaactggcgattgatgaagacgataatgactgtgtgtcatgtctatgacaaagaggagaactacattccttttgaccggttagcccctgaagaatctcagccaataaccttcctcaagaaagcaatgcctaactacacagcctgattcgccatggtctcaaactagtcttttgaaatctcaatatctttttgcagtcgccgatgttatatgtaagctttccaagcgatgagcttctctaacacttcaccaacgctttatactgttatcttctttccaatcttatcagaagagagaaactggtcaaattatctcagcgattgcaattcttttatcagtttcttagctataagaagattgaacagtctatatagtttgcaatgtactgtaatgtgatgaaaatttagttgatgagaatctttgaagatataaacatcatcttcttactgtgtctgcaatatttccgagaaagtcgtgggaaaaaagccaaaagaaaaagtgaagagagaaaagaaagctaaagcaaaattcttgggacttctttacggaaagtggaaagacaaagtcattcactgtccaacaaaagacactcacatgtccaaaataagggagcgaatcatcaaatctttagaaatctgagactgtggtcacagttcacaccaccatgaaaggagcttaaagctaaaggtcaaaagaggattaattctttacattgagaaagagtcatataaggacaaaacagaacacaacctgaaactggaaacttaaaatcgtattaatatcaatcctaacaaaagtctatgatcatgttctctatgtttatattctcttgactattgctatttctctcatcctatatattttctaacaaccctaaaacattaacaaaagaagcaaaccagaagcaacagaaacagaccagactaagctcaagatatcaaaatgtgaaatcagatgatgggaggaggaagagtctcccacacatcaaacacattctcctcactgtgcaatgcaaacaacctatccccaccaatagagaaatcacaaatggagccgccatagcttcttttcaacctagaagtcaaaacccagtctgatccacaaaacacagagatggaatcattcatagacgagaagagctggccttcatgcaaagcaagtttggggtaacaaggctcatcaggcatcttgcttttcatcaacctgctcctagaactccacctcacactactccctcctccatccatcctcagatcaataaaccctagatcttcaaactcattcaccacacatatcgaattgctctcttccattgctatcgcgtctctcactctcttctcttccgccattgtaagaaatccgatatcagaccaagaccagaccatgttcttctctcggaaatccaacaagctaatataacagttatctttccttggaaacaaagtagctacaagaagacaattcttaccactcaaccattgcaacttatcagcatctcctaaagaccaaccaggactctcgtaaaagaaatctacttgctttccagtactttgatcccaaactccaatcccatactcattacttcttcctttacagctcgtaaagatcttagaatcaggactaaaactcaaagctccagcactataactcttaacctgattatcatgactaacctgaaacttatacctaagctcaccagaagatgagctaaacaatcccattcctccatctcctcttcctaatctctcacaagcagagagtacaatgttaccagaatcaatccaaccaacatcgttcactctctggtaatcaagattaatcgttggatgctcctcaagcatccaatcaaagacatggacgacactcccatgagctatgcagcatccaccatccggaccagctcttatcgccgttccgtctccaggagctatgccggtgacggaacgagataggtggagtctgttaccgtcgaaaggtccccactttgcggttcgtaagtggtctattaagccgtagaacattgcttctttgtgaaggagacgctccgggatattaggcgggatgtttaagtctcctgttcggagaagatcgagaagaacagcgaagcaatctggattcctatcgatgaagagatccccgggttgtgaaagattccaattttcgtcgaataatgctccgaagaaggaatcgcgacctgcgttagcgagcgttgtcgctgtcgtttcgaagattctgccaccaacgttgaatttgatcctgtcatttgataaacccattatttctgatttctgaaaataggtgaaatcaatgatttttatggattcgaaccaaaagcattaatgacaagacaaggaagccatgaacgctcgaactcggattgaaaatattcgaaattcgatcggattcgaagaaattgaatcctgggaaaggataacgaaatgaaatctgatttatgattaatcaaattgaatacgatgatctggactctggatatttttttaaaaaaagctgagattcccagaagagaaaataaaacgatctgtcttggtctcggacatttttccgttgctcgggcatttaaaacgtaagaaacccaactggaacatggtgggacctactagagacaatactcgtgttactaccgtcagatgcttttagatattgtcgtctatcctgcggtcgagatttcgtgtaatttcaaagctaataccgtgatccatgataacgtttctaaagcccatatagatagatatcatcccattaacatatccttttttttgtatgctgaa

SEQ ID NO: 6401 - DNA, 3000 bp, Unknown; identical to SEQ ID NO: 6378
  misc_feature (1)..( 3000): cDNA_ID_1807277_gDNA_ID_1621091_Annot_ID_55516 3000 nt of promoter + ATG

SEQ ID NO: 6402 - DNA, 3000 bp, Unknown
  misc_feature (1)..( 3000): cDNA_ID_1814221_gDNA_ID_1621091_Annot_ID_55519 3000 nt of promoter + ATG
cttatgagagcgacgttttttcttactcgggcacttggccatgcgtctctcatatctcctaccacaccatgctctctgcaagttgaatgatgcccaaaagccattcatcagcagtcaaataagtaaatatgctttgatttgaaactagttgatcagtgtgtgaagaatggtttagccattcttgcattaactaggagccctgaaagaaaactctaggagattggtaaaaagcacaaaacttgtgaatgtgatattaaggtacctagatctgcccaacagaaaccgccctgttgttgattccttctgtgtgttgaatcctccacagtacacaaccggcaaagtgggaggtaatgatgctatgtgttgccatgtgagtaaagcacttcgcctacgggcacgagggctgatttcatccaagtttgtgttgactatctgaaacgaaaaaccaggcggctccgctcctttaagttggaatgtgtaggcagcttgtcaaagaaaaccaaaatactgatatataggacaaaaacaccaaaatcataaactaatctaattatagtttaactaaaatgaacccaactagtaaaaaggatatagcccatgtcgctatacaaggaactgcggaaccccatgccgtgcttccagggaccgagggagactctgacaaccaaaaagttccaccctctagcagctctaccttcaattagtataaagtatagtatcaagcagcgtattaattatttagagcgtagttatgtattgtcttatcaaccgaattaatactttttccttgttgaagaagatggtgcagtgttcatcattagcatccccaggtcctgttcttgatatgccaaattgatcataggctgcaagcaaagagtactaccatctatttaagttcaaagaaacaatgcaaactgaagtattattaaggcatgtgaaactagaagctaagctccatggttcacagtaacaaaaaccagataaacaataccaccatcatttcaaagaaagcacctgtaaatgtgagaatatcatgcattccattgccataaaacagatgcattaagtgcactagactccggcttttgtagcctaaaaacactaacttgaacttgatgcaaaaaaggatacggattgacaaattggctatcagatttaagcaataccaacatatactaaaaatagaattaaatctagtagatcacaaatagatttacatagtagattgagaacaagaagagtggtctacgattgataacaagattcacactagtctgtgaacttaagaagaagcagactgctgtatacaaacagggttcaattagacctaactcacaccatttaagtagagattagacttccataaatcaaagagaattcaattatacctggcaacccctgctgaagataatccaactgcgacttcacacctaaccaatgtaaacatgataacaaaagatcaaaacgaaaatcctatctctgttcaatatttcagaaggcaagaaaaagcacaagaatcaatctccagcattcaggaaaaagaagccttcttggagaaccaatataaagaaggaagcaagatctaacaagcattgaatcaccaatacgaagaaggaatcaaagatctaacaagcattgatccattgtggctaaagattattaccttgttgggtacagagaacaatgggggagtaactagtgatgacagtgagacacaaatctttccttttgagccatgaattagggctttcttcaggtagatcatcgtgaagattgaatgacatcacactcaaagacacactcattgttttgtctcctttcttcttcttcttcttcctctagttttctctcttctttctttatggtttggtaagacgaataaaaacaaaggtctctctcacatcagcagcagctcatcgtcgtcgtgacctacatgattttcaataataagtcaaaagcttatcaatttttatgtgaaaaaacagctcaggattcgaagaaagaaaatcaatcaacataatttattatattatattattgaggaatccaatacgaaccttgttgtttcagactcttatcaacaacaacagtggagaaaatgagtcttggacatttgacgacttttgctggaaaatctgtgaaagtcatgccctttgatcaccaaaagtctcttaaagccatttcctgatacatgtataaatcagcaacttcagaaacaaatcaaatcggaaacgggggaagaagaagaagaagagtaactaatcggaggagggaccggtgaagtcacggtggagggaccggtggagtcacggtggactaatcgtcggctttttggtctctctctagatttttttaaggtttaaaattaatttcagacaagcttcgaacccgagacatggaacccctacagacacgtgagtttttaataaccgttcagaccaaacaggagtaacaacaactgtttgagatagttttgttgaataaccgaattaaaccaaagtgaatacaaaaccgaaccgagatttatatttgtaaagatacgacgacgcctttgacgaaaaaggagacgaagaagatccaaacacggcgctaagctaagctccgttctcctcctcaaaactatccgacaaaagacagaagcagaaacctaaccctaatttccttttctcaaaatccccgaaaggtccgtctctctctctatctatctctctaacttagctctcctccaaattcggatgattacccattacgaatttgcagagaagaacaaatcctctctttcttcttcctccgtctctctacccctttcatgtcttctcaagtctacgactctcatccagggttgttggtgcatcaaaccctagtttttgatttcgcttttgagatttctcatgcttctttcgtttcggatctctctctgaatcagattacgtcttttgggctcttgttgttgttgtgctgctcttcaatctcttctccgttgcgttctatgtgccaaat

SEQ ID NO: 6403 - DNA, 3000 bp, Unknown; identical to SEQ ID NO: 6389
  misc_feature (1)..( 3000): cDNA_ID_1814213_gDNA_ID_1621091_Annot_ID_55521 3000 nt of promoter + ATG

SEQ ID NO: 6404 - DNA, 3000 bp, Unknown
  misc_feature (1)..( 3000): cDNA_ID_1814209_gDNA_ID_1621091_Annot_ID_55522 3000 nt of promoter + ATG
ggtgattggtcaagaataggtgtgatctccaaagaaacagaggaattgttgaagattgctgcttttcttgttgttcctctctgtatcttcctcgccctttcattttccaatgattcaactgattagaggttccttgattccttctatatatagctctgctttatctttcagaaagaatcaattagattagatctttgtatcatgaagcttgaacaatacttgtaggaaattgagtttttgtttacttttgaatatcttggatggtacattgcgtcttctatggggacaaacatacattgatacattgaatgaagtattactaaatgttttacaatgtgttttcgagttaaaaggcacaagaaggagaagcccgtcgaaaatccatgataagaagactggcaacactatgagcaagagctcctaagactacaaacacatggaatatctgatggctatgtcctgcaatatcaaaagccccaggcttccatctttcaggtatgcgggtaacataaaacgctgctcctgttgcatacaacacagccatcgcaagttcatatacgagagctataagcacgtttgggtgatccttatgaaggtaaagcacatgtgtggctggtattacgccagaaaatcccattgttaggaacagagctgctctgaaagatctgaaacgtggagctgagagtgatggagagaggagagtgaagatggcgaggagaccgaggattgagatcgatgagaggtagaagagtcgccagtaagtgtggcatgagaatgcatagtagataggtgcgaagaatgaacagacgatcatgagggagattccagcgtagtctagacgccagaagaagaggttgaaccgtctggagtgacaggcgaagaggtgtgacatggaactgcagatcaagcagcccattgctccggtcaagaacacaagccatggccatttcggaatggcttcgtagttaacatctccttgagaattcaggagcgagcgagtgtgtgtcacgtttaagtcctgccagtagacaccaccaaatcataagtttatgttgacaaaaaaacagcctttcttttcttaaacccgttgaaaaaatcatgttagttggaaagttaggtgagcacaaagaaaatctacagaaaactaaagtgagagaaacatcaaatagttggggcaggttacaagatttatgctaaactaaacaaatccaatcataaagtttgttccttaatttcggtaggaaatcacgtgatttcaaagtaggtgagcataaagagcaagtctagagaaactgaagtatccataaaaaccaaagttaaaaacagaaagatagaaaaaatccaaagagaacatgacatggtgggtgaaagttaccatttagcactactgctaattgcaatcagcacacaacaaaaatgggatttgttatttgaaagcacttatgttgcatgtctactacttaaattagaataaacaatgtcacagaataaaaaaggaagaatctttacgtgatgcagagtttgatcgctggagaagtaaacatcttttgacattgccattgacggccatggccagcgaattgttgctctgtcattaggacccacaaatcccccaaaaagattgaaatttgtttaattttcctcaaaacaaaaaatgacgattttgacctcgagatttttcttacccggagagaaggctaacaaagccggcgaggccaagctccgtcgtctccattgaactcacaaccatcatccaagtaaatatcgcaaatccacacaaatgcctgccaaatttcaaaaccccgtttacaaattttcaaccaagggaaaaaaaaatcagaagaaaacgaaaacatacgtccagatgttgagagtctcattgtgccatgagaaagcgctgaggaaagtttctttgattgaccactcacatcgataatgattgtgtatgaactcgttatctttcaaatacctaggtaactcctcgaacttcatcaatctcttctcagatctcttcttttcgccggaatccatacctttaccatttcttatcttcgtagattccttcaccgttctccgtttctgcatgattcccctccctctctcgcacagctcgtcggggggaaaaggaggagaaatctagctacgaaattgaactccggcgaatcacccaccaccgtagatttctctcttcttctttttattttcagtatttgagaatctgatttgttttttttcgatcttcgtggtatgcttcgtcgcctacttatacggagatgaaacctctttgaattttaaaaacgagcaagcttcgtgacttttatctacgtagcgtctttgaccggtcttttttacacgtgtctcttccttattagtatgttagtttcgccttagtgtgagggaggatacacctgattatttttacccgccgtgtcaatttgaaacaaatattaaagttacagttggaaggtgagaaatgcagaatttgtgggtctctgtttaaacctatagtctataattattaaatcgagaactttgtttttacccctcaagatttttttgttgcctgacccttaataacattgttgagtaactaaaacatatattttcgtttcatttatacgtttcctaaatgatttgataatatggggagtgttgatcaaaacagattaaacgaacgaggtaaattgaaagagtaggtaactttttattggctttatggcataagattctccaaggagggttgattcataagacaagacaacacgtacatacatatctatatttaattggtatgaacatggattatgttattgatttatttaaaacgcgtcaaacaattggatataataattaaaaactgaatgaatggttcgcttaccaaagcaaaatatagttggcccagaattcgatgttggcatgttacgactacattgctacattgttatcatcaatgtttcagattatttttaatttgtactttcatagtaattcaccgcaatg

SEQ ID NO: 6405 - DNA, 3000 bp, Unknown
  misc_feature (1)..( 3000): cDNA_ID_2134086_gDNA_ID_1621091_Annot_ID_55526 3000 nt of promoter + ATG
ctgccaatatgttgtttgattcctaaaatggaatcttttttaggatttattcagttcttttcatagtaatgtggtatcgattagtctgcgtctaagatgaaggttcttactttgtctctctataggaccaggatgttcatctgttgcatatggtgaagcagaagagataggaccatttcacattaaggcagatgggaagactctttaccttaatcaatattcttggaaccaaggtaatgaagtaatatgtgctgtgtatgttggcaagagagctatgattcaaaaaaagcttaaaactttcgaacaacttttttgtttgcagctgcaaatattttgttccttgatgcacctgttggagttggttattcatactcaaacacctcgtctgatttgaagagcaatggtgataaaagaactggtaatgatttagctgcttaagctcatgtcttttagatcctcatgtttgctgggtggatttatagtttcagtgttatgaaattcacagccgaagattcactgaaatttctgctgaaatgggttgagcggtttccggaatacaaaggaagggacttttatatagtaggggagagctatgcaggtaaattcaaagctcatctcattttttaatccattcattttgaccataaatactcatgtgtttcttctggtttgttttaggacattacattcctcagctgagtgaagccattgtaaaacataaccaaggttctgacaaaaacagtataaatctgaagggttacatggtgagcctgtcctcttattgatccccctatgattcattttctaaaaggttataaaactctaaaacaatgttgatgaatgtgtggatgcaggtaggaaatgggctgatggacgatttccatgacaggcttggtcttttccaatatatttggtcgttgggttttatatctgaccaaacatacagcttactgcaacttcaatgcggtttcgaatcgtttattcactcctccaaacagtgtaacaagattctggagatagcggacaaagaaataggtaacatagaccaatacagtgtcttcaccccagcttgtgttgccaatgcttcccagtcaaatatgttgctaaagaaaagacctgtaagtggccttaaaacttctcttttcaatgttacactctttagtgtcctaatttctctgtttattttacttagatgactagccgcgtgagcgaacagtatgatccttgtacggagaaacacactacagtttatttcaatcttccagaggttcaaaaagccctccatgtcccaccaggacttgcaccatcaaaatgggatacttgcaggtaaaattgccttgcaatatcttagaaacttggttttggaggaaatgagcctatttaagtattgtaacaattctgatcccgacagctttggttatgcagtgatgtcgtgagtgaacactggaatgactctccttcctcggttctaaacatttaccacgagcttatagctgctgggcttcgtatctgggttttcaggtctctttctctaaatatatccactgaaagcactttaacgatatcttttcttcaagtgttttggcgttttggtggtaaaaagaaaaggttttgttctttggtaacagtggggacgcagatgccgttgtaccagtcacatcaacccggtacagtatcgatgcactaaaccttcgtcctttgagtgcctatggtccttggtacttagatggacaggtacaaaacaaaactcaagatgagaaaatgagaatccttttcttatgttataagaaaaacttataaacagtcatgatttgaaacaggtgggagggtggagtcagcagtatgctggtctgaactttgtgacagtgagaggtgcaggccatgaagttcctttgcacagaccgaagcaagctcttgcgctcttcaaggcttttatatctggaactccattgtccacacatgagaacagcatcagccgcgacatgtctgaactcgttagtgactcataatgagttctgatttgatgtaatgtgtgatttggattctcaatcaaaaactttccacataggccgttgaaataagaagagggaaagagaataaatcagtgttttaagtgatacgttcaatgcttcttcttcttctggttgtttgtttgtttggataaacatttgctgcttggaatctaataaaagaagtttctaccatttgtcagccatacgatccttgaataacaacaacatattcttgtgtaatgagaaagtgaagtctgatctgtgatgtataggactgggtattaatctggtaacggatataatactggggtagaaaatagaatttagactagtattgggggtctaaacgaaattatacagaagcattgggcttgacttggcccatgagacctaagcccatattttaaagaattaggggtttcttcttcctttgtctgttcaaattgaagaaacctgtttttttttttttttttctggaagtgaattgtcttgagttgaacattgaacttcaattggtcggaatctgcaatttctgaggtaaaggtttcatttttaacctttatttgtttgggttaagatgagatctacgacgttttgaatgaggattcggacggttgggtgtttcaggtttgggctcagtgtcttctctcgcgcgtccctcttcaccttcttatttctacctgtgagtctcacttttcttctctccggtctttagcattctattgaatagaagaattggcatatagctattagctattttcctcagatcgtgttttaggcgactttctgttctcgcttgcttaacattgtacttcagtgtcgaattcatatcctacacatgagtctacataaacattgtgctttatgcttgcttccttagttcctcagaaatccttggaaaatccgcagatttatcttcttcgctatctggaattgttttcttcgtaggtttcttctcgttcatgtgtttttccctattgggataatg

SEQ ID NO: 6406 - DNA, 1432 bp, Unknown; identical to SEQ ID NO: 6386
  misc_feature (1)..( 1432): cDNA_ID_1808149_gDNA_ID_1621091_Annot_ID_55528 3000 nt of promoter + ATG

SEQ ID NO: 6407 - DNA, 3000 bp, Unknown
  misc_feature (1)..( 3000): cDNA_ID_2123319_gDNA_ID_1621093_Annot_ID_55546 3000 nt of promoter + ATG
gttatgagctttcgagggttatcagcagctgtttcccatttaacatagatatctagctgaccgttttccctttgatcgactgagatattgttttcctttgcttcttctactgctagtgcttcggccttattcgtaatagaaaagaactgattgtctttcttatcaggtgatgcaatattggcttgatcctcctcctgtccactgtgttgagacagctctctctgattgccacaaagggtgaaaatgttttgaattctcaaccttctagacgaggctgattccttgtcatctgcaccgttgaagcagttctctttacccaaaccttcagagttcaaactaggcattggtgttgttatcaagcagatgcttttatcctcgactatcactttttcttcctcttcttcaacttcttcttcttcaaagacagtgctcaagcatacccggtcaggatacatctgtgtaagcatattctctgaaggcttcggttgcaaaaggttagtgaagttgctactaatagtgttgcttgattggtgtgaaacagctccccacacttgcttgacaggttctggatcacccatgtcaaggtccattgacttcaccataccaggatcatcatcagagtaaagactcctgagtcttttggcaaacccactagtttcatcaacacttcctccatttgagcggcggaactcaacctcgatttcctctaaccgtctcctcatcatctccagttcctcttgctgctgaactatcctttcctccattctccttctctccatctcaacaaattcctcagccattcttcggcattcttcaagtttcttatctagttccgacttcaaaagctgggttctctcgtttactttctcttttatctcctcttcattggtagcacaagcttccctctgtgttaaaagagatcttaaagcagcaacttcctcttccttcttcttcagctgcttttgtgcctcattcctttctttttctttttgcttcttctcagactggagtttgataatgaactcatccatggcagctattcttgatcccaaaatcacagcagaagcagactcatcacccccatacttatctttgtttggagtatgagacccacgaactatgcactttgcttttgccccatactctagagtacagagagtcttgtgcatttcctttggatccgggctcgcacacaggatcattagaatctttgacttgtcatcttcaaaagagtcctgcattcagagaatagaaacaacactaaatatcttcaagaaaaccaagcaacacgtaaaacattttccagaagataaaacaatggaacaagaatttcacctggagaagcatggtcagcttgctgtctctaaagggtacatgagaatctccatttgctatagattccacaactcgcttcagtgcaatatttccctggttgatcttagcagtctgttgaataatgagagatataagtcagttgatatccataactacaataactttagtagaatcaaacaaattgagagaggaaacattacttgcatcttagcttcaaatccagtctgcccagcttggtctatattttcagaaccagccatgtcaacaagcatcaatcttcccccaacagttggcacatcaagtatgatctacaaaaagaaacaaccacactagtaagttaaaacagagataagctgcataaagctatgcatacacatcaatcaagaagatcgttcttacaatgcagtgactccgagaacttctttcgttacaaagtgtactcttcacaattctccgtttctccactttgacaatttctttagaaatcttcccagcctctgtcccagaaataaaacttgcgtttttcgcctttttccccattacttcaagcctcacctgtaacaaaacaacaaagtacacacctttaaagccaattcaatgtatactaaagttatcaatcaagaaactttaccttagtgcttgctcctttaggccaaccaatacctaaattgttactactattagtcgaaagaagatcataaatctcctcattataaacctcaagaacagtaacttgaacaaaagtaacaccatcttgatcagaatctcccaatatatctctcaaagaacgatacacaatcccaggctctttcccacaaccaaacatagtatgactctttccagcaccagtaggtccatacatcataatcgtgcatttattcccaactttcactcctttaatcctctcttctataaacttcttgtagaactcttcaagaccttcttgctccgagaaagaaacaccgtcgagtgtgaagtctctgtacccaacatcagctctgactcgtaccgtttgattatctgtgttgacttgtaagatcgaaggtgatttctctttccggtcagggtaatctcggatccggccgattacttcaactggatgctccggtggagatggatctttagatccgtctgggtttggggtttttgagtggaaattgagacgttgttttgtttgtggagttctgattaaggtgtattgagtttgatttgatcttgaagaagatggtgtcggtgccattgttgaagaagtttcgaaagagtgaaattgaaattgagattcagagagcgttagagagagagaaaataaaaaaggggattagggtttgtgagtgattcacgaggtttgaagtttgaaacaaagaaacaaacataaccgttgtgttgtatctctaaacggctagtttttgtccacgggccactgattattaacaatttttattttcggcaactagaatatatttactttcttttaaaaaagggaagtgagatgggcctgactttttgattaagttaatgggctttttgtgtttatagaggcccaatgtttgtagtattagggttttctcaaatgtctctcttataagctctgttactttaggtttttattaaaggttttgcggcagtggaagacgacggcacgagcttcaccgaagagcgaaaatg

SEQ ID NO: 6408 - DNA, 3000 bp, Unknown
  misc_feature (1)..( 3000): cDNA_ID_2024882_gDNA_ID_1621093_Annot_ID_170812 3000 nt of promoter + ATG
tatttttttcttaaaggtttttaaattatatattgttgactttattatgatgtgctttaaaaaaaaacaatattgtgattttgtaattgaccatgaatatgagaggttttggaatataacatataggtgaactactagccaattgttagtcggattactggtttaataagatgatcagaacaactaaacttgtaaacttccatcgattacaacaatcttgtgaggctaacttgaagtagttcaccattttggttggtgaacactatatatgtcaatttatgttctctaatatatattttcttgtttggttttctcaatatgtgttgtcgagtcgaaagtgattaattgatcgagctcaagatcttgctattaaggcgaagtaaagattgcaattcatattgctgtatcctaacaaatgtgatggtctcttatcgttctaacatctctctttcagatttatataaaaatatatatattgtctacaaaactcattcatccacatccaaaatttaaaatttggattattacacaaaagtagataaaccactagacaaataatatctagtcgaattaattaaattactcgtctaaattattagctttttagatatatatatctaaactaaggactaaagctagttagtgtaaatttgacttttttttgttctttgaaactatgtgtaatatctatttttttgtaaatgcaaagataatcgagtaatgaacatgaaaactactatattataaggaaaaaaatggtatttaaataaaaaaatatgaatagtgattgaagaaccgtacaggttatgtttgtgcagggagaggggtcgcgagtgcgtgggtcgggtacagaggatgagtcagtgagtcaggacctgtttccccctttgtagggacacttttaccatcctttaatgggcctattcttttcataggcccatttaaatcatatcagtcagtctttttcttgggcctcatctttgttttgtggttcttgcgatttgaactatctgatggtgactacaattggacgaccgcagaacaacccaaccgtatatgctgtcttttgtgggcaaatcttttttattgatatggattgtctcaaaataagtgatagaagtccgatataaagcataaaacaatctctcatgatcaaccattaaaagaaataaactagcaacaacccatgttcctcttactgacatacatacacatatagtcaaagatttatgcaataatttggactttattaaaaatatttacaaaccatatagacatatatatagtcatttttgatatcttggtttcaaaatctttctagatctttagttccaataaactttcaatttaaaagcggttttctaaaaatccgaagttggccaagtgatatattagtcctgtccaaactgacacaactcacgaatgtggtacgggttgaaaagccttaggccatgttcgtgaggtaaagatactcgcggtcgatcaactttggggaacgaattcgttcttggaacttttgttgattgattacgggcgtcatacgtgacgcccctgttcttttttatttttaggacggtttgggggtgttacaagagtggtaccaaaagacgacgaatatattgactcatatcttttatatcttagcatagtttgctttttcacttttaatgtgagaattctaacatgcacatttgagataatgaatcattttcactcatcgttttggatcgaacctcgttttgtttttggtttggtcataactttttaacttgaaaaccacttgagagtgagtcgactgatttatatactccttatattttactttatatcccatatttttttatgatgtaagattcttaacatagtcaagtactcataatgatctagtagttgaatgatttacgatgattcgaatcattctacttcgattgagggtgtacactaattagatcctattatatatgatataaactgatatatataagaattattatataatgcaaaaaatgatcataagacggacggtgtatatttattttgaatataatacaaaattatcatatgtccaactccagattcgtgtgcatgtctctacgtatctccggatacgatcatgctataagagtcaagacccctacacgatatgacaaaacgagtaggaaaaacgtgacaccaaaagatattaaaaagctgaaactaatatatagaaatgaaaatgagagatacatatcaacattatacaagaaagaaaatgaataaaataattgtaatgtaggactgaaaacctaaaaagaaaaagaaacatcaaaaggttgccaaaataaaaaagtaacatgaaaataaaacctgaccagaaatttccataaagcccaacctatttattttgcctacactctgagccccactcattagttgctcaactattttaattccttgtcataattgttatttaagaacctttataactttcactttcagggtatataatctctatggatttaaatggagaaaaccccagtgaccatagtttgatttaaggaagggaaagttataggaatggattatgaaatattataaattttgcatattaatgcaaaatatctatctttataaaacatacttttaaaaatatataatgttaagaaacaaaaggaggttaatattaagtgaagactctcactaaagtatacaaatgaagagatataaaaagcaggataaaaatagagtcaaaaagaaagaaaacaaaaacaagacatagcaatttgaatttaatatttggattccaaatccaagctcatgggtctattctactgttcacagtcacacacacactctctatctaagcttcttttgacttaagaccaaaatgaataaccccaaacctcaaacactcaaacataaacccaaaaaatctctctcacagagaaaaataaaacacacaattttaaccacaacacttgtctctctgctaacatacgcatcctctccggttcttgacta

SEQ ID NO: 6409 - DNA, 3000 bp, Unknown
  misc_feature (1)..( 3000): cDNA_ID_2105089_gDNA_ID_1621093_Annot_ID_170811 3000 nt of promoter + ATG
taaataccatttttttccttataatatagtagttttcatgttcattactcgattatctttgcatttacaaaaaaatagatattacacatagtttcaaagaacaaaaaaaagtcaaatttacactaactagctttagtccttagtttagatatatatatctaaaaagctaataatttagacgagtaatttaattaattcgactagatattatttgtctagtggtttatctacttttgtgtaataatccaaattttaaattttggatgtggatgaatgagttttgtagacaatatatatatttttatataaatctgaaagagagatgttagaacgataagagaccatcacatttgttaggatacagcaatatgaattgcaatctttacttcgccttaatagcaagatcttgagctcgatcaattaatcactttcgactcgacaacacatattgagaaaaccaaacaagaaaatatatattagagaacataaattgacatatatagtgttcaccaaccaaaatggtgaactacttcaagttagcctcacaagattgttgtaatcgatggaagtttacaagtttagttgttctgatcatcttattaaaccagtaatccgactaacaattggctagtagttcacctatatgttatattccaaaacctctcatattcatggtcaattacaaaatcacaatattgtttttttttaaagcacatcataataaagtcaacaatatataatttaaaaacctttaagaaaaaaataaatttgggtagggtttggtgagtggtgtcgatagaaatggcggatgcatcctttagattaaaggtatggtaccaacttggatccatttcttcgataacgactcttcctatttccactctgttttttttttgtttccctcttctatatctcatatcttccactactctcaatagtcaattctatatcccaatttttatgttaagtttttacgatttacaagttattggcaaattgaaaattgctgtcaacttgctagagggtattgtaacagtactaccaaatatgaggtcgagtcttaagtgctatatatggagagagatgatttacgtttgtggaatcgcaataagtatatattatcaaatgctagtccatggacataaaactatgagccaaaaattagaaatttctggttaacaataacaataaagaaaaaaaaaatggtatatgcatatacagtataaggtagatagttttgatttttgaagaccattgattaatattatatatttcaatatcaattgttggtaagttataaaaaccttcaaacgagagtgaattaacttcaaagtcacaaagttcgactttcgatgttaaaaaaaataaaatgtttacacgttccattctcttgttcaaaaaaattatggatcagtattccaaatttcatagtaatctaaaaagaaaaagttgcattaatatggtttgcttatctaatcatttttcgggacatcaccgtatgtatggatgacgaaactatattttaaaaagaagttttcaactgttcgtttattcatgcatgtatatcttgacaattacgacattggatgaattgagtgatgaatccttatcgtacatcacgagtataattacatgtatcatgcattgttatcaattatcactttatatattggataatgagaagggatgtcacgcaagaccaagcaaggtttaagggagaatcgatattggtcagactcatgtgaaaatatatttctcctccttcgtcttgtcaatttattactctatctcttgtatttttcaattgttttggtattcacttcagaaaatgactagtcttcgtttttatgtgttgagccattttcatttacatgcatctaaatgatctactgaatatggatatcgaagagattttttagtataatggtttgtgctagatcctttaacaaaaaagtaaatggtttgtgctagtgtttttgttgtattgctaatttgctatccaattcatagcacacatgttgttgccaaacaaatgctaaatccattttaaaagtatcaactagtaaattagcttaacaaattttttgttaacatgtttatgagatgtttttttaagaaaaaaaaaactcatttaacatgattacatttagggtttgattggttgttttaaactgaaaattgtctgtttgcaaaaatgtttggaatgattatctttttgcaaaaattgcgtgacatgttgaagtgttgcaatgctggaggttctgctaactaacaagtaataatcgtataagtgacatgatcttccattttttagagatactaaccaagaattgtaaaaccaggaaaaaaacactaaccaagaattgatgattgtccatctagactaaagtagtatacaaacaaaacacaaaagatattttgttctatttttggaataactcttatccatttatagaaataattagttgtttaatcaaaatatcacatgcaaattgatcgtatgcgattttagataaattgacatccactcagtaataaacaaacaagatactctctgattacaaaataatctctgttttctttcgtgtcatttttctttatcactcatgctattattatatttaaatttaatataaaactgttaccatttactattttatttcactgtttgacgcgaaaaaaataatcagcataagatttacccaaaaaataaaaaataattgggatacttaagcaatgcatgattaggctataatctagagagactaataggatgcttacgtggcagtctagggagcttcgctgctccaaaaaccattcccctaaaattgaagcccatagactattagcgacttcactctttctctttctttctctctctctctctctctcgctcttctaattttgccctcaaaaccctccaattattacgaaaacgccactgctctctcgtcgggactccggtgaggccgttttggccggaatctgacaagggatatg

SEQ ID NO: 6410 - DNA, 3000 bp, Unknown
  misc_feature (1)..( 3000): cDNA_ID_3593510_gDNA_ID_1621093_Annot_ID_170807 3000 nt of promoter + ATG
acgtgaacattttttcgtcctgaactcaaaagtatcaattacacacttcacactactaatggtcaagttttttcgtatttgaaactacaaatgtaagtaatatatgcgataaatttattatcctctgctagtaaaatccattaaaaaaaactaccaatgtgggtgtatgttttctttcagtatatataaagagttttcgcagagagcacatatcgatggtggtacatcaaatctgatcattcatatctaaataattgttgttgagttttctatatgtgtggaacgttagattgcttaagctagaaattgacacaagagtttgatcaccgagttcctgcctcctggcctctaaccggtacgtctcgggtgggaactgtctcccacaacttttcactatcaagcaaaaagtattacaagcactaatagaggtttctcttctccttgttacaaatttagaaattaactcacacacaaaagacaatagaaaaggagactataccgacacgaagactatgcccatatcttcacaattgtgctattatttaccgttctaatctggaaaaaaaaacagcgcacgtaggagaattgggcacgaagacatgaatgggacacataaaggatcaaaagagtcatcatgggtctgccatgatgaaagttaagaaagttccaatacgcgcgaaacaagattgaatgcgacttctctctataccaaaaacgaatctcccaagtcccaagtgaatattgtgagccactaacttgttattaacattttgagacaaaaaaaaaatttgtacgtgtttttgccaaacccacttggccatgaccaatcagaaaaagacaaggaagatgtgtatctatgtgtaatgaggaggccacgccatcagtttacttgcacttttccaactagacgtggcctctcaccgatctcaacctcactttcctctcatttctcaaattttattggctacgtgtttttgtgtttagcgttcaacccaaatatcgatatattcttctttttttttcacatttttaacgatttcgagcaaaataattcgatttatttgtataattttaatatggtagttttacaaataatgaaacgaatgaccaactgatttgttaggtgttacaataaatatggaaaaaatctcataagtttgaaaacatttattctgaggaaactttttcttccccaaaagaaaaaaaaagtttaaagtggaaaaaagaaaaaaaaggaataaaaagtttgaattcagtttttttcttttctttgatagatttctttctacttatttattactctactacacaccacacaaaaacaaaaataaaataagtaatcatagtatcccataaatcagtaaagataaataaaatccagaaaatactgggcctatcattttccttcaccaactctataaatgaagagataatcctacagttacacctcaaaccaactccatctcacttctcaagtcttataatttattcatttctctcttcttcatcgatcttcggcttttagaaaacctaatcagaaatggcaacggcgtcgtttaacatgcagtcagtgttcgctgctccttccggtgtattgactacacgcaacatcagaaacacaaaccaactcttcttcaagaggattgctccggtaggagtcagatgcatggctcaggtatatatacactaacctcatagtccttccacttccctacgttacttatttgacttttaatcctgaccgttccttacattgactatttttttagggcgatcctatcaaggaagatccttctgtgccctcgacctcgacttcggccactccaccacaaatgccacagtctcctcctccaccagttagcaagcctaaggtatgatctaatgatcaaagtcattaatatatatcactagctaaaaaaatgaagctaatgaataattttcttattgtctaggtgagtacgaagtttggagatttgctagcgtttagcggtccagcacccgagaggatcaacgggagactagcaatggttggattcgtggcggccatcgccatggagttatcaaagggagaaaacgtgtttgctcagatctctgacggtggtgtcgggtggtttctaggaacaacagcgttgttgacgttggcatcgatggttccgttgttcaagggaataagggcagaggcaaagtcaaaagggttcatgacttcagacgccgagctatggaacggtcggtttgcgatgctcggtctcgttgcgttggccttcaccgagtacgtcactggtgggactctagtctaaagctaaagctttttgtttgctagtttaaggacaaatttggagaatgattatgtaacgcatagattgatttaatactatgagttttaaacagtgtgtcaacatgaatcaaaatttaaaaccatgaaaaaaacattataaaaatttatttgaaaaagtacttcaaaagttttcttataagataatgtgaatggagaagaagaagtaaaaaataaattttagcttctatccaaggtttgagagtttatgcattcttttgaaatgaatcaagagccaagaataattaattatgctcttccttgttattatcgaccaatagagtcatcatgtgtctgccataatgaaagtaaagcaagttccaagacgaaacgaaattgaatgcgatttctctctaacaaatcacctcatctcaattctcaagcccatgggttagtctcatcaaagcccaatcaaagcgtcaatgcttcccaagaacaaaaaaaaatatattaagatgaacaaacaaaaaaacacttaaaagaggaaagatctggccactacaacactacacgatagtacgatcgatgaatataatcggaaagatttgagtggctcaattacatattgcttatacgacgtcgttttgagtagcatcatttcgttaatatttatgtaggagactgaaacaagacagagaaaagagaatctccgaggaaaacaaaagttg

SEQ ID NO: 6411 - DNA, 3000 bp, Unknown
  misc_feature (1)..( 3000): cDNA_ID_3594344_gDNA_ID_1621093_Annot_ID_170806 3000 nt of promoter + ATG
agagaatgagaatcttcgaaagttcgaattttgaagtggaagatgaagtgtgagtgggcttttatagaccaatgtgattagtttcgtaagaatattgatattagaattaggaccagttcaaaaatcgaacattatccaagaatacgtcgatgttcgaccagcactttgctcatgagtcatgacgatatcaacttggcaaattaatattgtaatcacgtgaaggaccatgcgacatcatcatcatcatttgtggggtaataacataaaactaatgccggcttaagaaaagtgtgttcatttcttaaacttaaatcacatttggaggactcattatagagctcatcacctttgacctgactttatcttgacctgaagctaccaggaatttatatctgaacttttgtttcctttttgacggcgaaataatttgtttagtataagttttgtccattctttacaggtcaaaaacataattaatactaataacgacgatattttaatgtttcctcttgcatgaaaaagcattgaaaatgacggagttgattcactttattggtggctgctttgggctcacattcaacatgtgccaattaagaattctgagggtcgacctacccatcctcattcactcatagcgacaattcaaaacagatctactggggctttaaataagggtaaggccttgttccgaactgggctttagtaagatattataacatttctgttccaaatacagtacatcaaaacttgaatctaacttatatcaacttcaataatcatcaattcatcagttaaaaaaactccttctttcatggtttagtttatcaaagatatgcatttgatttataagaaaacccaaagagtatttgttacctagtcgtccccgggtttcacggggttacaataagagaaacaaaatgggccacataatatttatttatttagtgattctgtcgtttaaaaaaaaattagtttaacacattgtcaaagtttgaactaaggaacttgtaactcaaatactgaaactttaaccattagactacatttttatgcaaattcggccaaaactaaataataatatgattagcggccgcaagcttatgttttgcttgcttggccttgtggccggctaaataacctaagtatataatcaataaattacataaacgaccggataaatcagaacttaattataatgttaaaagtaattaaatgaatgatgaccctcgtcgtctctcctcttaaaacacaataatctcataaatacaatttttatatgaagtcttcacaaactactataaatttcccaaagttgttctctctctttgtccactcgaagactcatggggataagaaggcactcgtgttatgggcttcggggctttttattgttcgccctttcgaggaccttctcacatgtttggacttttgagtctaaatgccttatttcctcacgaatgacgtgaacattttttcgtcctgaactcaaaagtatcaattacacacttcacactactaatggtcaagttttttcgtatttgaaactacaaatgtaagtaatatatgcgataaatttattatcctctgctagtaaaatccattaaaaaaaactaccaatgtgggtgtatgttttctttcagtatatataaagagttttcgcagagagcacatatcgatggtggtacatcaaatctgatcattcatatctaaataattgttgttgagttttctatatgtgtggaacgttagattgcttaagctagaaattgacacaagagtttgatcaccgagttcctgcctcctggcctctaaccggtacgtctcgggtgggaactgtctcccacaacttttcactatcaagcaaaaagtattacaagcactaatagaggtttctcttctccttgttacaaatttagaaattaactcacacacaaaagacaatagaaaaggagactataccgacacgaagactatgcccatatcttcacaattgtgctattatttaccgttctaatctggaaaaaaaaacagcgcacgtaggagaattgggcacgaagacatgaatgggacacataaaggatcaaaagagtcatcatgggtctgccatgatgaaagttaagaaagttccaatacgcgcgaaacaagattgaatgcgacttctctctataccaaaaacgaatctcccaagtcccaagtgaatattgtgagccactaacttgttattaacattttgagacaaaaaaaaaatttgtacgtgtttttgccaaacccacttggccatgaccaatcagaaaaagacaaggaagatgtgtatctatgtgtaatgaggaggccacgccatcagtttacttgcacttttccaactagacgtggcctctcaccgatctcaacctcactttcctctcatttctcaaattttattggctacgtgtttttgtgtttagcgttcaacccaaatatcgatatattcttctttttttttcacatttttaacgatttcgagcaaaataattcgatttatttgtataattttaatatggtagttttacaaataatgaaacgaatgaccaactgatttgttaggtgttacaataaatatggaaaaaatctcataagtttgaaaacatttattctgaggaaactttttcttccccaaaagaaaaaaaaagtttaaagtggaaaaaagaaaaaaaaggaataaaaagtttgaattcagtttttttcttttctttgatagatttctttctacttatttattactctactacacaccacacaaaaacaaaaataaaataagtaatcatagtatcccataaatcagtaaagataaataaaatccagaaaatactgggcctatcattttccttcaccaactctataaatgaagagataatcctacagttacacctcaaaccaactccatctcacttctcaagtcttataatttattcatttctctcttcttcatcgatcttcggcttttagaaaacctaatcagaa

SEQ ID NO: 6412 - DNA, 3000 bp, Unknown
  misc_feature (1)..( 3000): cDNA_ID_3090079_gDNA_ID_1621093_Annot_ID_170805 3000 nt of promoter + ATG
cttgagaagtgagatggagttggtttgaggtgtaactgtaggattatctcttcatttatagagttggtgaaggaaaatgataggcccagtattttctggattttatttatctttactgatttatgggatactatgattacttattttatttttgtttttgtgtggtgtgtagtagagtaataaataagtagaaagaaatctatcaaagaaaagaaaaaaactgaattcaaactttttattccttttttttcttttttccactttaaactttttttttcttttggggaagaaaaagtttcctcagaataaatgttttcaaacttatgagattttttccatatttattgtaacacctaacaaatcagttggtcattcgtttcattatttgtaaaactaccatattaaaattatacaaataaatcgaattattttgctcgaaatcgttaaaaatgtgaaaaaaaaagaagaatatatcgatatttgggttgaacgctaaacacaaaaacacgtagccaataaaatttgagaaatgagaggaaagtgaggttgagatcggtgagaggccacgtctagttggaaaagtgcaagtaaactgatggcgtggcctcctcattacacatagatacacatcttccttgtctttttctgattggtcatggccaagtgggtttggcaaaaacacgtacaaattttttttttgtctcaaaatgttaataacaagttagtggctcacaatattcacttgggacttgggagattcgtttttggtatagagagaagtcgcattcaatcttgtttcgcgcgtattggaactttcttaactttcatcatggcagacccatgatgactcttttgatcctttatgtgtcccattcatgtcttcgtgcccaattctcctacgtgcgctgtttttttttccagattagaacggtaaataatagcacaattgtgaagatatgggcatagtcttcgtgtcggtatagtctccttttctattgtcttttgtgtgtgagttaatttctaaatttgtaacaaggagaagagaaacctctattagtgcttgtaatactttttgcttgatagtgaaaagttgtgggagacagttcccacccgagacgtaccggttagaggccaggaggcaggaactcggtgatcaaactcttgtgtcaatttctagcttaagcaatctaacgttccacacatatagaaaactcaacaacaattatttagatatgaatgatcagatttgatgtaccaccatcgatatgtgctctctgcgaaaactctttatatatactgaaagaaaacatacacccacattggtagttttttttaatggattttactagcagaggataataaatttatcgcatatattacttacatttgtagtttcaaatacgaaaaaacttgaccattagtagtgtgaagtgtgtaattgatacttttgagttcaggacgaaaaaatgttcacgtcattcgtgaggaaataaggcatttagactcaaaagtccaaacatgtgagaaggtcctcgaaagggcgaacaataaaaagccccgaagcccataacacgagtgccttcttatccccatgagtcttcgagtggacaaagagagagaacaactttgggaaatttatagtagtttgtgaagacttcatataaaaattgtatttatgagattattgtgttttaagaggagagacgacgagggtcatcattcatttaattacttttaacattataattaagttctgatttatccggtcgtttatgtaatttattgattatatacttaggttatttagccggccacaaggccaagcaagcaaaacataagcttgcggccgctaatcatattattatttagttttggccgaatttgcataaaaatgtagtctaatggttaaagtttcagtatttgagttacaagttccttagttcaaactttgacaatgtgttaaactaatttttttttaaacgacagaatcactaaataaataaatattatgtggcccattttgtttctcttattgtaaccccgtgaaacccggggacgactaggtaacaaatactctttgggttttcttataaatcaaatgcatatctttgataaactaaaccatgaaagaaggagtttttttaactgatgaattgatgattattgaagttgatataagttagattcaagttttgatgtactgtatttggaacagaaatgttataatatcttactaaagcccagttcggaacaaggccttacccttatttaaagccccagtagatctgttttgaattgtcgctatgagtgaatgaggatgggtaggtcgaccctcagaattcttaattggcacatgttgaatgtgagcccaaagcagccaccaataaagtgaatcaactccgtcattttcaatgctttttcatgcaagaggaaacattaaaatatcgtcgttattagtattaattatgtttttgacctgtaaagaatggacaaaacttatactaaacaaattatttcgccgtcaaaaaggaaacaaaagttcagatataaattcctggtagcttcaggtcaagataaagtcaggtcaaaggtgatgagctctataatgagtcctccaaatgtgatttaagtttaagaaatgaacacacttttcttaagccggcattagttttatgttattaccccacaaatgatgatgatgatgtcgcatggtccttcacgtgattacaatattaatttgccaagttgatatcgtcatgactcatgagcaaagtgctggtcgaacatcgacgtattcttggataatgttcgatttttgaactggtcctaattctaatatcaatattcttacgaaactaatcacattggtctataaaagcccactcacacttcatcttccacttcaaaattcgaactttcgaagattctcattctctccactacagcaacaaattcacattcctctctgttttttttgttttcgattctccttcttcaatg

SEQ ID NO: 6413 - DNA, 3000 bp, Unknown
  misc_feature (1)..( 3000): cDNA_ID_2123057_gDNA_ID_1621093_Annot_ID_170788 3000 nt of promoter + ATG
ttttgattaataatagttcaataatatgagtactaattattaatttaaaacacaaatgttgtatggaaaaacaaaaacaacaactaaaatgacaaaaaattgttcaaccatcttataaactttaaacgtagggagcattactttatacttgttgtaaaaacgataatgcttattggtaaaataacccatatacattttgatttgtcaatatgttcatatatgatctagtttttgttctcgttgtcgctagatagacaataaaatttcttagtggacagtgattgtggaatgaatatacgcccaacacaaatataaacatcaaattaaggtgcatgcggtatgggaattgcaagttaaatgaacatagttatgcgtaatttcgagaagggattaattgtattaccttgctcgaaataccacatgggccgtgtccccaaaagcccatttaaaatggtttttttttttttttaaatcatctctttagatatttttttcaactctttttcaacaaaatatatagtttcatatagatatttgtatttataataaatgttaaaatgaaattttacacaataattaaaataaaataaatagaaaaaatgttatttgagacagcatatcacatggccttaccatacttcctgcatccattattccattaagaacactcttcaccctcatccacatgcatctccctccccaatttatttactattgatcataattgtacaaacctatacttacaatttatatatgtgtctacgagaaaataaataatattttacagtgttttgtctattattttgttctatagtttcttgcaaacaaaacattacttttcacgcaaaaactgtcgaaatatttataaaaggaaattgttaattcttcgatacaaattgaccattaatatttgatcatctattctagacatctactctaccatataccaaacctttacacaaaaatgaaatattttcatgaaaactaccccacaactggggtgatcgaaaaagcttgatctatatgatcaacatgtccaacactagtttcattttttctactatgatatccgatgatccaatctgaactatacaaaatgtatctagatattttcttgaatcaatccgaataacgaatagttgcaaaacataaacctagcgtgatcgtgtggtagaaggacgaaggtcgagaagttctcttactcttatgattttctctttactcatttgaccgtaagagaaagaaacggctaggatctcgcgtacgcaactggcggagacaaatcaggaccgttgaaaataagaaagaagccgcgtccaaaatctttgtgtcccacctttgtccccttgcctctaacttgcctcctcatgctccccgacaacgtcataattcatatctctctctctctctcgttaaccctaatttcaaagcatctttccttatataaatctctctctctccctcaccattacacaacacacacaagcattttcaaggatatcaaatcacaatcccaagaagagcaataacaagagaagaagaagtagttcaagaattaaggaagagagcttctccgttaaagtatagtgagagaatatggaagtcaccaatgggcttaaccttaaggacacagagcttcgtttgggattacccggagcacaagaagaacaacaactagaactttcttgcgtcagaagcaacaacaagcgcaagaacaacgactcaacagaagaatctgctcctcctcctgcaaagtaagttgagatctgaaagttatagttttaatatccaaacttcttgatatcaatcggtgtactaataatgaatcttgatttgtaaacttcagaacacaaatcgttggatggcctccagtgagatctaaccgtaagaacaacaacaacaaaaacgtgagttatgtgaaagtgagtatggacggagctccatatctccgtaagatagatctcaagatgtacaaaaactatccagagcttctcaaagcactagagaacatgttcaagttcacagtaggtgaatattccgagagagaaggctacaaaggatctggatttgtacctacttatgaagacaaagatggagattggatgttggtcggtgatgttccatgggacatgttctcttcatcttgtcaaaaactcagaatcatgaaaggatccgaagctcctactgccttatgatccattgtctcaaaacaccttttggtcgaggcaaaaacaaattctactttgtttagataaaaaaaagtttggtgtaaagaaagaaaaagcaatagggttacaaatacgttatatagatgtaaactagctttggttaattctgtaaaagatgagttttgattatacgaagtttatatgtatgctcaagatatttgatactaacataaccaataaagtttagtatttgatactaacataagtttgggacatagtgaaagatataaaattttggattaagaaatgggcaatgtaatggatatcactatcgaaagttttcaacttttttttgttttgtttaatattagatggcgagaatctttagtcactacccaataacttgctccaccaatttgggatttgacttgagctcttctcatcgtcatcttcgtcgccttcttttccgatctactttcatcactccttcactcactcagtctccgtaagctcttcttcttcttctctcagtctctgtttttcaatccgaaaattcattactttgatggtgttaccacgaattgagaatcattgatggtattgctttgatgggtatcgtttatatgacagtttttaatccgaaagtttattactttgattggttttttgtttgttctgttttaacgaatttgaagccaatcatatctactaagaacttgattggtttagagttatggatgatgaatctgattaatggaattgttttgcaatcattagtgatttatgagatacttgtttcagttacaagaattggattcgaagatttgtagct

SEQ ID NO: 6414 - DNA, 3000 bp, Unknown
  misc_feature (1)..( 3000): cDNA_ID_3048343_gDNA_ID_1621093_Annot_ID_170776 3000 nt of promoter + ATG
atgactaaatagtgctgaattgctgatgcatgatgaattcgtttggagttaatgaagattgagtagtgctgattaagttgctaactagtagatccaccgtcaaaataaaaccttcattttttcttaagtattgataaatttatctttatgaaatcactaattattctgacaaatccaatgcactttgggagcttgaaaagccgcaatctcgttctcagtcactaactgtaatgtagcataggcttccactaaacctaattaacgaaatttggaccaccaaataaacaaacgaaattaatactaaccatttgtagtaaaattacacctacaaatctacaacatcctgttttcttataattgttgttttaaaatctgtacgtcacaatatatttaaatattataatttctaatatacctgtcattaatacaattttcttttctgcggatgaacttttttataatatttttttcttcacaatacaaataatcatttagtcataaatcattttgaaattactagtaaatgtttgttccctatcatctacttgccacacaattgatagatattaatcattttcgtatagctttatatatgttttttttattattattgtacattatgttgagtttaaatagtgatacaacgatactaatattaagtattagtattactatatatgttttgatcatatttttaaactaaaaattgattaaatatgcaataaataaaaaatgttaacacctaataattcctccaaattaaaaaaggattctttaatttagcttcttaatgttaaagacggactcatccaaaaatcctcttcttctttatttttgatgagacttcctaccaacaaaagaatcatttgttaccgaaaatatcagttaacttacaattggttggaatcttaaaatgtatacttaataagctgattcgtgtgattgaactaaacaaaagatttccatcaagtattacatcattgcccacttcgtgattgcattagtaatatatttacttgtttcaaacataaagtaactttaaaagaatattggtatatatggaaaaatccaaataaagccataaaggtctatagttaatcctagtcacatcctattctgtatattttctttaacttttattaattaaacataaggaaaacttaagttttgtctttaattaaaggcctttaattggataataatcttctaaccccacctacttgcttgaaacaaaaacacataaaaaatcagtttctagaaacttagaaaagtaagtgtcatttacgtttatcattagcaaatcaaccggatgaacgtatattaaatattgaaaaaacatacaatcagattattaatttgagtcccactattcaaaaactaaaataaaaatacaatcattcattggtgtaaataaattatttttggttgtgatttttcttataaaaaattacaagtaaatgagtaccaatagcctcattaaaaaagtatttataaaaaaaaaatcataaaccaaggaaaatcttgttcctttttatatcaattttctgtatacatatttaaattgccctgtttagtagtattccatcagatataaaactttcatttattcgctatgtcacaactattacagtagtttttctggctgaatttagacacttttaaactgagaactgaaaaatttatagagattagatagtcaaaatatattttttaaaaaagcttacaataaacaaaaggaaagattgttgttaaatttccaaggaaagaaatatgggaaaggcgcaaaaaaagactgaaacaagaaaaagacaaaagaggaaactgaagctttgaccgatacaacatctcccacgtgtacatgcttttcctcccgtaaataccgggcaaccctctcttcaaaattattttatttttacataaaaactgcaacatttagtagtataaattaaaatgaaatacataaaatgtggttccacatcttcttctttttttgttcatgatatcttattcacataataaactttttctttttgtctcatcgtatgttatcttctaaacttagttgaaaaagcttaattatgtaattttagggcatcttcatcaatgagaaactcacaaaatttctcaaacaaaaaaaatattaatattatattataatttgattatttgattaaaaaagtatttttgttaaaaaattgaaccaatagtgagatgagaattatcatgatgaattgtatagagtatctcggagtttctcaagtgagaaactttgtacactctctctccttcattttttttatttttaattttttaattgtgagaaactcttatgagatactcccaatggagatggtcagtttacctacaaaacttagttgaaaaaaacttgttatataagtggtattttattgtcaatgtgtaaattactattccatttctactttttttgtttcttccgttccgttgaactgtacactattctttatattacgtattatggatttatggtactagactactaggctatcggctatgaccaaattcacattcatatataactccggtatcccactgttgtttatgattctataaatatcaccaaagttcaaaatccaaagttttgggactagctagaaccgattgggtggtcagttagtcaggtttgtagaaacaagatgaaatatattggaattagtattttgtgcccaacgtattcatctattttagcccataatcaaacccccagattgcttatttgggttggttttaaagtttagtgatatttttgtttactgcataaatgattttgagaatacgtttagtgatatcaaaatctgattttgagcagatgtttatggagagtcagattttgatatcactaaatgcgtttgacaagctatgcaacacgttcagggccgggtagagtttcatgtagaatcgacgaatttctgatatagggtttccagattcttcaaaatcattgtaaaggaccaaagttat

SEQ ID NO: 6415 - DNA, 3000 bp, Unknown
  misc_feature (1)..( 3000): cDNA_ID_1814389_gDNA_ID_1621093_Annot_ID_170773 3000 nt of promoter + ATG
cagtcccttaagcactgctaagtcgagaccctaaatgtatctttcgagcatcgaacgatgatctaatgctttcgaaaagtctagatataaagaaattgaacttagtttttagttcctagatatgtattgaaattgtagattaagaacattctctccagcattgctatcactagaccctgtataagtctttcggactcaacgacaaggatcgagctatgatgtaatgccttagaaaagtctagttatgaaaacaatgccttttttgttttcactcttgtcaaatctagtttgcaataacgcttgcctgagatgtaagttggtaataatatcttatcaggtgactggagacatacatgaagaagttgagaatcataaccgcttgcttgacaaagtggtaagctgaaagtttgatttcatctgtttcagtttgtagatctctatcacatgcttttcttctaagctatttgttgttgtatctctaggggaacaaaatggactccgcgagggggataatgtcgggaacgatcaaccgcttcaagttggtatgtaaataagatttcgtaccttttatatatgcatcaccccttttgtttttcgctatcaaaacttatatctgaataaaactcgattttaacacgacaggtctttgagaagaagtctaatcgaaaaagttgcaaactcatagcttattttgtgctcctgttcttgatcatgtattaccttattaggtaaaatacacttcttcttatagttatcaaaacacttgacttttcttagggactggttcaagtccttgttctttgactcgaacactgacaatctttcggattttgcaggctattaaactacatcaaagggtaaatttggatacaagaagaaagtagagtgttaaatgaatagtttcgtttgggacttccatttttggatttctcctgatgaatgaatgattcagacatagtaaacaagtcaagggaccctattgaaaccctattgaaaccctattgaaacaagacaaagaaagagattgtgaagagactagtgaaccaaccgaaagaaaaaatgtttgatagagacttgtttgtcacaagcaaaatcatctcatgtcatttcatgtaatgtagcaaaagcttctttatcatttgtcaactatttgatcttgggttcatgttagcagttttgtctacaaaaagcttaattgattgattgataagcttaattattagctttctgtgaaaaaaagtttagcactttgtaataaaaacaagataacttggcgtcttgtttccaaaaatttccaattttcagaattttaaggcgcaaataccgtcctgtatattgacattttgctaaagatccaaatacgtaacaacatgagaaatatcatttttgaacgactcgcaacaattccacaagttgacaggacactactatgcagaagagtttgattttttttccactttaggtaacaagttgacaataatcgacaagttcatttttggtttggtaatagacaacaagttgacatgtacatttccaaatggttcggtttctaggtcaaatcatcttaacaattatgtaaactatagtcttaaatgttgaatttacgagtgaataacaggttgctatgctaaatagtaaatttcttgaaactactgtttagataaatagtcaaataaccatgagttttaatatagctactagaggataacatttgagttctggcacaatatatagaaaaaaagtaaaaaaaaaaaaatgttaccttattaaatcgggagtagtttttcaatttcttctgatcttttagtatatgctaaaataccatgttagtaaatatgaatgtgatttttgtaaaataaatatattataacacaacaacagatgttatgctacatatattaaacagggtgctagattataaacaaaagtgttttggattcacatgaaaaatatgtgtaattatttgaagaagttagatatatagatcattcaaaaaatagtaagctacatggttatctaatatactgttggtagtgaatccatcaacctaatcgtgacatatatacaatgtacaatcgaaatcgtttctaagaaagccgacgaaatactcagcctttagaaagactagtatacgacatgtcctaccaccctaattactaagagaaaaagattcatgatgctgcgggaaatgacttgctttcttcaattaactcttcattcgagctttggttgctctagctcacaaattatcgtcgtagttaattgaatatttacaaggagctgactaaaaaattaaatgtacatgcacatacattggagcacgcccaccatggctatgctaagcatgctctcttagcagaagtgacacctctcagaagctattgggccataacagagttatgacacgggtcatatccgtcaaaagcacattgcttctagaatgcgaggtatgattgctaaaaacacgatcgacaaggaactcaagaacatcaacttgcatattgaacctacatacatgccgtatataggcatgtgcgaggagtattaaggatataggactggttaacttcggttatcactggtttggttgaatgtggtttactaaccacaataatcttatgtatataagtttaatctcgattactttgttagttaagttggttgtaacaacactttaagctgaataagaaaagttgttatcttcttcttcgtctctcttctccgatcttgaatctccgatgtatcggattttatcatggtatcagagcacaatatattgattccgcgtttgttgtgttcatcgggagagagtttcattttcgatttcttcttttgattctttcgttcgcttatgccattcgttatttttccgattcaccggagtatttttcattctgtttcttttacttccttcaattgacctttagcgtgagcgaatctcgttttctatacatcaaattcgtctcgctttctttgtaatttttcattcttactctgaga

SEQ ID NO: 6416 - DNA, 3000 bp, Unknown
  misc_feature (1)..( 3000): cDNA_ID_1007795_gDNA_ID_1621093_Annot_ID_170769 3000 nt of promoter + ATG
atttgtaattcatacttgataatcgtactagcatcagcaatatatgtcacatcatgcatctatttataatatccaaattacgtcatatgaccataatcgtatatatcgccataagatagaatgagaaacgggtgcagtctgatcaaccaaactcaaccgaattagacaacccacgagaaaccttatatggtgtggggaattaatccaaaagacaacattgtatatagagagaggaagtgttacacaaaaataaccatttttttttttttttttgaatgtaaaaccaatacaataagtcagtaacgaagatggaaaaaccaaacaataaacacatattttcttgttacacttgagctatgctttttcttcttctgtcgttaattccaacgagatgtgagtggacatccaaggcggacgaggaaacgactatgaagatcagatagtgtgacggtacaattctatttagatcgaaagtagtatattcggtagcatttcggtatgtttttaccgagacttactgagtcatccgataataaaatatataaaaaaacgattataaagataaattgtattaaaaaaaacatgtgtaactaaaattatagatttctttaaagaaaaaaggaaagaagaagaatcctatgagaaaggaaaagatggtttatatcatttctcattgacattagtgaggataaaactttttaaagagattttgaattttctctagaaatttgcgaaaacccttttaaaaaaactagatgctctttttgtagagaaaatatttattttcataatcttgattgaaaaattaaatttttttttcagaaaaatcaaaaactaaaaacatgttagatattagtaccattcaaggtctaaattatatttggtattaaatccaaatgaaattatgtttgaccaaaaaaagagatctcgtacacgccggcccatgggcctttacaacagattgaaccaaaatggaaacatagaccaatcaggataaggtatatttctctctatatttgcacaattcaacaacaacacgatttctcacacatttcaagttttcattatcatccagaaatcttcttcttcctccgatcaccaccatgtgtacgttagagaaacgcggcgatctcttcctcctaaccctaaccggagacggcgaacacagattccaccccgacacaattgccaccattctctcccttctcgaacaagccaaatctcaatccacccgtggatccatcctcatcaccaccgccaacggcaaattcttctccaacggattcgatcttgcatgggctcaaaccgccggatccaaaaccggagccgcaaaccggcttcaccaaatggttgaatcattcaaaccggtggtagcagcgcttctcgatctccctatgccgacgatcgccgccttgaacggccacgccgccgccgcgggattgattttggctttgagccatgattacgtgttcatgaggaaagatcgtggggttctgtatatgagtgaagttgacatcgggctttcgatgccggattatttctcggcgttggttagggctaagatcgggacgagtgcggcgaggagagagctgttgttgagtgggaagaagattagaggagaagaagcggtgggtttggggattgttgactcggccgcgtatgatagtgaggaaggtgttgttgtggctagtgtgcgccttggtgagaaattggcggcgaagaaatggagcggtgaggtttatgcgtcgataaggaagagtttgtatccggagctttgtgggattcttggtttagagactagagtgtttgcaacacctaagctctaagaaagcgtctttcagagagtgaatctttggtttatttgaaaaacacatgttttgggagaaagagacaatgttaaactctagaactgtgatcacagaaataataaacatgttcaatgttggcttgttcagtgttgttgttgggcttgttcttaggcttggttgtttaaaatatggaaccggtttaatcggttttagagctaattagatgaactagagataaccgggttgtagtagttatcggagaaggagaaacggtgttgtgaatttgtgattgctgaaattacgccatgttaaaccggtattaaaacacaaactgtttttcgttcgaaaacgcatctatcaatcttggtcttttatgttcctaaaagataatttacacactcccagacatgtaataattaaaccagcattagcatacaagacgacaagaaaaactcaccaaaaaatgataattttagttgtgacccctttttcacagtataaattctttttaaaactttatgcaaaattgtattaaattatattatatgaaataaatttaagtaaaattgttgctttttaaaatttaacctctttatattaccattatcataaaacagaatgaatctaaatagaaaaattcccaaacaaaatctcaactatttaaaagttgcccagattcatatacacgatttcatatataaattttttcagttttatcctaaaataaaactaattttatttatttaaaatatcaaatttatattgattttctaaataaataccaaagggtgataaaatagtttggtatttgatttgaggttagttttgatttaaaatgttagtaataatgagtcgcgttttattggttgccggcttaaatacttgaaatgactcggacgaacgtcattggccaggcaacgtgtaaagcatcctacgtggcgtttacttcccaacgaagtagcgagtacaaaaaccaacatcattgtactcgcgcgagtaggtcgacgaaataaaaatctcacctttttgaccccaaaaatttctaaatatttcaaaatcagcctcttcgttttctttctcctcctgtctgttgatttaaagacccaaatctgacgcttctctctctctttctggtatctgcgtttgattcggagaagaaaaaaaaaaaaaaggcaaagagagagcttcaatg

SEQ ID NO: 6417 - DNA, 3000 bp, Unknown
  misc_feature (1)..( 3000): cDNA_ID_3239139_gDNA_ID_1621093_Annot_ID_170768 3000 nt of promoter + ATG
aattgtttgagtaggtgtccttgatgttattcttgatgaatatccaagtcttatggacgagcaagatgaagatggtaggacttgtctttcatacggagcatccattgggtattataaaggactatgcaacatcttaaaccgatcaacaaagggtgtttatgtctgcgaccaagatggttcttttccaattcattcggctgcaaaaaacgaacattacgaaattattaaagagtttataaaacgttgtccagcttcaaaataccttcttaacagacttggtcagaacattctccacgtggcggcaaaaaatgaggcctctcttactgcatatatgttgatgcatgataaagatacgaaacatctgggtgttgggcaagatgtggacgggaatacacctttgcaccttgccgtcatgaactgggactttgactccattacttgtcttgctagccgtaaccacgagatactgaaattacgaaacaaaagcggcttaagagctagggatattgccgagtcagaggtgaaacccaactacatctttcatgaggtatttctgattccgtttcatacaacacatttgatccctcataaatgatttatagcttgacctccatatttttggaattacagaggtggacactggcgctcttattatacgctattcactcaagtggtttcgaatctgttaagtcattaacaatacagtcagtgccactagaccctaagaaaaacagacattacgtcaacgctcttctcgtggtagcggctcttgtagccacagtgacgtttgctgcaggctttacaataccaggtggttatatcagcgatagcaaaaaaccaaacttgggcagggcaactttggccactaacccaactctcttcatttttctgctttttgacatcttggcaatgcaaagttctgttgcaacaatatgtactcttatttgggcgcagttgggtgatctagcactcatcctcaaatccttacatgtggccttgcccttactacttttttcattactatgcatgcccgtagcattcctttttggcgtgatcactgcaattgcccatgtgaaatggcttttagtcaccattagcattatatctggtggattcttccttttcgcaatctttatccttggccctcacgtcatgctacagcgctcacaccttccgcccagttctggtatatttctcaagacttttatgctgactatagacatatctgagttgtttgtgattttgatcaaagcttgttttggttgtgtggcgtgttccgaataaatcatcaaaagtttatagatcaaaggatatttttcttctcttttttttttctttcaaaaagctacgagatatgctggtctctagctctgagaagcggcatcttgatcatacaactcattcgaagtcctatcagaattatctgtagttgtaataaagcgtgaaaagtatatcattcgaagagattttcctctaaaataatcgagtgatattttattattcggtttagtggataccagtttactaatctctcgaatttatgaaccacattcaaaggagatgagtttaacaaaaaaaaaaggtaaattgttttttattctcgtcgtgcgttccacatgagtcgttttcaagagcaatatagacgatacttcacaagaattattatttttgttggggtataaaaatttgaagatacgtttggcaacgacaatacgacgttagattgttccaagaggtgcaaaaacttagggaccctctttattcgttcactgtaaccactgaccacaacatgactaggtagactcttctttttgtcaatgttgatgtttatacgattttgatgagactggctctatcaagatatgaatctctgatcatatctccactaatctttcatcttgttattccctcatttacttttgatttccttctctctctctcttttttatgtatacaaatttttctttatttcgcttcactaaaccccaccatgtaattgtgtgagttttggcgaagtggcgcaacaccgtagagcacaccaacactaacccaatccattttatgaccgtaaattttgttgttgattagtgtatttttttcttgtttagttattctgagaagtaaattttttttttacaattagtttttaaacatagtaaaataaatttatgacagattataatattattttaaaaatcaataatatctaacaaattaaataaacaaatcacaaattactatattttaaataaatattgataattttaattatattattttgtttattggttaactcgcaggatatgcgagttaattcatttgagattgtaatccgccatatactaactcgataaccctgactttttagaaatctaaaagtataaccctataataaaatagattatgtccaactcgcggattctaaacctgaattgacatggcggaaccattcataaaaccataccaattcttgcgttttggaaagttggtttccttttcatttctttgaatttgatcctagattgtgtagttctcaagctcatgctcttgctcgtcaaaaacgtatcaacgatttgcttttcctttagacgttcttgcatcggattggtttactcaactccactcgatgaaaaagttactatcttaaaaagaacaaatgcaaattcaataaaattccccaatatctacgcatgaaaatatgattctgtcttttttttgtttgtctatctttcaatactttaaaaagtgtatttctagaggcgatttgtcatttcccgaataggaatttgagtaaaaaaaaacactctgttttttatttccactaatatcaaatcggcgaatatagttcccaccattcttatctccttgtcgtcactcggaattttttaaataataggatcgctttaataatataatctctataatttatagttccttttccaatattggcgtctccgttgaagctttccacaaatctcaaatttgtttggagactctcaa

SEQ ID NO: 6418 - DNA, 3000 bp, Unknown
  misc_feature (1)..( 3000): cDNA_ID_2991540_gDNA_ID_1621093_Annot_ID_170767 3000 nt of promoter + ATG
ccttctattcgagcaaaactcaagccgtcagacaccgctacatgtggctactcatggcggtcataccaaagttgttgaggctcttgttgcatcggtaacatctgctttagctagtctgagtactgaagagagtgagggactgaatccacatgttcttaaggacgaagatggaaatactgctctgtactacgccattgaaggacgctatttggagatggctacctgtctggtgaacgcggacaaggatgctccttttcttggaaataacaagggaatatcttccttgtacgaagccgtagacgctggaaataaatttgaagaccttgtgaaagcaattttgaaaaccacagacgacaacgtggaccgtgaagtgaggaagtttaacttagattcgaaattacaagggaacaaacatcttgcacatgttgctttgaaggccaaaagtataggtttgttttttgttttctttaataatcagtaacagctacgtttaatctgttaaaattatgtaaaaccagcttgggacgagaatctcctccccaagatggctaattgttgttcccaattgtttgagtaggtgtccttgatgttattcttgatgaatatccaagtcttatggacgagcaagatgaagatggtaggacttgtctttcatacggagcatccattgggtattataaaggactatgcaacatcttaaaccgatcaacaaagggtgtttatgtctgcgaccaagatggttcttttccaattcattcggctgcaaaaaacgaacattacgaaattattaaagagtttataaaacgttgtccagcttcaaaataccttcttaacagacttggtcagaacattctccacgtggcggcaaaaaatgaggcctctcttactgcatatatgttgatgcatgataaagatacgaaacatctgggtgttgggcaagatgtggacgggaatacacctttgcaccttgccgtcatgaactgggactttgactccattacttgtcttgctagccgtaaccacgagatactgaaattacgaaacaaaagcggcttaagagctagggatattgccgagtcagaggtgaaacccaactacatctttcatgaggtatttctgattccgtttcatacaacacatttgatccctcataaatgatttatagcttgacctccatatttttggaattacagaggtggacactggcgctcttattatacgctattcactcaagtggtttcgaatctgttaagtcattaacaatacagtcagtgccactagaccctaagaaaaacagacattacgtcaacgctcttctcgtggtagcggctcttgtagccacagtgacgtttgctgcaggctttacaataccaggtggttatatcagcgatagcaaaaaaccaaacttgggcagggcaactttggccactaacccaactctcttcatttttctgctttttgacatcttggcaatgcaaagttctgttgcaacaatatgtactcttatttgggcgcagttgggtgatctagcactcatcctcaaatccttacatgtggccttgcccttactacttttttcattactatgcatgcccgtagcattcctttttggcgtgatcactgcaattgcccatgtgaaatggcttttagtcaccattagcattatatctggtggattcttccttttcgcaatctttatccttggccctcacgtcatgctacagcgctcacaccttccgcccagttctggtatatttctcaagacttttatgctgactatagacatatctgagttgtttgtgattttgatcaaagcttgttttggttgtgtggcgtgttccgaataaatcatcaaaagtttatagatcaaaggatatttttcttctcttttttttttctttcaaaaagctacgagatatgctggtctctagctctgagaagcggcatcttgatcatacaactcattcgaagtcctatcagaattatctgtagttgtaataaagcgtgaaaagtatatcattcgaagagattttcctctaaaataatcgagtgatattttattattcggtttagtggataccagtttactaatctctcgaatttatgaaccacattcaaaggagatgagtttaacaaaaaaaaaaggtaaattgttttttattctcgtcgtgcgttccacatgagtcgttttcaagagcaatatagacgatacttcacaagaattattatttttgttggggtataaaaatttgaagatacgtttggcaacgacaatacgacgttagattgttccaagaggtgcaaaaacttagggaccctctttattcgttcactgtaaccactgaccacaacatgactaggtagactcttctttttgtcaatgttgatgtttatacgattttgatgagactggctctatcaagatatgaatctctgatcatatctccactaatctttcatcttgttattccctcatttacttttgatttccttctctctctctcttttttatgtatacaaatttttctttatttcgcttcactaaaccccaccatgtaattgtgtgagttttggcgaagtggcgcaacaccgtagagcacaccaacactaacccaatccattttatgaccgtaaattttgttgttgattagtgtatttttttcttgtttagttattctgagaagtaaattttttttttacaattagtttttaaacatagtaaaataaatttatgacagattataatattattttaaaaatcaataatatctaacaaattaaataaacaaatcacaaattactatattttaaataaatattgataattttaattatattattttgtttattggttaactcgcaggatatgcgagttaattcatttgagattgtaatccgccatatactaactcgataaccctgactttttagaaatctaaaagtataaccctataataaaatagattatgtccaactcgcggattctaaacctgaattgac

SEQ ID NO: 6419 - DNA, 3000 bp, Unknown
  misc_feature (1)..( 3000): cDNA_ID_3048351_gDNA_ID_1621093_Annot_ID_170766 3000 nt of promoter + ATG
ggtagctgctcttgtagccacaatgacgtttgctgcaggttttacaataccaggtgggtttaacagctctgctccacacttgggcagggcaactttggccactaatccaactctcttcatttttctggtacttgacatcttggccatgcaaagttccgttgcaacaataggtattcttatttgggcgcagttaggtgatccagtgctcattcgctcatccttacatgtggctttgcccttactgctttttgctttactctgcatgcccttggcattcctttttggcgtggtcactgcagttgggcatgtgaaatggcttgtagtcatcatttgcattatatctgttttattcttttcttgggcgatctttgtccttggccctcacgtcatgctacaacggtcatacgtttctcccaagtacgctggtgactttctcgtgacttttatgcagtataaagacataattgggctttttgtgtctttgataaagtttcttttttgtggttgttattaagagtttgtagcctattcaaaggcattcttcgtatgaaaaaatcatcaaaagtttattgatgaaaggagatttttgttctctttcaaaataaaaataaaaagctagatatgatggtctctctgagaagcggtatcttggtagctttaactgatagctcaactcactcaatccgtagtcatcgaacaccgacttcacaagcttgtcgtgcgttatttccgtatctatttgcacaactctacaccatttatcgacggtgttaaatacaaattctttacccaatcgtatcgagagaaggatgaaagaagaatgaggaagacggtgatgaattggaaattccgatgatgtgaaaaactcatgtgaagaagacgagttgaaaaaaaaaacgtttcgtatttcctttgatgatgatgacatggactgttgcatccgacatcatttttttaattgatgaagtgacaagtaagccaccaaacaaacatgaaaatttgcctaaataaatcagccaaataaagttatatgttagtcgcaacatgaatactattacagtaattaaaaacgaaaaaacggcaagttacttcagccgtttagcaaacaaaataaaacacacacacatgattcgattgctaaccaacacaagaaacaaaacaaacacatctttgcctataagataatgtgtataaaccatacaactagtgatgtgacggaggacaatgagaagactatttcattatgctgaaccgtccttgacgtcttagcagttagcactgtaaaatgggttcatatcatagtaaacgaatcactctacacaacaattacatgctaaaaactaagaagctaagttaccaaattctctatagaaatagcaatcacttacaataaccaatgctacataacaacttttgagtccataactgataaattgatagaaactgtttgaatttgcaaacccaaaaccgtttcttaggatggagaaatgggtttgtatttttctatttccgatcaaggaaaaatatatcaggcaacaactgcggaagatagggcattttgggatgaaggaggaaaccatagttaacaagcggaaacaatttcaaaggttgatttcaaagatcataaagtcaaagtcaaatccccatagagagactcggttacggaagtgttggtatccgaatatccgatagtcatagcctcagaacttatgttagaatcaataggtttaaccatgcagtgtgcactttggaaatcaagccaagaaaagctatccacgcaaacaatttgcgttagagcgaaatcggataaagagaaagaaaatataggatttaaaaatcttatagcgagtaagacttatttgaaacatcgtcaaatttacttcttttggtgtatatttctcattatatggcgtatatatctgtttatgtaagaaattgtttccaaaaattactgtatactgactttgtaatcttgttttgatatcaatgaatttataaggaaaaaaataaaataaaaatataaagtatgatgtacatgtaaaaaaagttgtttcaagcgtaattgttttttggctagagaatgaatatacagcaacagtaaactaataaacttgcgatgaactaaaatttctggtattcctacaatcaatgaatcactaatttatctataagttttagctatatccgcttaaaccccgcctcaacttgctctctggtctgggtatagttgggctacaacagtgaaaccgtaattaggaaagaaatgataaaaacccaatccagaagcttactgcaagataaagagaaagatcatgaagaggtaggagtgattcatataacaaacagggtcacgttgtcactttctcccagaaaaatacaaatttagactaactatataaggagacgacttcagagtcttctaatgggttagtataactcgggtcatcttttaatctctggctttaaagacatggtaagattccatatatatgaaaactctgtgtgtggtggattgcttttttcatttaaggcaaagataggttttaaggcagaagacaagaacgacctttggcttatttataggagaccaccactttcacttgagtcgagacagtaacgacatttagaatttgcattactcatcttgtcactttctcccaggaaaaaaaaatacaaatttagaccaactatattaggagacgacttcaaagtcttctaatgagttagtaactggggtcatcttttaatcgccggctttcaagacatgtacaatttcatatgaaaactctgtgtgtggtggattgcatccaagacagttttaagacagaagataagaacggcctttgcttatttataggagaccaccactcctctcgataaccatgactcgagacattaacgacttttaaaactaagggacgaaccttaagcaaaagctcttgcattactcaaattcttctgccacttggtaagtctttttctctgccccttctgcatgca

SEQ ID NO: 6420 - DNA, 3000 bp, Unknown
  misc_feature (1)..( 3000): cDNA_ID_3048356_gDNA_ID_1621093_Annot_ID_170764 3000 nt of promoter + ATG
tttttttgtgaatgtataaacattcttcttcatagataatttcacttctttttttttgtcaaagataatttcacttcaatgtaagaaaaaaatcattttatttgcaattaaaaaaaaaaggtatattagaaaagtaatataaaaagaagcaagaaaaggaaaagtacagactaagttggacccagaagaacaaattctaatttaagcttccatcacaaataatgaatcatgatgatacatgccaactaattccactctcacatcatgtaattaaaaaggtactataaactcatatgatcatatagtttttcactttttctagacatagcttaagatatttgataaaagcctcactgcaacttcataataatggatgatataaagctggcagattaattcctagattacttagatagattcagttttgttctaggatgcacaaaaaaggttacaaaattatttgttttcttactgtttctggcaccaaaacagaaaatgccttagatgagtgaaccatggccatacatattcatatcaggatcatcttcatcttcataatctggttctgtagatggtctgcttctctttgcctctcttgctattattgattgtcctctccctttcttcggctttcccctgtaattttatcacattggtcaacaaaccaaaaccatgtatcagagacatacagggcaggtacgaacgaggtaaagtaagctaggtcgggaaactaactgtgtcgacaaaccacccttggatcgccctggccctaattcagctcgtccatctatatcatacagagataaagtgtgtaaaaactgatccaagatttgcaaaagtgaattcagtgtagttgtttgctgcagggcttaccttctcttccaacaccaagttcttcagcctgaatacatttcagggaagatcaacataccagtctaaaaacctttctctctaatgaaggcagagtaataaactaacaaatgacagtcacaagaaaagacacaggcatttcaaagaactccagtctctagctatttgacatcatagattcagctttcacttaagtttgaagctgctagagatattagccatgtagtaatcaaccatatctaaagaaactatattctcaaaccttttttctaaagaaggccgagtaataaactaacaaacgacagtcacaagacaagacatatagtcacagaactctagctctttcacaatcatagattcagctttcacacttgtttgaatctgttagagatatttgccatgtagtattcaaccatatctaaagacactgattctcaaaccaaactacctactagaaagggaaccatatgttctttcggcagttgattctattgcaaaccaacacaacaaaacaaaaaacgtctttgcatatgaaagaaggtgataaaaattgtctaaaacatacagctggtgatgtaactgaggacaatgagaagactctgtcttcaggctgaaacttccttgaccttttagcactgcagaaatgggttcataacttcatatcaaactcaatttctcgttccacacaacaaaatactaaaactgagaagttaccacattctctaaagtgtatgaagctgcaaatagaatccaaagtcaatgttttttcagaatcaagagaagaggagaatgagagacctagcagtactcttggaggaagacaaaaacccttcaaagcctttcaaagcatttccaatatgactcgattcttgaagatagcttgtctccaattcataaacctaagattacaaagaacccaagatttgaagtatgccccaaacaataatttctctatgaaatcgaatttcacaattgaatcgactctggaccattggtgccctaacctgtttctcgatgcttcgtaactcttggcgaagcttctctcgcttgttcagaagagaagtgagcatcgcaccaggatccgtcgaactcttttgccctaacgacattttctgagaaagaaatccacaaattgcgcagctttttcccttcccagaaatgggtggtcgctgaaattcgacgcggaggtaaccgttgcctgatttgagtcgattacgatggagacgatgattctggaattcgatttgggggttttcaccaatggtccggtttgatgtcaacaaaaataaaaatggtccggttctcttttctttttataacttttttttatgggtcagagattttattaactcaactagcaaattgaccaaatagtctacggccaaatgtggctacctgctttgctaaagaaagaatcagccaaagagttggcattgcatggaataaacacaagtaaagtgagaagcatggaaaaagaatattgaaaaatattctacctcttgtaagaatattgaaaaatatggtggtatttgcgatcccattgaatctaatgtttaatataaaatgtagtgatgtgcaacaaaataggtaaaataagaaatgctttgttaaaagtcattgatataaaaaagtttgatgtccatggaaaaaaaaataagtttccagtataacgcttgattggttcgatacttcaatttgaagctgttgaattattttacagtagaacgtgcataaggtccaaccaattactcagcaaactataataaacgagtgatgaacttagatttctggtagcctaaaatcactagcttctttataaagtttccactatgtcacatattctcggtgttttatgttaggaataggagcatctccgctgaaaccccgccgcaactttctcccaacaaaatagacatttagactttattaagagacgacgacttcaaagtctttaattataacttaatgacttaataactcgggtcattttttaatctttgtcttgaatttttctcctaattatttccgactaaagaaacactttcccttaatttatatataggtgacctgaccaccactccttccgatcatcatgactcgacgtggctcgagacaaaacttttaatataa

SEQ ID NO: 6421 - DNA, 3000 bp, Unknown
  misc_feature (1)..( 3000): cDNA_ID_3090001_gDNA_ID_1621093_Annot_ID_170760 3000 nt of promoter + ATG
gcacgtggcattccgcgcttgcgactgctaatggaaaactattcacttttggtgatggagcgtttggtgttcttggacatggagatagagagagtgtttcataccctaaagaagtgaaaatgttgagtggtcttaaaaccttgaaagtagcttgtggcgtgtggcatacggtagctatagttgaagttatgaatcagaccggtactagtacctcatctagaaagttgtttacttggggcgatggtgataaaaacaggctaggacatggaaataaagagacttatcttcttccaacttgtgtatcttcactaattgactacaactttaaccaaatcgcgtgtggtcatacattcacagttgcgctcacaacctcaggacatgtttttactatgggagggacttcacatggtcagcttggtagctcgaattctgatggtaaactgccttgcttggttcaagatcgattggttggtgaattcgttgaagaaatatcatgtggggatcatcatgttgctgtcctgacatcgagaagtgaagtctttacttggggaaaaggttcaaatggaagactaggacatggggacaaggatgatcgaaaaacgccaacattagttgaagctctaagggagaggcatgtgaagagtatatcatgtggttccaactttacatcaagtatatgcatccataagtgggtctcaggagctgatcaatctgtttgttctggttgtcgtcaagcatttggttttacgagaaagaggcataattgttataactgcggtttagtgcattgccatgcgtgtagttccaagaaagctttgaaagcagcattagctccaactccagggaaaccacatcgagtatgtgatgcttgttacacaaaacttaaagctggagagtctggttataactctaatgttgctaatagaaattccacaactcctacacggtcactagatgggacaggaagaccagacagagatataaggtcttcaaggattctactgtcccccaaaacagaaccagtcaagtattctgaggttaggtcatcaagatctgaatcttctattgtcagagcttcacaagttccagctctccagcaacttagagatgttgcattcccaagctctcttagcgcgattcaaaatgcctttaaacccgttgcctcatcttcgacatcgacacttccttcgggtacaagatcatcaagaatatcaagccctccacgcagttctggattttccaggggcatgattgatactttgaagaaatctaacggtgttataaacaaagaaatgacaaaattgcaaagccaggttcgtaatattatctcgaaattctcaggtttattaaacataaaattggatctaatacattaatgaacactttcagattaaaaatttgaaagagaaatgtgataatcaaggtacagagatccaaagactaaagaaaacagcaagagaagcttctgacttagctgtaaaacattcttcaaagcataaggcagcaacagaggtcatgaaatctgtcgctgaacatgtaagcttcttcttatatataaaacatgcttaatagattttttccttgagaaacaagcaatgagactttaaaaaactttatttatcacagttgagagagttaaaagagaaactacctcctgaagtatcaagatgtgaagcttttgaatccatgaattctcaagcagaagcctatctaaatgcgagcgaagcatctgaatcatgtttacctacaacatccttgggaatgggtcaacgagatccaaccccttctacaaacacacaagatcaaaacatagaggaaaaacaatcatctaatggaggtaacatgagatctcaagaaccttcagggacaacagaagcttcatcatcgtctaaaggaggagggaaagaacttatcgaacaatttgaaccgggtgtttatgttacttatgtattgcacaagaatggcggaaagatatttagaagagttagattcaggtattttaacttcatagtaatctcctctcttttatatcaaaatttatgtaaatcatttttgtgaattgagtttctttgtagcaaacggagatttgatgagcatcaagcagaagaatggtggaatagcaaaaaagataggttgcttaagaggtatagtcatcatgcttcatcatcgagtccaacggcttctgattcagttccaacaccaactcaacctcaaccaccagcttctgattcagttcctacaccaactcaacctcaaccaccagcttctgattcagttcctacaccaactcaacctcaaccaccagcttctcctacacaaccgaattctgatcaagcagaggattcaaaagaagttcttgatgaaagctagtcatcatgtgtataatagcagtttggcaaagtagattgaggaacaaggcatcattggaatgtcattactgtaggaccaaaatagatacaaagatttattgttttcttttgagtttatgtcacaaatatatgtaaacgtatgaaggttttgatccacgtacgattttcttaggtggaaaacaaaactagatttatttttgtttttttcctatgaaagtttaaattggacataaagattataataatcatctcaagagttgcattaatgttctaattgttagattcttgtttgagtttaccatcaagtccatcttaagaagatatatttggcattttcttgagtcaactccaaagtctccactttttgttttctattaaccgagtccagtcaactctgaactttctccgacacttcattgttcttgaaaaagtcttcaaagcaatagttttttttttgtctttttgaagcaattatacaatcaattcctggctattgccgcgttttttcataatctattcctttacttttccctatttcttaacttaaggcaagaacttttctataaaatagatcttgactttcttcttctcctatctaagttcaattcatttgatattccttctaaaaatg

SEQ ID NO: 6422 - DNA, 3000 bp, Unknown
  misc_feature (1)..( 3000): cDNA_ID_3048360_gDNA_ID_1621093_Annot_ID_170759 3000 nt of promoter + ATG
aaaacaagagtaaaaacacatatacagagagaaaacaaagatattgcataccaaaacagagaatagattctcttaaaactcatacgagaaacataagctgattacaacaagaaaattatgtttttctgctttagtctgtgcatataaccaactcggacctccacgagctaaatatgatatgtattgtccttctttcgtgacactcaaagctatatcccttgcgattgcattcacttttgtagatggtagtttaaagacgatcctcccaaattttgagattaaacgatgaatcatgtataagtaagaaaaatacattggccaattgagataatcatttatggcttctagagcaccattacaatctgaccaaatttcaatattatcctgatgtaaatcactcagactttgtagtaccaaaagatcccatgcaattctgcggcaatgcggtttgaggcaggtagaaacatctctctcgcatagaacataatatcaccatggtcattccgaatgattcaggctcttccacacttatgagcatcattaatccaagaaacatgtacattacacttaagcatgtacattacaaccatatagatggactaaaactctataccctccatatgtttctcgtatgagatttaagaacatatatgctttgttttgagatacaatagctctgtttttcattgtatcagtactattaactcttggtttttaataagaaacattagactaaaaaaaaagtgttcttttttggaaaaccttaaaaatattaaagaagatatgataattgtaaagagaatgcgtagtgtttacttagtttgattttgactccggagcgaggactttgttgttgttggaagaaatcgtaggttgtgtcccaagcaaaacaatgaaacgataatcaactaataatgacgaaccgtaaacaaaataacaatgattagatgatattaaattttgccaaaacttttgaccaaaagaacaaaaaaacaagtttaccattcaatgtatgccgcaatttttttcttctccaagtaaactcttagatcatctttattgatggtctcttaaaacaatttttatgttaagagacatgtcttataattaacaaaagtctcctatttaagtaagagactttaagacacttttgttagttataagacacatcttttaacataagacttgtcttaaaaaaccattaataagaatggtcttactctctcaaatctcagttattaaatcgaatcataacgaataaagctaactaaactcggtgattggttcgtgtcatagttggctgtaaaaaattactactctattttttccattaaattaaatatgatattaatttatttagtttttaaccattcttattctccaatatttcttactattttgttgaactgtttaaattaagtattaattttatgcttttaatgtataaacaaaaaagttactgtaatttaggataatttcttaatttttgtattttttaagtaaaacatctactcctacatagtcaagtttatttacttcctattacatatgcaaaatgtctctaacaaaaaaaagatttctctacagatttgcataagaatctttaatatgaaattttagcaaccaaacaaacagcataattcagagtatcatgttcatattaaacctcccaaaaaatcacaaaatattttacaggaaaaatatatggaggttggacttaaaagatgttgtgagaaataaataactcagcttttacatattgtctcatcaattcatttatttaaaaacacaaaaactagatacaatgtcaataagtttgacatttattctttggcttttgacattgccatcgaacatatttcccgtggcggggtccacgcggaataataaagccgctcaatccatttctctaacctaattttttttatattttttattcactttccttcctaaataaattaatattccattgttttaattagaaccaattaaacccttaatttacgggtaatcactttagtaactaaaagaacaatattaatcacagtagtaatcaatctcccaaacaaaaaagatataaaattgctcgagagagagaaagagaaaacaaaaaacaactgagaaagaaggaagaagaagaagaagattagtgcttagtctttttgcaattcacacacacatcgaaagagggattataaagtttccaactttttctttcaattcccagaatttcgatcttcaaattttgaaggaagaaaaaaaccaagagcaagagttgaggaatcgaatcccaagaatcgaggtcttctccctcttcttttcactttcttttatttttctctcaccataaattacgggtctctgtctttgtgtctgcgtttttgtctcaccatgttgtgttcctaatctgacgcttcttcttcatgttcttcatttcaagcttcgttgagatcgagcttttttgtttcaattgtggtttgttgcattttcgctgactcacaaatagggcttcttgtttgatttcgtatttcccccaattttggtgtacatttggggttttcctctgatttcagatctattaggttttgtgttctactctgaaatgatcatgtaagtaatctatggaggattctgtaatttagattcagatatgtctttgatttggatacaaagttgtcaactttaagctcctttctgttatttgtgaataccaacttcactgcttttttatgactttgcaaagcagttgaattgccttagtttctattgaatcattcttatttcttcaaacatgcttctgttgaagtttctagtcaatgttagctaacatatgtcattttgttgcaggtgtgagaagcagtatcagtcactagatgcatgacatttgaaagttggagtggaacttgttcttagcgcgtattgaactgtctggtcgcttgtacataaagcttgtaactaaaaatatctggtctgaggggtaagctaaaggggagagaaatg

SEQ ID NO: 6423 - DNA, 3000 bp, Unknown
  misc_feature (1)..( 3000): cDNA_ID_1814423_gDNA_ID_1621093_Annot_ID_170757 3000 nt of promoter + ATG
tcagttttgactgactatttcagcagcctctagttctgtaggatacaattatattagagagcgttgggtcatggtcttactcaactcggttggtttcggtttattcgcctcttgcatggttgaaatgtgtgataggttagaatttcatgtaggtttgcttcctattctctgtgttaataggaatcttatcagtaaaattctgtactttccttttgcctcatcctttatctagtgacaaatctacagttcaaggtttggattatgattctatgtgtagtcgattaggaatgtatcatttcgtggttatcttgtggtatatctcattccttttccttttcagattcattgatttgttgtatggttttagtttaggtcttgtcaatggcgtatttctctatttgtcgtgatatgttgatttcctagactatggacttcacatttcactgaccattcagcagcctccagttgtgtaggttacaattagattatagagcattaggttatggtgtggtctctcactcaaatgttttcatttgtcctcaattctcaaattaatggaagcttagttcctttcacaaacagttgtgagctcgccttggctttcagttttttcatgaaacaggtctcttacatggttgaataatcttgtgatagcgatctcttatatctgaatatatggtcttcttgagggttaatcgaaaagcatagaaaaatatgaatatttgtggggtgttctttgctcaaaaaattggttacactttgtagatgtgatgatgttttggaataacttgagatgtcttttgatttccagaaaatgctattaccctgcggccttcctccggaaagagaagaggaataggtgacatgaggattcgatttgtctttcaagttatcaagaactcgtgtgatggaatgttggtttggagttttaaaaactgtccaatttgatcttctggtagagatttatatgactgttaaaaaacaactttgtctgtgtaagtttgcttttcttgaatgtaaaaaacaaaacaccttggatttttaggttggttttacacggtttcgtgttttaatcaaattcatcaaaattttcaatttttgaactatccaaaaacccgaataatccgacataaccgttattgcatgcctagtttgatttgttaaaagttcccgacataaattcttaccgtgggatgtccaaacgacaagaaaacaacgggtgtgacaaatggacaaataaaagcaaaaagcttaggccacttaaaccaaaagccatttcatcaaacgtattctaaaatctaaactataaataatgtaatatcgtcaacgatggaagcctataaacactatagttgatataatcatacgcatctattataagcttgcttacttatggataatttttcttattctctttgacttatttttgcctagtttcattgaccatcataatactttaacaataccgaaagtttcataaacattataaaactttagtcattgtatacaatccgaaagtttcataaacattataaaactttagtcattgtatacaattatcaataagttttgtttcccatgcatgtgaaatatcacttgactcaagatgaatggtcctaacacgtttacctttagagacacatgttaattttcatattgaaaatgaaagtaaaaacaaaatgcttaatatagcatagaagaacattagctatcctactaaattaccatatagaagaaactcatgaatttcacactgtgttcatgagttcatcgagaagatctactaacgacatgtaaactggttattaagtatgagcttgatttctcaagactcatcaacaagtgttccatgtatcgacgttaccaagcgttcgggagatccacaagtaaatggatgctttcttttttaaattgtttgaacttttataaaatcaggtcctttacatgcacttccagaatctgtccaagcgagagatcataagatagaacaaagtgataatatgataatattgcgctagtacacgatttgttgacagtttaaatccaaaaatgttcatcaacatattggtacgattagtaaatgagtaaaaaaaaacttaaataaatcaatgtaaattgggtgatgtatgtagacttaggtattgcactaacttgattttattgattcacaaagtatagtatttatacaagagagacatcttatgagatatactctaatccctaaaatataggacataactctatcacaagatatatagtgataatcttaatgagattatactctatccccaataatgtatcaaaatatataaacgtaaaatgaaaatttcagcttgaaaaatgacaaatgtagaacttttttttttggtggtagattctgtttttaataaaaatatattataaagttttgcaaacttgtttcgtgttgttgttgattaagtgatgtttatggttattacgaattagagttttggtcgttagaaaacagagaatttaaatgttaaaccgtgcacgaaaacaactaattttttcttctaagtaattaaaaaaaaaacagtatacaaaaataaaataaaaagattcaatgaatgataaatatttacgttgaagttttgtctttctttaggttaaattcaattttcacatattcatttctttattattcccttcttcttctttctctttctcttttcttccgcaaatctccgcaaaatcttccctcaaactcagatccgattcttctaattctttgtccccccagagattcttcttctttctccaagtaaaagaaaacaactttctttctcttttcttgcgaaagtcctcaactttcaccactaaatcagcttccttcaatcactgtgtttgctttggacccagtttctgatttagcgactagggttttgattggaaccgtattaagtatatgagaatcgggttttactggtgaatcggattatcatcggaattcggaaaaagatggatcggaatcaaaagatg

SEQ ID NO: 6424 - DNA, 2231 bp, Unknown
  misc_feature (1)..( 2231): cDNA_ID_3090009_gDNA_ID_1621093_Annot_ID_170756 3000 nt of promoter + ATG
tttgcccgcacagctctcaattaaaactaacacaaaggccaaaacacataggactatcatggtaatataaaaagagttgttcatgttctcttttgtgcaataaggagccaggaaacatgttcttctatttatataatttggttttattgtaacacattagtttcgggtcagctaatggcatgattatcatatagccaaaatagaaccttcattttccattcacgttgcggggaatatagaaccaccaatataccgaggagaaacttctgtatgctcttaagaaatttagtgaaagttagtatggctgaagttaaaagaagaaaacaaataatatttagtattatcaattcatttctatacgtatatgtcattttaatttgccaagctcatatataacactgatttgcagcacaaaacgataaatgatttttcgagatccgaaaatagaaagtggtttttagaacttaaagagtgttatgtctactttgtcgcaagttatagagaatactcaagggcagcctaatgaagaaagattggttaaccaaattaaaagacatccataagaccaagtcctatttaaattaaaaaccaggaccatttctggtagattcaaagtatatcacagtattgaagcaggacaggtaccaaacaaaacaaaaaaaagtagatagatgaaacaacaacttaaaagagagatgttccctttcccttcttgtctccaccgatctcaaagtgcttgcacctctgcaaaaaccacacacaaagtgtaagaaacagaactgagactaaagagtgattaacaaaggtaaagaatgtcgcagacattaccttaatcgggcgttgcgagaaatgcttgcagctttggcattgaagcctcagcacaatcttcttagttgtcttagcctgttccaaagaaagacaaataatgagcaaggtccaattaacaaatcattcctataagacatatttcacagagtcaattctgaaatcctaaattggttctcacatagaagacagtaattagagatcaagacaaggaaaagcgagtataccttcttgtggaagacgggcttggtctgacctccataaccagattgtttacgatcataacgacgctttccttgggcagcaaggctatctttacctttcttatactgcgtcaccttgtgcaaggtatgcttcttgcactccttgttcttgcagtaagtgttcttagttttcggaatgttcacctacagaaaaccaagtttaaaactaccacaagatacagtttcaacagcatacagaattaattacgatcatagaagtgaatctaaatacgcccttcagaacaaaccctaaaacttgttaataaaatttcctgcttctcctaaatcattcagaattaattgctaccatacgatctgactactcaactagtcaatattgataaccattttgtgaatcctacaagtccctgaagtacaaatccttcttaattctcctaaaaatcagaacagaattgcagcaacacaaatgaagatacataacactatatcattttgaatctctggtagattggagctaaaactcttcacagagacgaagtgaactgaatcttcgaatttacaacacagaatgcaacataacagattctaaaaatcacaattagactctaataattctcgatttaagatgcaaaatcagaaataaacaacttaaagaagaagaaaaatcacacagcagatctataatcaataatctcgttcttcaatagtaaccaaggagaaatttagcagaaataaagaaagagaagagagtcaccattttcgctcttcggtgaagctcgtgccgtcgtcttccactgccgcaaaacctttaataaaaacctaaagtaacagagcttataagagagacatttgagaaaaccctaatactacaaacattgggcctctataaacacaaaaagcccattaacttaatcaaaaagtcaggcccatctcacttcccttttttaaaagaaagtaaatatattctagttgccgaaaataaaaattgttaataatcagtggcccgtggacaaaaactagccgtttagagatacaacacaacggttatgtttgtttctttgtttcaaacttcaaacctcgtgaatcactcacaaaccctaatccccttttttattttctctctctctaacgctctctgaatctcaatttcaatttcactctttcgaaacttcttcaacaatg

SEQ ID NO: 6425 - DNA, 3000 bp, Unknown; identical to SEQ ID NO: 6407
  misc_feature (1)..( 3000): cDNA_ID_2123319_gDNA_ID_1621093_Annot_ID_170755 3000 nt of promoter + ATG

SEQ ID NO: 6426 - DNA, 2231 bp, Unknown; identical to SEQ ID NO: 6424
  misc_feature (1)..( 2231): cDNA_ID_1814427_gDNA_ID_1621093_Annot_ID_55547 3000 nt of promoter + ATG

SEQ ID NO: 6427 - DNA, 3000 bp, Unknown
  misc_feature (1)..( 3000): cDNA_ID_1814423_gDNA_ID_1621093_Annot_ID_55548 3000 nt of promoter + ATG
tttcttagaccatggacttcagttttgactgactatttcagcagcctctagttctgtaggatacaattatattagagagcgttgggtcatggtcttactcaactcggttggtttcggtttattcgcctcttgcatggttgaaatgtgtgataggttagaatttcatgtaggtttgcttcctattctctgtgttaataggaatcttatcagtaaaattctgtactttccttttgcctcatcctttatctagtgacaaatctacagttcaaggtttggattatgattctatgtgtagtcgattaggaatgtatcatttcgtggttatcttgtggtatatctcattccttttccttttcagattcattgatttgttgtatggttttagtttaggtcttgtcaatggcgtatttctctatttgtcgtgatatgttgatttcctagactatggacttcacatttcactgaccattcagcagcctccagttgtgtaggttacaattagattatagagcattaggttatggtgtggtctctcactcaaatgttttcatttgtcctcaattctcaaattaatggaagcttagttcctttcacaaacagttgtgagctcgccttggctttcagttttttcatgaaacaggtctcttacatggttgaataatcttgtgatagcgatctcttatatctgaatatatggtcttcttgagggttaatcgaaaagcatagaaaaatatgaatatttgtggggtgttctttgctcaaaaaattggttacactttgtagatgtgatgatgttttggaataacttgagatgtcttttgatttccagaaaatgctattaccctgcggccttcctccggaaagagaagaggaataggtgacatgaggattcgatttgtctttcaagttatcaagaactcgtgtgatggaatgttggtttggagttttaaaaactgtccaatttgatcttctggtagagatttatatgactgttaaaaaacaactttgtctgtgtaagtttgcttttcttgaatgtaaaaaacaaaacaccttggatttttaggttggttttacacggtttcgtgttttaatcaaattcatcaaaattttcaatttttgaactatccaaaaacccgaataatccgacataaccgttattgcatgcctagtttgatttgttaaaagttcccgacataaattcttaccgtgggatgtccaaacgacaagaaaacaacgggtgtgacaaatggacaaataaaagcaaaaagcttaggccacttaaaccaaaagccatttcatcaaacgtattctaaaatctaaactataaataatgtaatatcgtcaacgatggaagcctataaacactatagttgatataatcatacgcatctattataagcttgcttacttatggataatttttcttattctctttgacttatttttgcctagtttcattgaccatcataatactttaacaataccgaaagtttcataaacattataaaactttagtcattgtatacaatccgaaagtttcataaacattataaaactttagtcattgtatacaattatcaataagttttgtttcccatgcatgtgaaatatcacttgactcaagatgaatggtcctaacacgtttacctttagagacacatgttaattttcatattgaaaatgaaagtaaaaacaaaatgcttaatatagcatagaagaacattagctatcctactaaattaccatatagaagaaactcatgaatttcacactgtgttcatgagttcatcgagaagatctactaacgacatgtaaactggttattaagtatgagcttgatttctcaagactcatcaacaagtgttccatgtatcgacgttaccaagcgttcgggagatccacaagtaaatggatgctttcttttttaaattgtttgaacttttataaaatcaggtcctttacatgcacttccagaatctgtccaagcgagagatcataagatagaacaaagtgataatatgataatattgcgctagtacacgatttgttgacagtttaaatccaaaaatgttcatcaacatattggtacgattagtaaatgagtaaaaaaaaacttaaataaatcaatgtaaattgggtgatgtatgtagacttaggtattgcactaacttgattttattgattcacaaagtatagtatttatacaagagagacatcttatgagatatactctaatccctaaaatataggacataactctatcacaagatatatagtgataatcttaatgagattatactctatccccaataatgtatcaaaatatataaacgtaaaatgaaaatttcagcttgaaaaatgacaaatgtagaacttttttttttggtggtagattctgtttttaataaaaatatattataaagttttgcaaacttgtttcgtgttgttgttgattaagtgatgtttatggttattacgaattagagttttggtcgttagaaaacagagaatttaaatgttaaaccgtgcacgaaaacaactaattttttcttctaagtaattaaaaaaaaaacagtatacaaaaataaaataaaaagattcaatgaatgataaatatttacgttgaagttttgtctttctttaggttaaattcaattttcacatattcatttctttattattcccttcttcttctttctctttctcttttcttccgcaaatctccgcaaaatcttccctcaaactcagatccgattcttctaattctttgtccccccagagattcttcttctttctccaagtaaaagaaaacaactttctttctcttttcttgcgaaagtcctcaactttcaccactaaatcagcttccttcaatcactgtgtttgctttggacccagtttctgatttagcgactagggttttgattggaaccgtattaagtatatgagaatcgggttttactggtgaatcggattatcatcggaattcggaaaaagatg

SEQ ID NO: 6428 - DNA, 3000 bp, Unknown
  misc_feature (1)..( 3000): cDNA_ID_1814419_gDNA_ID_1621093_Annot_ID_55549 3000 nt of promoter + ATG
tgaccaaatttcaatattatcctgatgtaaatcactcagactttgtagtaccaaaagatcccatgcaattctgcggcaatgcggtttgaggcaggtagaaacatctctctcgcatagaacataatatcaccatggtcattccgaatgattcaggctcttccacacttatgagcatcattaatccaagaaacatgtacattacacttaagcatgtacattacaaccatatagatggactaaaactctataccctccatatgtttctcgtatgagatttaagaacatatatgctttgttttgagatacaatagctctgtttttcattgtatcagtactattaactcttggtttttaataagaaacattagactaaaaaaaaagtgttcttttttggaaaaccttaaaaatattaaagaagatatgataattgtaaagagaatgcgtagtgtttacttagtttgattttgactccggagcgaggactttgttgttgttggaagaaatcgtaggttgtgtcccaagcaaaacaatgaaacgataatcaactaataatgacgaaccgtaaacaaaataacaatgattagatgatattaaattttgccaaaacttttgaccaaaagaacaaaaaaacaagtttaccattcaatgtatgccgcaatttttttcttctccaagtaaactcttagatcatctttattgatggtctcttaaaacaatttttatgttaagagacatgtcttataattaacaaaagtctcctatttaagtaagagactttaagacacttttgttagttataagacacatcttttaacataagacttgtcttaaaaaaccattaataagaatggtcttactctctcaaatctcagttattaaatcgaatcataacgaataaagctaactaaactcggtgattggttcgtgtcatagttggctgtaaaaaattactactctattttttccattaaattaaatatgatattaatttatttagtttttaaccattcttattctccaatatttcttactattttgttgaactgtttaaattaagtattaattttatgcttttaatgtataaacaaaaaagttactgtaatttaggataatttcttaatttttgtattttttaagtaaaacatctactcctacatagtcaagtttatttacttcctattacatatgcaaaatgtctctaacaaaaaaaagatttctctacagatttgcataagaatctttaatatgaaattttagcaaccaaacaaacagcataattcagagtatcatgttcatattaaacctcccaaaaaatcacaaaatattttacaggaaaaatatatggaggttggacttaaaagatgttgtgagaaataaataactcagcttttacatattgtctcatcaattcatttatttaaaaacacaaaaactagatacaatgtcaataagtttgacatttattctttggcttttgacattgccatcgaacatatttcccgtggcggggtccacgcggaataataaagccgctcaatccatttctctaacctaattttttttatattttttattcactttccttcctaaataaattaatattccattgttttaattagaaccaattaaacccttaatttacgggtaatcactttagtaactaaaagaacaatattaatcacagtagtaatcaatctcccaaacaaaaaagatataaaattgctcgagagagagaaagagaaaacaaaaaacaactgagaaagaaggaagaagaagaagaagattagtgcttagtctttttgcaattcacacacacatcgaaagagggattataaagtttccaactttttctttcaattcccagaatttcgatcttcaaattttgaaggaagaaaaaaaccaagagcaagagttgaggaatcgaatcccaagaatcgaggtcttctccctcttcttttcactttcttttatttttctctcaccataaattacgggtctctgtctttgtgtctgcgtttttgtctcaccatgttgtgttcctaatctgacgcttcttcttcatgttcttcatttcaagcttcgttgagatcgagcttttttgtttcaattgtggtttgttgcattttcgctgactcacaaatagggcttcttgtttgatttcgtatttcccccaattttggtgtacatttggggttttcctctgatttcagatctattaggttttgtgttctactctgaaatgatcatgtaagtaatctatggaggattctgtaatttagattcagatatgtctttgatttggatacaaagttgtcaactttaagctcctttctgttatttgtgaataccaacttcactgcttttttatgactttgcaaagcagttgaattgccttagtttctattgaatcattcttatttcttcaaacatgcttctgttgaagtttctagtcaatgttagctaacatatgtcattttgttgcaggtgtgagaagcagtatcagtcactagatgcatgacatttgaaagttggagtggaacttgttcttagcgcgtattgaactgtctggtcgcttgtacataaagcttgtaactaaaaatatctggtctgaggggtaagctaaaggggagagaaatggagactgccaaagcttggctgagtaagttaaaatctaaagacaaggtgaaatcttcgaaaaagaaggaagccacaagtaatgtaaaggaaggaccgaaaacagctggaggtgaagaagcactttcaaatataactaaggagaaggctgctgctgcaaaactgtatattgaaaaccattacaaaatgcaaatgcagagtctgcaggaaagaaaggagcggtatggtttcattacatatttatatgtttcaagttttcatgatgggaaagaactttattcgtgtctttctgctactttcgtgtgaacttccgtccatatccttagctctttgtttggtatttacatttcatacagacgcaaaatg

SEQ ID NO: 6429 - DNA, 3000 bp, Unknown; identical to SEQ ID NO: 6421
  misc_feature (1)..( 3000): cDNA_ID_1814415_gDNA_ID_1621093_Annot_ID_55550 3000 nt of promoter + ATG

SEQ ID NO: 6430 - DNA, 3000 bp, Unknown
  misc_feature (1)..( 3000): cDNA_ID_1814411_gDNA_ID_1621093_Annot_ID_55551 3000 nt of promoter + ATG
gaatcagcaatctccggcatcccttcttcttcttcttcttcttcttctttttgctcttctattcgtctcacaacattctctttgctcccacttgtcccctcaccgcgtgattggctttggtattgatagatttgagagtattcatcatcgtatccatactgacgacgctttggtttggtgagagatcgagaaatgaagttgagaaactgtcgagaactttggttccggctatagtagtatttgtccgtgtagctattgttttgaaggtaccttgttctaaaaggaacgatgagacggcgagaaatgaaccggaagacacgagccgttgattctctgaccgatgaagcgatctccatgtctctgaacttcgacttgaccatgtttgtaaagtttttccatgccctcttcgcaggattttgcttcttcttttgccgcaacgaagccattcagagacttacttttttttttttttttgaaaaataggtttggccaaatgtgtattattgtcaagaaatgctttatattttgctacgagcctttcattcttcgattaaaatattaaaacgctattgcttttgggtaaaaagtagggaacaaaaagtgggttctcttagcttactctggatggcaaaaactcagattctggcttaaaaaagggcatattgtttttgcacatcttcaggtcttaaagcgttttcatgaggaagtttattattttcatacactctgaaagtaaagttatatatcttaagaatttttctttaactaaatttcttcacaatctcttttaaagatgtatgaatccgagttgttttgaagttctgtaaagatgtaagttatgctccttgaagctaagaccatgtgagatccgaccaagggaaggcccataattttattggataaagactaatgaacctaattattggattgggactgttgagctaataattatttatttaaccaacaaccaatcaatcaatcatacatttctctacacattccagaaaattataattaaccatagcattatattcctcatacgcacccaccaatttgttttaagacatgtcttggacattatctgcttcattctgtcttacaatagtcagaaattcagatatttccagtacaacaagtaagtctcgtccttgcattacaagattccacataagcttgaaaggctctttcaacgttggtttgaaatgcgaacaatcttgtgttttgcggtttatccgctattacattagaccgaaaccaaactggtacttcggaggacacaatagcctcataagttacaaaaaaaaaaacatgttttgcgattgtgtcggcttggtctgagagtaagggaaattatgccgaactctgcttgaaatcttttatttggccaattgtgcttaaggagcaccaaatagttttctttcttagcccgttaccggatcttttaccttttcaaacgatttatgcatatttttgtagtgaataagcatggattttctttttctatgctagaggtttaatttccgcctaacaatatgtaagtctatgcaatttttatttttaaattggatgtccaagaaaagtgcattttttctacgccgactaaaaaaaaattgacgtccaaaagctataattgatttttttttcctgttattatttagatttgacactaatggcaccgaccagttaaactttttactagttctctctactaataaaagaaaatagctgatatataaagtactaattttgaggacaaacataactactgatactttgattacaatattaatctgatgatgccggagatcaaaggttccagtaagtgaaagccattgatactcgatttcaaagagttatttggagtataacgaatctggaattttggtataacatgtctacggagaatctacgaattgatgcaagagaagatatcaagtaacatcaataacattagacgattatggagtttcatcgaagagatgataaccaaaaacgacgatctcatcaatttgggattgaatctgaaaaggaaagaaacggttgacgagcaagacttcggtttctaaagcatagtcgaaattcacctttttatcgtttattaaaatatttaattataattgtgtggatgtatgtttgaatgtgtttattaataatgtattacggatgtatctaactcttgtattcgattcaaaatcaatgaatgaattatgtgtaaaaaaaagaagaaaaaagactattaatctgatactgcaaaaccgcaaatgttcagttaaaagttgttttcaatcatgaatcttgtgtcccaagtcccatgaaaaccaaaccaactatgagttggtctagtagttaaccttttaagtaagcaacgtagagattctagaaattacgggttcgaaaacataaaaattattctcttttcaaaactagatagaacttttttctcgtgatacgaaatttcttttttattttttcttgggaaaaaacaaaatattatgactgaactgttgttttcttgtcagcccaaaaatatatttgtcatgaatattaatttaattaatttcaaacattaaaaatttaaaaaataaacttgttaagaaattcaaacattttgaaaaaattatggtcaataagtagttagtcaaactgtcttttaatcaccaaattcacccagaaataaacttgtttaatgttgtccgttacgtatcaaaagctgagactgaaaatacgaagaagcttcatctctctttttctcaaaagtcaaaagtcaaaatagtgaatacgcgttttccagtttattcttcgtatatgtcatagcgttcagaaacattgtgtatatgtgatcttgaacttttcttgacacgttatctcatggcttcttcttcttcgtcttcgtctcgcacctggagataccgcgtgtttacgagcttccacggagcagacgtccgtaaaacatttctgagccatttacgtaaacagtttaactacaatgggatcacgatg

SEQ ID NO: 6431 - DNA, 3000 bp, Unknown; identical to SEQ ID NO: 6420
  misc_feature (1)..( 3000): cDNA_ID_1814403_gDNA_ID_1621093_Annot_ID_55553 3000 nt of promoter + ATG

SEQ ID NO: 6432 - DNA, 3000 bp, Unknown; identical to SEQ ID NO: 6419
  misc_feature (1)..( 3000): cDNA_ID_1814399_gDNA_ID_1621093_Annot_ID_55554 3000 nt of promoter + ATG

SEQ ID NO: 6433 - DNA, 3000 bp, Unknown
  misc_feature (1)..( 3000): cDNA_ID_1814397_gDNA_ID_1621093_Annot_ID_55555 3000 nt of promoter + ATG
atgataaagatacgaaacatctgggtgttgggcaagatgtggacgggaatacacctttgcaccttgccgtcatgaactgggactttgactccattacttgtcttgctagccgtaaccacgagatactgaaattacgaaacaaaagcggcttaagagctagggatattgccgagtcagaggtgaaacccaactacatctttcatgaggtatttctgattccgtttcatacaacacatttgatccctcataaatgatttatagcttgacctccatatttttggaattacagaggtggacactggcgctcttattatacgctattcactcaagtggtttcgaatctgttaagtcattaacaatacagtcagtgccactagaccctaagaaaaacagacattacgtcaacgctcttctcgtggtagcggctcttgtagccacagtgacgtttgctgcaggctttacaataccaggtggttatatcagcgatagcaaaaaaccaaacttgggcagggcaactttggccactaacccaactctcttcatttttctgctttttgacatcttggcaatgcaaagttctgttgcaacaatatgtactcttatttgggcgcagttgggtgatctagcactcatcctcaaatccttacatgtggccttgcccttactacttttttcattactatgcatgcccgtagcattcctttttggcgtgatcactgcaattgcccatgtgaaatggcttttagtcaccattagcattatatctggtggattcttccttttcgcaatctttatccttggccctcacgtcatgctacagcgctcacaccttccgcccagttctggtatatttctcaagacttttatgctgactatagacatatctgagttgtttgtgattttgatcaaagcttgttttggttgtgtggcgtgttccgaataaatcatcaaaagtttatagatcaaaggatatttttcttctcttttttttttctttcaaaaagctacgagatatgctggtctctagctctgagaagcggcatcttgatcatacaactcattcgaagtcctatcagaattatctgtagttgtaataaagcgtgaaaagtatatcattcgaagagattttcctctaaaataatcgagtgatattttattattcggtttagtggataccagtttactaatctctcgaatttatgaaccacattcaaaggagatgagtttaacaaaaaaaaaaggtaaattgttttttattctcgtcgtgcgttccacatgagtcgttttcaagagcaatatagacgatacttcacaagaattattatttttgttggggtataaaaatttgaagatacgtttggcaacgacaatacgacgttagattgttccaagaggtgcaaaaacttagggaccctctttattcgttcactgtaaccactgaccacaacatgactaggtagactcttctttttgtcaatgttgatgtttatacgattttgatgagactggctctatcaagatatgaatctctgatcatatctccactaatctttcatcttgttattccctcatttacttttgatttccttctctctctctcttttttatgtatacaaatttttctttatttcgcttcactaaaccccaccatgtaattgtgtgagttttggcgaagtggcgcaacaccgtagagcacaccaacactaacccaatccattttatgaccgtaaattttgttgttgattagtgtatttttttcttgtttagttattctgagaagtaaattttttttttacaattagtttttaaacatagtaaaataaatttatgacagattataatattattttaaaaatcaataatatctaacaaattaaataaacaaatcacaaattactatattttaaataaatattgataattttaattatattattttgtttattggttaactcgcaggatatgcgagttaattcatttgagattgtaatccgccatatactaactcgataaccctgactttttagaaatctaaaagtataaccctataataaaatagattatgtccaactcgcggattctaaacctgaattgacatggcggaaccattcataaaaccataccaattcttgcgttttggaaagttggtttccttttcatttctttgaatttgatcctagattgtgtagttctcaagctcatgctcttgctcgtcaaaaacgtatcaacgatttgcttttcctttagacgttcttgcatcggattggtttactcaactccactcgatgaaaaagttactatcttaaaaagaacaaatgcaaattcaataaaattccccaatatctacgcatgaaaatatgattctgtcttttttttgtttgtctatctttcaatactttaaaaagtgtatttctagaggcgatttgtcatttcccgaataggaatttgagtaaaaaaaaacactctgttttttatttccactaatatcaaatcggcgaatatagttcccaccattcttatctccttgtcgtcactcggaattttttaaataataggatcgctttaataatataatctctataatttatagttccttttccaatattggcgtctccgttgaagctttccacaaatctcaaatttgtttggagactctcaaatgtatccttctctcgacgatgatttcgtctctgatttgttttgcttcgatcaaaggttcgtcctttcgcactcttctcttccttcaccttcctctgttttctctatctctttcgattcagttgttttatcgaatttgatcccttttttcaattgcaaaatcatatctttaatgttcaattcgatttctgtgaaaagtgttgttgtttttttcgcatttcagggggaaaggttgtgtcttttgatgataatttgacgaaccctaatgtatctgaaagctgttaaattgaataggagaagaagtagctttatggatgttgttgtttatatttactcctattg

SEQ ID NO: 6434 - DNA, 3000 bp, Unknown; identical to SEQ ID NO: 6416
  misc_feature (1)..( 3000): cDNA_ID_1007795_gDNA_ID_1621093_Annot_ID_55556 3000 nt of promoter + ATG

SEQ ID NO: 6435 - DNA, 3000 bp, Unknown; identical to SEQ ID NO: 6415
  misc_feature (1)..( 3000): cDNA_ID_1814389_gDNA_ID_1621093_Annot_ID_55560 3000 nt of promoter + ATG

SEQ ID NO: 6436 - DNA, 3000 bp, Unknown
  misc_feature (1)..( 3000): cDNA_ID_1977166_gDNA_ID_1621093_Annot_ID_55564 3000 nt of promoter + ATG
actgatcaagatcgatggctttgatagcaactaccattgagttcatcggaatgcatatggccttgtagaccgaagcactaacaccaacgcctatcttgcagatgatctcgtaggcttcagcatcaagagggaactcgagcttgttccgagccataaatagaaagaagatgagtacactcttgcttattgaattgttatgtttttagtggaattgtggtcttttagaggctaatagtaccatgaggctattcatatagggatgaaaaaagaaagagttggtttagcatgtgaacttgaaaaaaaagagagcctttaatgtaaaagcaaaacccttatctcttacttaaaaatatgttgatgaaacaataagatgaagcatgtgaaagagctaactaactaaccttagttaatgagattttacctttggtctttccagggacccaaagggcaaacactatcatttcaacttcaaaccggtaaaggtacaaaaattaaatggagctatgaaaatttattttcatcatttcacagaaatttaaagttctagatttagatatctagactcgttttacaacttttttttcatggcatttctgaagaacttgcatttgcctttgaccacatgagaaggaaacaaagactagagaaaagacgtcagccttcttgacatttggtaaaatgaatgatcaagtattcaaacatcaatatgctaagataaaatcacaatggaacagaacttgttttataagtcttcagggatgtccttgaaacatatactataaagtgggcaaaagacttatgaaacctacttaaacatcagcacttcactgtttactttgtctcacacgtaaagcaaatgcaagtaaatcaatgcagtcaaaactctaagcaacacagccaatcccacagcattaaggtctacttcataagaaacttgtacctgtcagtatgtgtttcttattccatgaactgaagctataccaataatcagtgtgcaccatatcagttggacactttgtcaattcaacacatacacgctttagcctgaacttttctttgatctgaaatatactcacgaactctctgagttttacttcgcatgggctcaatcatattttctgtcttgtgaattatctcttttgacagatgaccctccagaaaactgaacaatgctcctaatgtcatctttcttagatctgtatcaagttcattgttcatatcttcttcaacatgacagcttaaaccctgctctcctgaatcagtaacctcatcattttcaaagctcttcaacggcttctgatccgctttcttgttcttccctttgttctttctggctcgatttagaaccatgtccaattccaaataagaatctccaacaatatcaatcttcttgcttcttgtagccctagtaatcctcttctcctttaaagtctctaccttctctacattaaccactcccaaacaagcttttcctacactttcttcaatcttcttgctcctcgtagccttactgctcactctcttcttcaatcccctccctaaattttcctccaccattgcacaatcctccatttcaaccttaattaagtttacagatgaactctgaatactttcaacattcctaaagcttccatttttctccaccagatcctcttgtaatccatcagtaatccctaatttctccgaatcctcgattttcctaactttcctaaccctagaactcggcttgttctcaaatttcacatccaaacccttttcttcctcagtgatatcccccaaattgatactttctaaaaccctaattcgcttcctcgcattagcctgacgcctattgttcctcgtaagcttcttctcctgaaaatcatcaatcacaaaattcaccaaaatagatgtatactcacctagtttgataacatcgccatctccgagatttaccgacgtctctggatcaagagcattcgaattcaataaagtaccgttggaagatccaagatcttgtattacccaattcccagaatccgattcgatccgaagatgcttagtggagattccagcgtctttaattgcgatttcattaccacgaacgattcgaccaacacgaatcgtagatccaggcttgtaatctagagcatcgccttctcttggacccttgacgaatactaatctcaacgatggcgtaaccattgttaccgtttctctcccaaatgcgaattttgaaattttgatttgtctgacgctccaattattaatgggccttaaatgggcttttatcgtttcgacgataaaacaatttcaaggctaaaagctactattggctaaacaactggcattattgattacccaaacttccagcaacacacgtgaatctctcagcaaacttatctctcccttatccactttttttccaacctttttcccctcacgctcctttaccctcgcgtgtatctcacctcatcatttggatatccactgttaaaattcccttttatattcgaaatcaaccaaatttaaccttactcctataaattaattaggctcttatctacaattgttgcaaatcaacaaaacgtgcttctaatgctaacacaataattgatttttgagtatattcctctacgtagtgaacacgacgcgctaagatctgacgcgtgggatataacttgtcggtcaacgaaagcgccacgtcatcgccactatgcttgtccttatcatttcctttcacccgccaacgtcgtttcaagcacagcaaataatatcagaacacatttttttctttttatgatttaatcaattaaatcaccaaactcaattaaataaaaagaaaaaaattattattatcccttcttcttcttcttcgtcttcgtctttgattctcctgattcatgtcgcttaaatttttagcgatcttcgaatcccattttccttcgggaatctgacattttttctcgggaaatttttttatccaaatcggagtaaagtatcgaatctagagaatccgct

SEQ ID NO: 6437 - DNA, 3000 bp, Unknown
  misc_feature (1)..( 3000): cDNA_ID_1814371_gDNA_ID_1621093_Annot_ID_55565 3000 nt of promoter + ATG
gctattatgtcttctctcctccgattcacaggttgcgatcttgacgactccttgttcttccaactctcacgtctccttctactccttcggccattcctctgttgattctgttgtttccgctttcctcaaggatcagggtcttgttcgtaaagagaatctagggttagagttatggtggaagacgagagtcttgctaaatcggaggattcggaggagttgagaaaagcgattgagtcgatgtctacgatgttgagagatctgaaggaattggaatctgtgaataattatcgaagagatcatcaagaggacgtcaagattaacaacgacatcaagattaagaatcttgtttcacacgaaaccctaaatcttcagttaagttctgcaacttttggcgttcctgatgatgatcgtctcaaagaagaaacggagatggttgtattcgatgatcagatcttggcgatttttgagagtaacgacaaacctacaggaaacttggaagatcaagagatagatcttgatcaattcctagattttgatcaactcatagatttcgagggtttgatcgatggcgattactagagcactcaagagtatccagagcctgctgagactcgtcttttgatgaattcgaagatggaagatgtctcgatggtgatgaaaaatccaaatctgtggtctgattcacagaggtttagatgaaagatgatccttttcaatgagttaccacaccattgatgcagtttgaagatagctcagcaactaattttcttatatgcttttgtatgtattagtattatatcaatatgtaactctgtcggtattgaccaattgaaattaatagaatgtaattggttctgtcaactttgtttacaaatatttcttgtcgatccagtttaacacgaaacaaccccaacgaatctgaggttaacctaaaagcaaaaaagtatctaaagacttttaacttttggtgccttgtttgggttacatgtatggctcatctgaccctgtaagagagatgggaccaaatgaaccattgccttccaaagttgcaagaacataatagtcgtttcttctcttgtgtggtctctctttaaaccgcacagccaacacctgaaaccgcacaacaactccaacagcaatctttgagaggtcgtctttctgaaaatgcggtttctcgtcctccgacaatggtgagtggacataatgataatgtggcattttcaagagtgagaggtatgcgtatctgagtggtcctgacctgataaaagctccgttccacaacactttttttacagtcccttgcaagatatctcctcttgcaggcaagaatgtgcggcatgtgaaggacaccgggaatgtgaggatttttgcttgatgattgttttcgttgtcgatgttgttgttcttgttgttaccgatgctttttagagcggtgatgccgagatagaatccgtgttccctgcacgctttctcgtgtattagatcttggagtagtctgcatagaatcggttggtgcggcgattggccattcaagtgtttggcacatatagccacgtctcgagccatttctacttctgaaaacattcgtgtttatctgttacctgaaaaaaacacaggagattctaagttgaaggatgaatcataaaatccgcaaccagaaatgataaccatcaagccttaataaagattataaagcagtataaacgcaggtcataggtcatagagaaaacataacgtttaaagcaacgaagcagatataaaatgttttgacggctaaatagattgaagttatatagcattgaaccttatatggtacctgcataagaagaacttagttactgatcagcccactcaattctacatcagagaaaaggaatcaaccaagagacaaaattaagagcaaagtactcaaaactgaaactgctaattttacatcaaacaaacaaaaaaggtactgaaactgcagtaacaagactagaggtcaataatttctgagaaaatcacacaacctgaagtgatctcaacaagatacaagaagatatatgttgcacttctcaaagaaaatcacattaagcttccagagatatgggcattgatccacgattcagacaagaactagctacataaacatatgtaactgtctcagacaagaactagcaacataaacatatgtaactgtctgatctccaaaaacttaaaagaaatatctttttgattagacaaacgaccatttgaaaaatcactaaaccagtaaatgaaacacacacttatgttattactccgccattagaacctcatttacagtgaaacccaacatcgtaaaaatcaaaagtcttaatttttttccctctactttttcaaaaacatgataaacccaaaatcaaaatcgaaacccttaatcaccaaaattctcaaccgttccacgataaaattagacatcagttaattatcgaggtccctgcaagttctaattttacaccgagaagtaaaaaaaaaaggaacttgtaacgaaatcttcaacaacaaaacaaaatgagaatttttgcaaaattttagtagaaagcgaaaaatctaaccttgagaagaaaattcgatatctcatagagcccgaagaatcgtacgggcaaagagaggctcacgcaaaagatatctattttctactctctcttcccttctctgcataagtaactgcttttgactgacaaaatttggatcccgtcacaaggcgtgtgttattgaaatcgttttatttctgacaagatgcgcactataagtgcattttagcgataataagttatgtttctctataatacgctctttgtggtggtcctagttacgataaaccacgtatccaaacaaccctctaatcatctcgaacatcttattctttcccccgccatggataacagagtcaggagcttcgtttgcgtagctgaaggaatcaaaggtcaaatttttttgttgagagtacccaattgagagtattttctgtcggaaatg

SEQ ID NO: 6438 - DNA, 3000 bp, Unknown
  misc_feature (1)..( 3000): cDNA_ID_1814358_gDNA_ID_1621093_Annot_ID_55569 3000 nt of promoter + ATG
taaatacgatatgcctctccactaccactagaacgagtaaatgagtttatggctaaaagtcaagcggaactgcgggagcctaccatctataatgcataatgaaaaatagatccacgtagtcaaacaatatccactctttacatctaccaaaaatcaatagtatccacaaactatagaagttcaccatatttacgcttcatgttgtagaacttgaaatagataagattcaaaaccctaatcatatgtgcatgaagataattgatcgtacgcattaattaaccagttaagaagaaaacaaaaggatttgatgagaaaattaattcgagggacaagtgcatatgttgttgcatctaatgaaaggtgtttatgcagagaagaatttgtggttgggaagatggacaacgaataagatgatgagtatgaaagatgctgcgagataggaaaaggtattttcattttatgaatatgtattatattggtttagaaacgttattgaaaatctaaaagagaacaataattaaaaagataaaaatgaatgagaatttgaatggtgggagtcatagaaacaatgggttattgggggagtgagggatgttgacaaggcaaaaacatagcctttgagggtttggtatgtttattgcttccccaattggatgtgacttgtctcactatcttcaccggattcaattgaatagtactttgactagggaagatgtgttttcttgtggatataggtcggagatcgagttacccatcaataaatatctactgttcgtgtttttcagtcatattctatgcattaaatgttaataaaatccgatctttcaaggatttcaaaaattagtattgtttgggttattagattgttcttgctatcaagaaaaccaaaaaaaggaacaagcaatgtgtctttgttcgacagtgcaccaccaatctgaaaataattagactacttcttgggcaaaacatttatttaatttttctatgctcctagaaagtagaaacggcaaattacgtagataagtagaaacaagtttaccagaaatctccaatgtagtgcaagtagaattattcgttgggctctcggaactcggaagctaatgctaaaatagtccatcatgaatgtagtgcatctgttttactaatggtttgtgctaattaatgttgtttatatatgataggcttccgcataagtgatgttgctttttattttatttttattactaaaaagtttaggcctaggaacatacgtcctctcaaactagagcattttatatggtttctttccaaatgtcattacaactggtgatttctaggttttgtcttatagtctttaacaattgagctattaacactcagtaagtaatgttattgacataaaagaaatgtttatttgtaatatgatcaaatttaacgatatattatcaaccaaatagttttataataattatttgaatactaataaaaataaatataaatgactgtatatgtcgataatattaaatttacatgatcttgatttactaatactcagttagattgtaacttttaatattttcatcagatttgaatatcaacttttgctggatattttaactttttaagtaaagtattcattatggtgttattaattaaaaggattatgtatcattggaatattttattgtatctaaaataatagtcattttatttccaaagatttccaaaggatattatcccataaccacaaaacaatgggtggtatagtttatatagagatcgcaagtaaaatccatgtgcacttttagcttatttaagttttgaacggctcattatattcttattatttttgatatccaatgattaactaaaatcaatgataagaaatttgattataatacgtctaaacaaagaaaatgtaattgagcatgctaataaatatagtcacaaagccgcactttccgtcgaacaaattatacgttcatgtgtggttatacttgaaccacatgattggaaggttcggaagacaagcttattttaatttgattatgctctttaataatgatttaatggacaactgaacaagcccattttcctaaaattgccccatcatttcccggaatttcaggacaatgttgagagaagatggtccaaattgaagtaaaatatatactaagattgttatcattgattatttgttgtacgtcttaattaggatcaaacttagttggtcataactattttcaccgatgctgacttcgaaagttttaagaaatataattatatgattaaatcatataataatgttgaccaaatacgattcacggaatttttaccgcccaatttctgtatacatgtgatgtgatacgtgaagagttgaccaatggaggcaacgtctaacaaattggtaggcaattaaaaaagtacattaatcatagaagtgatcaataaagacattacttagacatgttgaaagaggtactcatgtttttataatatcatttttatttactcggaatcttaatatattttcatttttatttacttaacatattttgggcaaacgtatgttcgtattttcaaaacctaagagatgtaacaatatcattcaacaatcaacggtcatcactcatcacctatacttttcaggttattgacatgaaagagtgagatttactaaaacaacctaccaacgtttagcagaaggccacgtgttgagaacccacattgcaagaaaatgtagggattccatgcactacagcagatacacaatagacctttgtattttaatagttaaagaattagaaaagtcagacgactaatcacgggtttaaaccgttttttttctaccactatagtatagtactatagtctctttcttcgtcccttatattatcgactctatctccttacctcattcttgttcccctcttatcaaacttcacccccaacaagagttatcgagagagagagaaaacatattctgatttaagacatatatagacagcaagaagagatatg

SEQ ID NO: 6439 - DNA, 3000 bp, Unknown; identical to SEQ ID NO: 6413
  misc_feature (1)..( 3000): cDNA_ID_1814354_gDNA_ID_1621093_Annot_ID_55571 3000 nt of promoter + ATG

SEQ ID NO: 6440 - DNA, 3000 bp, Unknown
  misc_feature (1)..( 3000): cDNA_ID_1814342_gDNA_ID_1621093_Annot_ID_55574 3000 nt of promoter + ATG
tctcagagaaaacgacagataagtaaaacattaaatgtttttctttttcttgacgcccaacatcagctgtgtttttgtatttaggttaaaatgttacatgtatttataggatataaacgataacttaaaacatgtgattttgtgcaaggttttccgaaaattctgtttttatgtttacgaaaaaaaaataaaatctcatatttaaaaagttttctgtttttatcattgtatttacttgatcttgttgacaaaataactattttacttattatttataaaatttaagttaattaatttgtttaagtagtgattaacttactgatatgaatatgattgccactagtatgcttttcttctcaagtcaatatgaaaaatgtgaaattgttagccctaagcatctaacggatactgggaagcatacggttcatgtttgtcactacaacaacaatttttattagtcccttataacatatctcttttactgatcttaagcatcatccatagacaattgcaggatcacaccagttttggatcatctaaattttttttaattttactaaaattcctccagatctaaatttcattaaatcctaagtctaatacattcggtatttgagaaccccgcctttgttttaagatttttaatcataactcataagcgcgtatgaattcggattatccaaaggctaaactacagaaccaaaacgacatagttttttgtcgtttagaatctataagcgcagacaaaagtcaactttagaatcaacccaaaaatagaagtcaaaattaaaaaccaaaaccctaagattttagagtagactctcttcgaatggagaaccactttgttacatcgaaactgatccgtgtctctctacacgaagttgagaaccagctcgaactatcactacgtcaagccttcgagaatctccagccgaaactacgaccaccgttctccttagaactcccagacccacaagagtatcttgagctcaataaagccatcgtctatggagttttatgcgaaccaaattcctctaaaacccacatcaagcacttacatgctctcgtcactgatgggtacgcgtttttcactagtttacttattggaatcgttgttgaattgtatgttaagcttgttgattccgctaagattcagcttatttgggtaactaaggagatgattgatgtttcaagtgtggggattgaggatttggttgtgtcgttgttgcgacgaattggaagtggggattatggtgatcataatgtttggctttgttctgaattagttagtttgtttcttgagaaatgggaatgcttgcttgatgattctccattggtgttgactagtgctctgtatagttttcttcggttattagcggatcattatagggttttaggcgttgtgaaactggagaatgtgaagagattggagatcaaattctgtgttaaaatgtttagagagcagcttcatttaagtttgaagattggacgggaccttatcctgttgttgcaggatctgtctcatgtctctgagttcagagagatatggaacgatttggtgtcgaaccattgctctgagatataccagttgaagacttctagtagatacttccttcttcgaatcactcctgagatggaaacacaattaaggtttttgctaggaaatgttaaattgggaagtcataagcggcatcagatatggttcttgaagaagtttcttttgggtccggagaaagaaacacttttgatagatatagtgagattcgtttgctgtgttattcatccaactaacgaaatcatcagatcagagatcatgccaagatgggctattataggttggcttttggaactgtgtaggcaaaatcatcacatcgagcgaagcgttatgctggctctgttttacgactggctcttctttgacgaaagaatcgataatattatgaatgttgaacctgctgctctcttgatggtatggtcaataccgcagtatccacacatcactcactccttacttgaattcttacttcatcttgtcgaaacttatgacataacccgtcgcgatacgattgtaagaggtttgacgtcagcattcagagaaattgagcgaaaaggagttattcggtcgctggatatattcctagcaaatcctgcacttgcaccagatttgaagaagaagctagcaaatctgttgtcatgtcatcaggagaagacggttcatgtgaatctcaatcaagttagtgttctttctaagcaaacagttctttcttcggaagctaatttaaaagattgcagcaccaaaattgttgatactcctgaccagaagttggacaattccgttgaaaatccagcaaaaaaccataaggttgaactgttcaaagagtttataagaccctcacggtgaacaaaacccttagtctatgttgtgaatcttctataaatcttcagccggaatcgaagctggactctctctactaacgatcaagagactcacactcgagaaaaccatacaatcaaacacttggaacgaagacggagaagaatgacacccacgtgattcagtgattgatcctatgtctcggcgagaacagagactagcaatccactatctcaagtttacaagatcatcaagagttctaccagaggttcacgactaagtgttctcactccaaagataatagaatgaacacagcttagagatgatctttctctattatagttgtaacaaactctcgataaaccaatataatctttaaccattaccggttcaattaaatttttggttaaaagaatctttaaccgtcgatagctctccttactgatatgatccaacggttaaataaaacgtcattgtgtttacggatataactagactaaaacgcagcgttttaaattaaacgactagacccattaacccgacattttgacccgtctttgttcttcctcaatttcaattcgcgttcgatttcaaacctcagcagattccgattagattttgcgtcg

SEQ ID NO: 6441 - DNA, 3000 bp, Unknown
  misc_feature (1)..( 3000): cDNA_ID_1814334_gDNA_ID_1621093_Annot_ID_55576 3000 nt of promoter + ATG
gcgaaaagacggtttccgtcttggtttgatgagataaaccctacaagtagagttccttgttgaacaaccaagatctcggtggcacgtgggtgggtgtgaggtgggttctgaccgttgggtgcatagtctatacgaacaagtgagataccaagagtgtttagtcctccaaggttgttaacattgacggttgtcacgttggacccaaccgcgttatttgtatttccaggtctgttgaggctcgagaaaaagaaatcatccgcgaaaactatccttggatccttgcaaaactttccattcacaaacactagacaaggttttgataaaaatagagtattagtaatgcataaatcaacatacaaatatatttaataaattaaaaaatgatcatgtgcttaccgccatctgctggtgtgttgacaccaacacaaaagtcttgaagggggcttggatcggaagcaattactaatggaagtgtcaaagcaaagagagatagagccgcaagaaaagagagactttttatcgtcatatgtatgtatggagacgatttgtagaagacaaaaaggtttttgttagtttcttatttgtggtgtcaatgaagatgtgataaatttatgagacaaagagttcaatttatagatgattttcggtttgaacaagtccatatgtatgtatattccaatgtaattttcattgtctataagtttgaaacggtaaaatgctgttgaaaccgtgttccctcaggtcatattatattgagaattatttaaattattgtattgttaccattgttaagtgtagctttcattatctcgaagtttgaaatggtaaacctttaactaaaccgtgttgcatcaagtcgtattatgtaaggagttatttaaaacattatcttgttaccatgtttacgttagtagtatcttaattaaacacacaaaagatcttcaactgaaaaaggaggcacttgaaatttaaaatgttaagtgtcggcattgatagagttatataagttacttatactgcaagagggtttattcaataatatgattgtttctcaggttttcatgaactatacctgatgattttgagaatatttgattattttatttgcatgagttttagagttgacattgagagtctttgacaaatgtcaaatgtgaatttttggtggttttgggttgcttgattcgttaagcgataaaacatgaccatatcaatatatagatgttaatagactgatcattgaaagagagaggctgttactacttacttgtcacggaagaatatcctagttttgtagagagattaggaaacgcatataagaagatactgtgaaatttaaacgcatatatatatatatatatatatatatatatagttgtatagttatatagcgtaaagtagataatgtgaagtttcattgaaagattttggttttatattaagattacaaacaaaacattatatctttgttttgacagcttaaagaactcaacatcatgtctgatcatgtccctataagatgtgcaaaaacgactatcggattcatatcaaaacaaaatttggattatttcccctcaccactgactatctcatgtacacggacatacagtttgtatattatagctagctcatgtgtttatatttcaccaaagttttttagtttcgacattgtagctcttataactcacttaagttctacaaatatatgtttcgagtactaatgagttttctaatcaatttgtttttgttaattatttcattgaccgattgaaataagacaagtaaccaaagaggccacgacaaagatttcaagatacaaattacaaatacttcccaaatcccaaccaaatccgtaatactggggatccacacaaaacaaaaaaaaaaaacaatacaaatatatgaacggagaaatgtgggcttttatttccatcattatactgccaattgggcttttacattaataactttggccgacaaaaaaaaaaaaaacgaaacaatccaattcccgaatttaccaagacgcgaaactaagtggactgtgcaatctcttttatacatttttaatcgatcgtctaacaacatataaaaagcaaattcaattgcaattcaacaacgaaggagtaaaaagatcaacttccctcctgctacgtggtccactcttattagcacaaacatcactaattttcctgcgaaaaatagctgtgtctatatatttaaacctttttaattacatcaattcaataaaaacagaagaataaataaataattccgaaaatcccgatgatgactgaaagagatatgcccgatcttccacgccacagtagtggagctgtggagaaagaagacaaaactgtaataatgttcattattacaattttcactgacagtttttttccataaaaagaagctaccacaattactactagcagtaaaaataaaagaaatctgaaatataataataacaaccaaaaagtgaaaaaatcaaaccacaccgtcccactaagaggattaaacggtaatttgctctatcacgtaatataaatgacgtggcatcatcgtgtctagtcagcttcttctttaataacctcttcagcttcagctatcacactgcacctataaaatcaaccaatctcgttttaaccccaaaccagaagaagaaacaaaaatcgaaattctcatcaatagcaaaaaaaaaattactcttagattttcctcaaaaaccttaatcaatcgccgggaaaatgaatattccggtgactatttcctccattactgtttctaataacgctgtttccgacaatcgtcgtcatgtttcccgtgaaaatcgtcagcgttaagaaaaccgtcacttatatttttttttcttttcttcttcgtttttgtgaagatgatgatccactgatttgagagtagtagcttgagaggtttttagtagatttcgattttgcgattatttttgtttcctggagagatctcatttttttgccacttccgatg

SEQ ID NO: 6442 - DNA, 3000 bp, Unknown
  misc_feature (1)..( 3000): cDNA_ID_1814321_gDNA_ID_1621093_Annot_ID_55581 3000 nt of promoter + ATG
caaatcaaagcaatgtcacatagctatcatcattgatccagagaatagaaatactttactatcatcacattcttctcaaaggaaagatatgagaaagactctggaaaaaatcaaaactgaaagatcacagagaaaggaaaaggaagtagacagtaatttccaggtttttctctgaaacgaacatctaggttatacaaatcatcatcagtaacctaaagtaattcatccataagataagatcaaagtttctgtttttataagaatctggacacaatgtagacatgcattagcaaaataccaatttcataactctacagtactcaaaacagagattcagaaattagtttcacattacatatctactaaaacgaacactaaacaaaaaaaaaaaaagagcttttcactaaaaagtatttctcacaggcatttaaacaaacactacgcaggcatgtaagtaaacaagtaagagtcctcaaaattctatcaaaagttaccaactttaataaacccacaaaagctttgtatttgcattttacgattaagtactcagaccatcactttttccacattttctcgagcaacccatggaccaagaccttaagactgaaaatagctgagaaattgattgagaaaatcaacagaatactgaacccatgcctttgtttatagattcctaagatatcaaacgaaacgagaatcggcaatagagagtgaaaactggttttggagaatcaacgatgcgagaagcgagagtttgttttgttgtttcaaactctctatcgactgagaagtaacactcggagactttcaattttggtttgtttacatgtcgatgggctgaaaagacccattattactgagactatattattattggcccattagtattcactttttctctattttcttttaaatatattttcagaaactaattaatttttcattttaagattactaatttcatatatttaaaaactttgaaaatttgattctcaaatatttaaaattagattaaactttttaatcatattcgaaaatatactttttcttctctaaattgatagaaaaatacaaattaatatatatttccttttaattatttaatctaattagattaaaaaaatatctccattgaaatctggtcgtctgtcacgtgttgtgattatgttttttttttactcaaacatgcttctcatattaaatagggattaaaatcccggtataatgcgtttgtgattacattaggaatgaggttgtaaaaatgcgacaaagcatcagatggtattctatgtttcgctaagatatccgccgctttgttgtgatctcttcgaacccaagtaaactggcagtcattaaacttgtctctccaaatgcgtgcttccctaatccaattaaaaatattgaaattgtgttgccgaccatgaagcagttccaccactgttttgttatcgccttcaaaacatactcttgtatatcccttaatccaacagctttgcattgcaagaattagtgcctgaaattcgctttccatagctgtgtttacatgtcttcctttagcttgacctgcacctctaaaggtgcctctgtcgtctctaatcacctatcctgcactagccggttgtccgttgataaagctaccatcatagttgcatttgatccagtttgtattcggcttcatccaatgatattcgccttgaaaaccaacgttctgaaattgcggagggttcgtcattcccaaacttctttcatcttgatcatgccattcctttgcatcacttcgagcttgtcgtattacctttcgccatgaaaagttcctttgttgaaaggtgaggttgtttcgtgatatccatagtctccacaagatccaaagaggtaagtgcttaagatgtggcgttcttgtccccgtgttacacttgaggatctctctcaacttttcttcccatggggtccgtgggtcatagagtaacctgtttgatattccagagcctcgccaaacagctttcgcataggtacagttgaaaaataaatgctctgttgtctcttcctccatacaacatcttcgacacctaaagaaacggctaatgtgattatgttaattactcattttaagaaacaaagttttacttaataaccttttcccctttttaataaggttttcccttttttatgtaattttcttattttcattgaagtgtatcctttttaactatatactttaatataaacgttttactttttttgtcaaaaaattgtatttttcatttttatgttagcatagatcaaaatctaattagaagaagttctttacatgtatcaaaatctcatcaattgattaacacatgtcataaaaaaagagaaagatggaaggtcatgatttcttctaatctcttttttactgtttctttacataagattcttatctttgaatttactaagtgttttgtatttggcaaaaaaaaaaactaactaactcaaaataagaatttacattgaaaaaaaataagaattaacattttttcaataaatattttacaaatctccgctagtttcttagtttcaacaataaataataaatatagatgaaatttgattgttttaaagaattaaatttatttcctataatttatcacaacttagttatttggatttagggtttctagtttttcagaaatcagaaatcaaaattcataaattttcgacggttaaggtaatttgattcacatttcagctttactaatgtgtaatttcaaattagtaattaaattttcttgatgtcgacataccaaaaaaaaagaagtagataagtcaaattatataagaagggaaacatatatattacattaactaaatcagagaaagtattttctttcccaaatcctaaaaggtttttcttgaatctatcttttaaaagaatctagatcatattcgtttatctgccctgtttctctgatattatatatattggatttatgatttcttctcacagggttaagagaaaag

SEQ ID NO: 6443 - DNA, 3000 bp, Unknown; identical to SEQ ID NO: 6412
  misc_feature (1)..( 3000): cDNA_ID_1808894_gDNA_ID_1621093_Annot_ID_55582 3000 nt of promoter + ATG

SEQ ID NO: 6444 - DNA, 3000 bp, Unknown; identical to SEQ ID NO: 6411
  misc_feature (1)..( 3000): cDNA_ID_3593510_gDNA_ID_1621093_Annot_ID_55583 3000 nt of

SEQ ID NO: 6445 - DNA, 3000 bp, Unknown
  misc_feature (1)..( 3000): cDNA_ID_1814309_gDNA_ID_1621093_Annot_ID_55585 3000 nt of promoter + ATG
tttctcagcttactcgcgaagattgccgcaaattcctcaaagagaaaggtttcttcttcttcctttctccatttttttccggtcttattgtcttcgacggtaggatcttcctcacggattttgctgagaagaatcgtacatagtcaattttttgaaattctctattcttcttctctccgagctttttttttcgctctctggagaatggcggctgacacgtgtcgaaacaggaatgcgcaggccttcgtggaataaatctcaggcgatccagcaagttttatctcttaaagctctctatgaacctggagatgattccggcgccggaatcctccgcaagatccttgtttctcagccgccaaatccgcctcgcgtgagtgttgttcttcgattttgtttcgatttacagagaaaaatctaagttctgaagtagtagagaatcgtttacttggttggtgctgatttagggaaaattgttgttctgtgtgtactgctgttttgttcacaggttacaacaacgttgattgagccaaggaacgagctcgaagcttgtggaaggattcctttacaggaagatgatggtgcgtgccatagaagggattctccaagatcagctgagttttctggtagttctggtcagtttgttgcggataaagatagccacaagactgtttctgtttcccccaggtttacattttcttctatagcgttttgactttgtgtggtatctttcttctgctttcatgcctcaagaagagaactgatgcattgtgacattctgtttgtgatcttagaataagtacttggtttgatatcagtgtcttagacattgaaaagtttctatatgaatcatggttttgatggtggattggtcacacagaatttaggttaaaagagtcagatagatcttcttggttctgtgttactctttactcttctgttttgaggattggtatgatgtgatgtgattattgctagtgaacgataaatcagttacttagtccattagtctatatgatttgtgaattctgcaattactaacaagagttttaggggtagttcatgtacaaagtcttattgatattaggtgcatgttgttttataaacaaattactactccaatgttatttaattaagttgtttaaacacgcttttttgtaatgttgcatcagaagcccagctgaaacaaatgcggtggttgggcaaatgacgatattttatagtggcaaagtgaatgtatatgatggagtaccacctgaaaaggtaaatgaatcacataattctgtccagcctgaaaatataaattttgatggtatggttttgatcattcatcttgtgtattgatttgcaggcccggtctatcatgcattttgcagccaatccaattgatttgcctgaaaatggtatttttgcttctagtagaatgatttcgaaacccatgagtaaaggtaagcatttgctaaagtgtctgatctgcttttcagttgaaagattgatgattcagacttgaaatgagttttttttttaatgtataatctaacttgaaaaaatgactagagctgctgcatctcaagatgagtctttctttctttcttatgtcaaacacggcctttcattttgtccaattttgaaaggaggcattgttaaattaccaaagaagcatgtctaaatgctgtaattgctgctacctctactagcttatgtgtctacagatgcctcgtgcccctttttttgaaattgtgatttgattttttcagagaagatggtggagcttccccaatatggacttgaaaaggcacctgcttctcgtgattctggtacaaacagtactcattttaccttaaagatatgaaatcctattattcaatgatgctttaaaacacctgagagcgaaatttggtccacctcttcacctctacatgctacgctaaactacttgcttgttctgcatgatatacgaccatgaaattctgttaatttaactattgttctttttgttggtcttttctgaagatgttgagggtcaggcgaacagaaaagtatcgttgcaaagatatcttgaaaagcggaaagacaggtagttgttgctattatgctgtgtgcttgcttattccaaatcgatgaatactgatacctttctttctgagcagaagattttctaagaccaagaaggctccaggagttgcgtcctctagcttggagatgtttctgaatcgtcagccacggatgaacgctgcatattcacaaaaccttagtggcacagggcattgcgagtcacctgaaaatcaaacaaaaagtcccaatatctcagttgatctaaacagtgatctaaacagcgaaggtatgaacaagcatttgtcaaatggttccaatgatctcccttaaaactctcattcgcttttttatagataattaacaaggtgccaaaagaactggagatggtactacgggtcaaaaggcgggaagaacaatttcatgttcttataacatgttagccatgtacaaaaagaaagaaagcaaacaatgaatgttctcgttcattgtggaagaaacatgggttaaagatttgagctggatcagtgcgggtcttgtatggttttgttttttttacgggttgcgtccatcttttttggtctgtagttttgagtaggttagagagacgcgagagagagagagaggatgtggcggtttgtattatgtaaatgcttgtcttataatgagagagaccttattgatgataccaatctttgaggtccaagtaacacaacttctttgtgattgatatgtatgagataattaatttgtctattttcatggcatgatgtatgtgatatgtctgagatttgcaacattcttctataaagttgagaaataagggtagtttagtctttttaaccaaagatttttatttatttgatcttttccctgttttaaaaagaagaatcgagtaatcgggtggttttgaagacgaagaaggactaagacatcacgaggaacacgatg

SEQ ID NO: 6446 - DNA, 3000 bp, Unknown; identical to SEQ ID NO: 6409
  misc_feature (1)..( 3000): cDNA_ID_1814306_gDNA_ID_1621093_Annot_ID_55586 3000 nt of promoter + ATG

SEQ ID NO: 6447 - DNA, 3000 bp, Unknown
  misc_feature (1)..( 3000): cDNA_ID_1814548_gDNA_ID_1621094_Annot_ID_55588 3000 nt of promoter + ATG
taaaatcggggattggactgtgggcatataaaataggtaggaatagtgtcaaactttaatgatgaagataaagattattgtggagtcccaacacatccacccatccgcataaccacaaataaaattaatttctctctatcattctcttatgcccaatgggtctcttgtatttaatgtcacatctattaaattcatatcaaacgtttctatatatgtgtcacggagatatcattgcggattgtgtatatacatattattctagactattagaaaacattaccttttttctttctgttataaataatgtttcttttgaaattctgattagataagctgattgtgaattttttgttgataatgtgaaaatacttaaacagaaaaaggaagggaaagcacttgtaaaatggacaatggtagtgtcattaagagggaccatgagaaatcatgaagttcagctacatttcccatggattcctcggaaccactttttctaatctctccaaagatttaattaataaggtttaggagagagatagagagtcattagtgttgaaactaatcaaaacaaaatctaaaaatatcttcattaagaaatatgcaatgaatggatgtatgatgatatatctgaatataaactataatatctgagacaaagaaaaaagaatagtagtactaaacaaagtagttgaaatcagaaaacataataaccacaattccaaacgcatgaaatgagaatagtcctgctactaactgctgagtggtgtgtctgttacatatcaagattggggaccatattctcctgaggcgatcattcatttgaaacagttttacattgctcattatttacgaaatcaaatttttgtatttctaagaatcctatgtatttcagaaaaatattcttattatgatatcaagatgtgttttattgatttttttaatattcagaaagtttcacatctaaaacaaaacatacaaaaaggatatagaagtttcacgtcgaaaatcaaatataattctcggaatctgtataacattgagtgtcattaatgtattaacaatggtggagatccttatactataaaagaactcaatctctaaccttttttttttttttttttgtgcaaactcaatctctaacctaaacccacaaaaataaaggaatcttcttcaccaacttataatccaaaattgtaccacatatactgttaaacatcaccacgtataattcacaatatctcagttacagcagcactgtttggaaaagctatttgttttttgcgattgtttcaaaataaactatgtaaagtgatcatatttagacagggaagcgaagatgcatttgacaagactattgtgaaactgaatgtacggaagcatacagtatttgtgcatgcaagtagagaagaaagaagatcacatttttgagattctaatctaacgtacaaattagttgcagtgcagtgtagtttagttccagtccaacacgtacgacgtacttcttttgctttacaaatgtttttttttttacttgtaatttactcaattagaagaacttcaagtctaacttagtttactcttagttttttttttgtaatttttcaacagctgtttgattgtttctatttgggtaattaaaatacgtatttttaattttcaatatacgagtttctttatcggctacaactacataatatacgatgttttgaccgtattgtttttggggtcaaaccattttgttcctatttaaaagaactataaagagtgacgaaccctggaaacaaaatcaaagtcatagaaaaatatcaatccatcgaatattaaatatacttcaagtagttagttgatagatgaagatcgaccgacgagaggctttatcttccatgcttttcgtaggtttactcatgaaagatacgagatggtgagaggtctctcttctcatttatgtcctctatactaacaaaaaaaaactcaaaaacacttatcgaattcaattaaatttttagcatatctattaataagtctctttcatttgtccccatatatttcgggtaattaatttattatctatgaatcatcgttgtcattgcaacgcatgccaattattttttttctatcattcgattataaactcgaacagtatagaactgtcctccattcgatttcaagaaacatcaacagttcttcaaatgaaacgtggcaaaaatattagaacaatgcagaaatggtctgtaagtagattttgtttgccttcatttcttcttccattaataaattgttgagctgctctacgagtaattagttccaaactctatttcaactttttattttatccaaaagatgagtgagattctatatatttaccacgtaagcaacttttttgttgatgtgagattaacatttcacaaaaaaccatatttttattgattattttctacttatatcctgtattccaaaaagaatacaacaagttgccaaaaaagaacaacgttaaactttacaacataaaattttgtcttttaagtaaagatattttctttaatataactaaatcgttcaaataataaatcttgaaatgttctccaattccttctggaatatcaattcacacaaaaaagtgaattgtgtattttttttttttttaattactcgtttaacctaaaaaaatattgatggccaatttcagaaaatatccgtatatttggaaaatttacaaaaataaaaaaaaagcttcatttttaattattttttcacaaaattttagcttatttttcatttagagagagagaaagagagtagtagggaaaaagcaagaaaaaacggaagagctgaaaaagcagagagagtgatgaaaagaacagcttcgttgtcacttgtcattctataaatcgcatccccattgacaacctttcacttccatcaaaactctctctctatatctctctctctatatatctctctctatatctctctctctcttcactctctctttctttcaaaatg

SEQ ID NO: 6448 - DNA, 3000 bp, Unknown
  misc_feature (1)..( 3000): cDNA_ID_1814544_gDNA_ID_1621094_Annot_ID_55589 3000 nt of promoter + ATG
aagagttaaattgaagtaagaaaaaaaagtcatgaccaataatgcactaattactaaagcacaagaagaagaaaaatcatcaaaatcatcttttatagaaaaacaaagaacttttattgttttcgaccaattaaacggtgcgagtgaaatatcattatttgattagtccattgtcgtattctctagcaactccacctctagtttacttcctcaagaaagagtcatatcatacgttaagtctatatcggcaaatcttgaccaaaagaatatatcaaatagaataaaatatattgagatcgaaaggaatagactcttattccaaagattagaaatcagaatgaaaatggatcggcaaacggcgccgtatttgttgccggccgccgggaataaacaagaaaagtaatggcaacaaacatcaaagtaatggtttggatagatcgatgaaaccataattgaggacgctagtcaacgtattgtagtaacatgccatgtgattgccagcttcatgcacagacaccgacatgtattatcatgctactattcatatattaatatcaatatattagtcttatgtaggaattttttagttaactattaatgcacgataattaaggagtgatgatgacaaatcctcatgcatatatagttggaacaaagttccaattcatgcactaaccactagttaatcgtcaatgacagagcgagaggcagcaataatcttctctgatgattggcttccagattcaacaacttaattatatcaatgttttttttgggtgcaatttgatttatatatatactagttatttagcatctcaagacattcttatcatatttaagttgataacttgatattgtaatcagaatcatcaaatattgacattgtacgatgcatgcatttcattagatccacactgtctgatccgcttcttccatttggagtttttgtatactaatccctgatactaatataactatttaattcattttttgtttgtttaagatatcattttttacgagatttgagtgagacattgcattggttgaactaattcaccacaaaaacctaattcattacatacggaccatttctgattgttttaaacttaatttcaactaactcttatttattgtggtacctaaatttcctatataataataagcacatttaagaaaatttgtcgatctcaagtttcaacaactgtctattaaacccaaattgtctagaagcagcatccatcttctcaagctaaacaattgaatttagacctatcatatatgcatcatatctaattatcatttatggatctatgggaaacaaataagcaagaaatattgtggtatagggtctaattactatcaaaacgtgtcctacattttgagggggtcctccgaccaagaaaataaatactttggaattaatctttaatgctgtgaagacataaaagataagtataccaattttattagcaagcgtcacttactgaaaaacaatccctataagatttctatttctgcacaaaagaagaaaaaacatgaaaggttatatagtacttatatatccatcgaatttatacgcccacaaatgactaatgcctgattcacatgcaggcaattcaaaactagctcaattttcttctgttaaccagctctgattactcattttatctaatagtgttggattatatatagggataaaatgtgatgtatagatatctcttgaatagtctcattcgactgaccacaaactaaactactaacatcattttctcatacatttcagcgtgggccaataaagccaacgtgtttttattattccaaatgttgacataagatataatctattatatggtaatggtaatatgtgtctcattctcatgctaaaatccatgaacgcagaacgtctctcatcataaaatactagaagttaatgataaattatgtcacacggattctgcatgttcttatacccttttttcacatggctcacccatcacaaatctcactatctaatgacttattcacccctttctaagtccatgtccaagtccaaaactctaggtgtctatttcttttggatgagcagtgatgtatcaatatctcattatgttacgtagctatcttagctaggttcatcacatacgccgtcctacatatattaagtgttgaatagaaagttaattccatctatctcaattatcaaccaacgtaactatcgtatttagatatcaatcacacacacacacacacacacacaaaagtttatgtgattaattaggagtaggattcggagctacatttaaatgcaagttcaaactctacaatatcgataacaatattaactcaattgtttaattagtctacttatcttttattgagtaaactcgaaggatatgtatgagttgcataagagggtattctagtactttgtgatatccaacgaataaggcaaggaatctaatctgagctaatcataattattgagattgtgtgtagttggccttcgagtggataaatcgtggctatggagcttccgttctgcttcttcttctcccaaattattaagtcatcctccaaatcatatttcactaaacttgcaaaaaatataaaaaagtatatatcttcataattaatgaatggtaattaacctactaaattttcattgatttatgtataatggttatgtgtttttatattacatatatagtttactagagtttaaacattccaacataattccactaaaactcaaccaaaaagggggtacaaaaaaagagaaaaaaaaaattaaatgttattgagtgatgggtagttaaagaacttatggtgttaggctgtccaaaaagagaagcagttaaagagtttggagtacaatgtcttaaacaagaaaatgtctgtcccattataacatctcgaaaccaaacacacacacacacacatataacaatctcttcttctctgacattacacaatggtggtttgagtttacagaagataata

SEQ ID NO: 6449 - DNA, 3000 bp, Unknown
  misc_feature (1)..( 3000): cDNA_ID_2041095_gDNA_ID_1621094_Annot_ID_55590 3000 nt of promoter + ATG
cctacactttatcttacatatacgtccaaattggctacatttgtccatgaatataataaaatacacaaacacaaatcttctgagaaacatgtattgcttggtaattaccattatattatcacacgatggaatcaaattttacaaagaaaaaaaatcttttatcatttttggcttttgatgaggactttacagattaattgagtttctattgttagcttcattagtgaccaaaacaagacaggttataaacttgttctcacatataactctttttgtgacatcccacctttttttatgtctcttctactcacatttttttctgtggagatcttgatgacccctcttcttgatcattatccattttttagatcttgaacgtacacttattgatgtttgttggtggaaatgtggcttgcgtgcaaaacaaaaagaaaaatatttgaacatcttgcggtttttgagactctaagattgtaatttgacaagcactttatcctcactaatacatgtaatcaaatgatataacaatttgaattataactttttatacatttaactgtgtttgtaggcatttgttttagtttaaatatctttttaaactatctattttcaatattgatatttcaattttgacgatttttgtaattaaaaaaaaattgttatttaaataggcgactttacattggaggcaatatctcttactaaattttgtgattaaaatttgttttttttttttaaaatgcagtcatcttccggaaaagatcaatcgtcctcttgaaacccctaattttctattgctgaaatctttaataatttcactaaacatcattaatatcgatgatcacatcttatccagggccaaaacaatatctatctcaccgatcctcccgttaatagttcatttgtcaacggctataatcgttcagacatagtattgaatatcagtgagatctttcactttgcaacaattttttttattagttaagaagagacattaaacaatatttgcttactcctttgttaatacatatgattaattaagaacacaaaaagctaatatgcatgattacacgggcaataatgttgttcaacatgtccctttttataaagtgagaagtgtaaatatttattttcttgaaaaagtagttacaggtgataagtttgtatatagaacaacaattgaatacatgcatgcctaacatttcttaaaacataacatgcccaacttattgctaacttcagactaataaatgagatggtgtgatacacacactatatataatatatgagagaagcttaaactactaaatacatgtaaaatgctaaaataatgttttctttatacagttgatcattttagactaaaaaatcagattacataatctaaaataaatcattgtcgaaattaaattaaacaaagatatctaagacattattcattattgaaattactgtatttaatgtggacacatttgtcgtatgttgaaatttttgatatgtcacatttgtgcctctctgcatatcaaagtctttcatatttaaatcctatcatattgccgacacttaaaatccttttttttttctttcactaaaccatattcctataaagatacaaaaatttccttaaatttcgttaaacaggtaatttttctactatttaattacaaaatgacaccaagataaaaaagagtccaaaagatatagacaaaaaaaaggtaagaaaatttatttttacaaaaaaaaggtaagaaaaattattaaaaatcgaatatttactatatgcgccaatcatactaattattctcttgtcacgcagtgtagacgaaggagagagagaagagaatgttgtgtgtctctgtggttctcctccattgatgtctgaaactgaagagtcaagtgattgaatttgtgttcttgttttttaccctttgtatatatttctttttgggtaagtaagtgcttttgatcctttagaaattctctgagataaatcgttttcgcttgatgtttcagttttcaatcgaaagttgtcatctttgtgtcgctgttgcttgcattcatcacaagtttttctcctgaatttcgataaagttacttcctttggcaattttgttgctacccattttcatatttctggttaatttcatctacaagtaagatttgtttagctttgtttgtgtatataagtttgattagttttgttcccaaagtttgacgaagaattgttatttgctgtctctattattggtggttgatgaagtgtctgtctctctatgatacattttcctgaagtctgcagttttcagtttgtaccaactcaattcttatgaaacataaagactagcttttcccttttctccctcttcttgattgtgttttgttatacattaaaaagcttactcatgtttgtatctttgtctatgccttgtttgaagatagttttgtgtgttatctctctgaagattgctgttttttttttcttgttcaggacgatccagtgtttatcattcttaaggacaccaaattgatatttagcattaagtacaaatccacagtgcaaaggtttgtttgcattgggaaagcaatttaaatctaatgtaacttccttcgttgtttagcttgattataaggtcattttgtttcagttttgtagaattcttagtttctagcatactagtagaggatcaaaggaatcaagtagtttactttggcgtagaacccgttcgttgagcttcttgcagcagctgttatggccagtctgtcgcagtcagaatctgggaggttgtactcgtggtggtgggatagtcacattcctaaaaactcaaaatggattcaggataaccttgcaggtattctataatctttcttgacttctccttggtgttttttatgagtcttgaaaattgtggcattataatgcttttgatttgtatgtttaaagatattttgtttcttttggaagtcaatttaaaggaaatatttgtttgtgttgaaacagac

SEQ ID NO: 6450 - DNA, 3000 bp, Unknown
  misc_feature (1)..( 3000): cDNA_ID_1814533_gDNA_ID_1621094_Annot_ID_55592 3000 nt of promoter + ATG
atgttttgatgaaacatatatcgggtacttcatgcttcatgcttgagcgtttgaatgcatgaaagctagactcgttcggcctaagtgcgggactagccgatcttggatttttttaaaaaaataattaataacaagtttatatgaattatattgcatattatgattttttctaagtgtcttttgattgcgagatgtctacgtatcgttttgtgattcacaatcctaactcaatcaagatttctgtgtcgattttttacgcatgtatgaattagataagtttgtagttgacaattattttttgaaaaacggtattttctcgtaataatttttttgtccattcctcttagattgatgtgaataattgtaatatatatttttgggctgaccttggactttgcaagtctctcgtcttttctctttaagtacaaaaaagttggtatgcaattcttttgacttatgtactcacgaatcaaggtgaatttcaactttttcattttttcatatcaatatattgatttcaatataacaaagtggagccacgccgatatatataatattaagacttgtttttctttatcaccaatgtccggctccttgaagagataaacaaaccatgttataaaaagaggatgtctatttgagctttttagatgataatatatgttttctaatagctagtgttcgaaggtgagaatgttatgtttatatatatcacatcatccccgatttctactttggatcttaaagaaataataccgttcactcataaccggataagtggaagctgttattcactagatatggtatattggtattactattaaccttttgaagtcaagtggagatttaactgcaataaattttggtcataccagatacaatgctagataataaaagcttgacatggttttctaaatgttaatggttttgagagcgcgtacatatgtagattgatgaatggaagcttgacatgctttggtcaaagaaagaactgcaactaataatttgatattggctattatattaaggtgtttagaccaactatactacttataggtttatgaagtcaaatgtttttgacttttcagtaagatatacatgtacatgtcaatcttacgtatagatgtgtattgcgacacaaaacaatatatttaagattgggtttgatcacatcttggaccgggctccttcaaaacaatttatgtttgtttgtattgtattttcaactttttaaaaaaaaaatagttcaaaaaaacttgggaaccccgggaaaacatgtacacacgggttcgtggtaagattttttagaaattacctaaacataatagtttgaatggtttctatatgttaaatgtatttcagtatgaacccaagtgataaggcgcaatggtaagttgggatacattatgtagacacttcagtgtgtacgttggatttctctacgtactaaaatctttagtataaagatatttatttcgtagacttactggtttgtcaaagtcttaagtaccgtttgaaccgatcaagcaggcgactaaatcttctgccttaagtttttatgggtcttagtttgggccatccatgtaaattgggcctcaagatctcagtttgtagtatatgacaagccttaacatttgataacatatgtactcaatttaaaagaaaactattttgtttttgttcaatggctaataatatgtatttcctgccaaattataattttatatgtatgcattatcatacattatatatgcatttaatatttctatattatatagacatatttttcttttttaaaatgttaaaatattacaaaactgaagatataaatgtttaattctgtttagatatatatttcaaacacaatagatatatacattatcaaatagtggatatacactttaatatcctacgcgatatagttggaaaaaatatagaaaacaagaagataaagattaccatagatttaatctcttagatctttagagattaaaacctaattgaaaattcaaacaattagaaggtattgaatttaatattttcaatatctctaagaacaggtctaccaatagcaaaacacataatccaatttttgtttttaattcagttttttggatatgatttagatgggaacgattcaatttatcagatagattaaaaaaataaatgtttttatgatatttacttcctattttaaaaaatccaaaaaccaaagatatgttttgatgatatttctttaagaaatatttgagagaaaaaaacaaataaatacgtatccttaaaagaagcctgaaagaaacagcttctgttccgtctttcactctccatctctcttccgtcgtttcctaagtccttttctcttatttagagattctctcttttcatccaaaaaaaaggagagatatttcagaaacaatcctctgcttctggagataaatctcgctcttttagcctcataatccaaaacccaccattaaaaatcctctctttcgttccctttgaacccatcaatttcagtttgcttattacgtctctgttctctgcatgtccttgtggttgatacagctgacttttggttttgtcgtttatgttaattgaattttaatatttgatcatcgttgtgctatattagtggttaacgagtcgttttcttaaggtttactttttcgtattgtcacgttagattttttaggctacaattgtagagaaattcattatctgaatgtcaaaccatgtgcatgatctttgagaaagtttggtgattaatagtttcttcattattaaagctgcctttgtttaacttagcaatcataagattgtttttgataacttttgtgtgatttaactattcactagtaataatctgaaaaaattagtactagatttcatgatgatgatgaaaagattgatgatttgagtcacaaaatcttgttttttgaaagttgtgtgatcttcttgtttgcatagtgaattagttttgatttgaaaagattttaagta

SEQ ID NO: 6451 - DNA, 3000 bp, Unknown
  misc_feature (1)..( 3000): cDNA_ID_1024003_gDNA_ID_1621094_Annot_ID_55594 3000 nt of promoter + ATG
tcctgccaaagttaatgagccatgatttcagatccattcataaggaccgaaggcgagaataacgaaggaagaaaatatatcttaccaatatctggtacaacccgtgtgtagggtgtgcttgggaatacccagataggaggtcaaatgttggaaatagtccagcacgctgcatgataggagttttgtgtaaacttagacaagcttaagaaggaacagatgtagagaactaatcttaatgccataaatttgcctcaagaataggtgatggagacttgagagaagagtgaagcaacggaagatcctctttgtgcaaacaagttacttcgccaatagggaactttgattgaaacctgccagctctccctacaacaggatcatcagaacattagagaggacataccaatactcttgatgtattatttggtgctttttgttgaaaatttacctgcaatttgtttaatctcagatactgttaggtctctggtctcggaaccatcatatttttgaagggtcgagaagataatccttgaaatattcaaattaagacccatgccaatcgcatcgctggcaacaagcacatcaaagtcattggtctcatcgttaaaccttgttgcctgcagattttaaagcatttggaaacaaaaaaagataattcttagagcatccagttaagcctatagccaagacagtaaggaactcaaacctgtgccgtgcgagtctctggaggcaacgaaccataaaccacagagcaaagatgcttccccgcacgttcaattgttttctacgaaaaggtaccaaaaaaaagagtaaagaatatgtatggaagcattcaatactcatgacgcgtagagaatagagctatgtatgcatataatatgatgccaaaatgttctatttctttcgcagcaaactcaagcagaaaaaagcaaaatacaggaagagagaacaagataagtaactgctaaccttatacgcatatatatcttttcgggaaaaagtgacaagacaatccccagttttaatactggaaactgatgaaacaggaaccttcaaagggactaatggtgaaagcctctcataggtatgaacctgaattcaaaataaaagggatcaagaggtcgtgattacatcaagagtattggtatttaattataaacaagaaataattagagaagaaaaagggactctagctcgaataaacatgatacctcgacatcatctccagttactttcagtatatcttcaacaagaggtacgacagctggatcgccacataaatgtagctcatcagccgcgattccaagtaaagcacgagtaaatgcaaatcccctttgtttacatcccaccatctgaaattagggaaagaaaggatgagaataacaaacaaaaagttcttgtcgatttcttaagccaaagtcgagcaagactagcctgaatttcgtcaatgatggcacaatcgtagacagatgtaacatcagccatttcaactgtcacagctttgtgtgttgccccttccactaagtctttctcttgtcccgtgatcaaatcacatggaacatttgctttgtttaaccgtttagctacctcccatgccaacaatcttaacggaccacaatatacaccttcaagtgaaagaagcaaattttaaacagttcaagaactggcttccaaaaggtttattagtcaccttcaaggcatacctgaagaactctgttcaaggtgcttaagggcactatatgtcttcccgctgtttgtcgggccaacatgtagaatgaccttacgcttcttcttccgagctataggataccatgtatgaggacagctagaattcaaagtaatgacagaaatataaatcagttcctctttactaatctctccacaacaacaatggaactgcaaagagaatcgcaattagttgctactggggagctaacaaaaaaattctacaagaagttttactcttacgtgagatcagtgaaatcgaactttgaggtggttccagtgccagtgaaatcaaactttggagatccagagttctttctataattcctagtcaagacacctaatctcaaaaggtcaccaaactcaggttcaaagtgaaaccgccacaaacttcctttatcagctgaaacattaggcaacacgaagccatcataagatacaacgttaaaccaatccaatcttcttctagacactacacagaaacagatgtagaagctgcaaagctcataaaggttcaaactttctgtatccagatgatcaaaatttctgatagttcctttctaagatcacttacaaactacaatccgcaatttctaaccaaaagagaaccagaaaacagagaaaaaaagggtttaaaagctccaaccttgaagaacacgagaaatccccaaagctgaaacctttcgaagccgaacaacagaatacgccatgtttagattgttttatctattgaaatgaagacacaacacttccttatcctttattcaccatgggaaatacaattcgagtatactcacgacgacacctttcatttgctttgaaggaagctcaaagttacagaaatcaaactcttgaaatcgaggacgagataaacaataaagagaaattaaaaccaaattctcttttataattagaaactgaagaaaccatctcagacttccattgttagaccttattcttctcagagggtcggcgactcagcaagaagcgggagagagaagaaaacgagaggttcctttttaatttacaaattaacccctaagcttttcctattactctctcttacaccctcctactttaaaaaatagaaatgtccccataacgttaatatgtctaaaatacccctgactatattctagaactaccaaatcaacccgtcttgttcgccaagtcgctttgatctaaaaagctcttaaactattcttccagcgaccggaagaaacgaataatcggaatcgaaaaattcgaaaaaggaactgagaagaaacagatctgaag

SEQ ID NO: 6452 - DNA, 3000 bp, Unknown
  misc_feature (1)..( 3000): cDNA_ID_1814522_gDNA_ID_1621094_Annot_ID_55596 3000 nt of promoter + ATG
gagagtgaataatgccgggttccataaggatcgcttactcattctcccggagaggcttaagggcaagaatgtacccaaatcttttgcaagcaaaaacactctttcgcgttatctcgaaactagtttccctgatatggatgctaatgcattctttgcatcttttacctggaacattccggctttgtttcagcctgcagaaagaggtagcaactaacactcttctgttgcgtcagccataaaactctatctgcaacacatgaatgatgtttctttttttctgtagttgatgctgcgtctctgtttgaagagacatccaaagaaggacagaatcaagatgaggatgctgaggatgtaaaaaaagaaggatcaacttcgcgttacagccagaggaagagaaaacaggtgcagatacagactaatgaacctaaagcaactccgcgagctagcaacaggaaaaagacagccacaacaacaccagctgctgaacataagtcagctcgggaatcttcctcgaaacgttacacaagacagcaacaaggtgatgtgtttgacttgactgaagaaaacaaggaatcagatgcaaagaaaggcagcaagaggatgaagaaacgcagaggtaactatgcagacgaagaagaagaagaagaggcttttgttccgcatatctatgtttcttctatgaacggtgtcattgcagtctctcaccctcctgtggatataaacccagaagagtttgacagttatctgaactctctagagaatcttcttcagcaacagccttcagaagcaggacaggagtcttcatcatcacttcccgttagtgcaagctctccagtgagagattacgaatggacagaagctcgaatgaagctttcatcgcttctggagaaagatttctcttccttgttcatgtctaatgaagctacggagatggcaagcttggcagctaaactcaagaaagatccaagcctatcagctgaagaaatagtgaggttgaagctaatcgaagaaattccaactttcagcgaagtttttcaagagaaccaaagcatgatagtagaagcagataggttcttctccgctctcgagcttaacaaagcgaaggtcgcatctctcaagtacgaatacagcgacttaaaggacaagctaggcaatatccaaacggaagtcgatagaaactcagagacaatccgtcaaattgacgagcaaatcgctcagcttcaagctaaacgaaccgagcttacccgctgcatcagtaacaaggggaaagagaaggttgatctaatctttggtcagaagatggtagcgaactcaatccctaaagtggttcaagaagttcaagcagctaacttgaagaaacctgaatgggaaatgaagaaagacaatgctcttaaacgtgaatcagagatcctcaataaatttgcccctctcaaaggattttatctctaaaactaaaaccaattgatgttacgttacataaggcaaaacctactctgtatccatattttcataaagaaacaaaaagatcttaactttgataaccattagataaaaaaagtcaagatttttctcatttgatcacaaacacattagattactgtacaagcactatcaaatctctaccattgtcttcaatcttaggcacagtgacaatcaattctccatcgccgtcgcaatccacggtaacgagctcaggcctagttgattccggtagcctgaaacgccacacgtcaagctcaagctcatcaagcgacaaaccaagagacgatgaaccattggttctcacaagaatcttggtcacaccaggatgaatctcaaccatgtaagccctcacacctcctcctcctcccccgtctgtttccgcgacgaacctgaagcagtcatgactctcttcaacagccacgtcagcgtctgacttcaagggcagctctagaacacggctgaagatatgtgggagacgacggagcttctttccgggttctcgggtcggatcacgagcgtgatggatcagattgttgttattttcgtttctgggtaatgggtggattttcatgggtcttttttttttgggtgtgagagtgataagaagcgaatgggtcaaaattaataggagaaaagatgaggaatctaatataaagtgatcacctttttggtgggaatcaaaattgccagaaagctacggctctgtataacgactttgaaatttggatttctgatccaactttgggattagaactaggcaatgattaagtgatgatttaagaaatggataaacaaaatttggttgacgaaaacagtaagctgcgaatggagccaaccaacagactgagagaaaggttttaaactgtacatttttcgtcaaaacatagggaaacccccctcccttccaaaaaaaaacatttacgtaacttttatttatccgtttaatatttacattattaaatatttctaaacaatatctttcctaacttttatgtttcttaaacataatcgttgtatttgcaagaatattgcccttcaatagttacttctacgcacaaaaaccttcgaatataagtattgacgatttattatgaaatttagacttttttatatgatatgtaaacaataaaagtgaattatttataatctttataaaaaaaactacttatgaaatcgtatgatataataaagttagcaatcttgtgacaaaattaatttttttttgtatatgtcaaaatcatcctatactcaatttgataatttaaatatcagtaatatggaatatggatgtagaaattgataaaattcaactgtatcagatattatagaaattctttaaacatttttttgtttggtatcagcaattcaactgtatcagtctatcagatatgatataaactgttttcagtaatacttattcaattattttctttggtatcaatattttttaaaagaatatatcgatttatgtgttacgtgtgatgatgattcttttaaattcaattgtatacgccgatg

SEQ ID NO: 6453 - DNA, 3000 bp, Unknown
  misc_feature (1)..( 3000): cDNA_ID_1814512_gDNA_ID_1621094_Annot_ID_55599 3000 nt of promoter + ATG
cgtgttctagagctgcccttgaagtcagacgctgacgtggctgttgaagagagtcatgactgcttcaggttcgtcgcggaaacagacgggggaggaggaggaggtgtgagggcttacatggttgagattcatcctggtgtgaccaagattcttgtgagaaccaatggttcatcgtctcttggtttgtcgcttgatgagcttgagcttgacgtgtggcgtttcaggctaccggaatcaactaggcctgagctcgttaccgtggattgcgacggcgatggagaattgattgtcactgtgcctaagattgaagacaatggtagagatttgatagtgcttgtacagtaatctaatgtgtttgtgatcaaatgagaaaaatcttgactttttttatctaatggttatcaaagttaagatctttttgtttctttatgaaaatatggatacagagtaggttttgccttatgtaacgtaacatcaattggttttagttttagagataaaatcctttgagaggggcaaatttattgaggatctctgattcacgtttaagagcattgtctttcttcatttcccattcaggtttcttcaagttagctgcttgaacttcttgaaccactttagggattgagttcgctaccatcttctgaccaaagattagatcaaccttctctttccccttgttactgatgcagcgggtaagctcggttcgtttagcttgaagctgagcgatttgctcgtcaatttgacggattgtctctgagtttctatcgacttccgtttggatattgcctagcttgtcctttaagtcgctgtattcgtacttgagagatgcgaccttcgctttgttaagctcgagagcggagaagaacctatctgcttctactatcatgctttggttctcttgaaaaacttcgctgaaagttggaatttcttcgattagcttcaacctcactatttcttcagctgataggcttggatctttcttgagtttagctgccaagcttgccatctccgtagcttcattagacatgaacaaggaagagaaatctttctccagaagcgatgaaagcttcattcgagcttctgtccattcgtaatctctcactggagagcttgcactaacgggaagtgatgatgaagactcctgtcctgcttctgaaggctgttgctgaagaagattctctagagagttcagataactgtcaaactcttctgggtttatatccacaggagggtgagagactgcaatgacaccgttcatagaagaaacatagatatgcggaacaaaagcctcttcttcttcttcttcgtctgcatagttacctctgcgtttcttcatcctcttgctgcctttctttgcatctgattccttgttttcttcagtcaagtcaaacacatcaccttgttgctgtcttgtgtaacgtttcgaggaagattcccgagctgacttatgttcagcagctggtgttgttgtggctgtctttttcctgttgctagctcgcggagttgctttaggttcattagtctgtatctgcacctgttttctcttcctctggctgtaacgcgaagttgatccttctttttttacatcctcagcatcctcatcttgattctgtccttctttggatgtctcttcaaacagagacgcagcatcaactacagaaaaaaagaaacatcattcatgtgttgcagatagagttttatggctgacgcaacagaagagtgttagttgctacctctttctgcaggctgaaacaaagccggaatgttccaggtaaaagatgcaaagaatgcattagcatccatatcagggaaactagtttcgagataacgcgaaagagtgtttttgcttgcaaaagatttgggtacattcttgcccttaagcctctccgggagaatgagtaagcgatccttatggaacccggcattattcactctcctcccaactctccaagtccaaacatcgccggggctcgggaaatcgacaggtgcaaacggcaaaccttgaccactagaagctggcggaatcgccgggagttgattcaaatcagtgaaggagcttctgtcaccattaaccttcacatcatcaccatcaccatcactgttgaatccgttttcccgataatagtcattctcaaccgggactggttcagtctccttgcttctattactcattgacactactgattcaccatcaaatctgtgcagattcataaatgtgattgaatcaaataacataacttaactaattgctttgcagttataatcacatatattcattactctattcccaataacaaaacaaaatcgatcatgactcaaagtttcctagaatcaatgcagagaaacctatacagaagtgtaaacatattgatagttcttaatgaattgaatttacccaggagaattttgacctatctcttgatccatatccatcgaagcagaccaaaaaccctaattcctgcgatagataaacacccaaataaacaaagcaaaggatgaattctaatctataacaatgttaagggaacaaacccacacaaattaaaagttaagttgattagaaatttctccagaatgcagataaagatacgaactttggagagtcaagaacagagtagccgatcttatgcttcaactacaacagattacaaatttatcaaactcattcgtttcttatatatcctcttttcgatcagattagtcctacaaacagaggtggaataacagttatacccttttagtttgtttttgtttacacagatgaagattgaaattacgattataccgttcaatgtttcttcttcaccgacttgaaagctatgacctttccgatcaccggcgttagttatgagcctcctctccgcggacgcacttgggttacttctcaagaatgcaatctccgcgagttccatgcgtttgggtcgcgtcgttcacgcaagaatcgtcaaaaccctcgattcaccaccacctccgtttctcgcgaactatctcatcaac

SEQ ID NO: 6454 - DNA, 3000 bp, Unknown
  misc_feature (1)..( 3000): cDNA_ID_3238302_gDNA_ID_1621094_Annot_ID_55602 3000 nt of promoter + ATG
agagaaagtgagcaatgattttggatgggcttgtgttgtgattctggagagtttgattccagttatggttgatccagtgatggggaagtctcggctacttgtaactcctagcgttaaggagaaagctaaagagattgctgagacgtggaaggctagcttggaagagagaggagggattgagaatgtgaaaacacctgatgttcatacgtttctgcaacatcttgtgacttttgggattgtgaagaaggatgatctagctctttataggaaacttgtggttggttcagcttggcgtaaacagatgccaaagcttgctgtttcagttggtttgggcgaccaaatgcctggtaatctttcttctttacctttgattaccattagatgtttttagctatatattggggaagcacaagttgttgtcttttgtcatgggaatctgtgagtagtatctgaaatggaaaatgatggtttttgggttgttatggcttcacacagatatgattgaagagttgataatcaggggacaacagcttgatgcggttcatttcacttttgaagttggtcttgtacacttgttccctcctgttcctttgctcaaagcttatctgagggatgcaaagaaagctacagctttaatcactgatgattccaacaattctggccgatctgcggtactttcctccatttgtgttactcgttttctttgctggatccatttgcagggatctgtttcttctgcactcgcttaccaatgtatgtgtgtatttttctagcatcttgtggcgcgcaaagagcaatcagcacttagagcagtcttaaaatgcatagaagaatacaaactcgaggaagaattcccacccgagaatctcaagaagaggttggatcagctagagaagaccaaaaccgagaagagaaaaccagccgtgattcccgccaacaagagaacccgagcaagctacagcggtccaatgccaccagccaaagcagggcgtatcacaaacgcttacgtctcctctttcccaccgcctccaccaacattcatcagatcccaaagtcactcacctcaatacggtgtaccagcatacaccacatccccacctaccatctacagcaacaggagccctccataccaatactcacccgaggcggttcatggttcttaccaaacctctccggtcagttatccgacagcatatggtacctactgcagtccggtggctgctccaccccctccagtttaccatcctcacccgcaccaccaccaccatattcagcatgcttactactgattagacaatgacaaaggaaaaaagaagatggtaagtaaccaaccactgatctctggtgtctacgttttgtctctacctcgtttttgttgtaatctctctttttttatatcgtatcatttgtagctaacactctcactctttctggttctgaattagtctacccttgtgtgtttattaatctaaattatacatatctattcactttcctaatgtttcaatcaacgaatttagttcagtacttaatagattcatcttaaaccaggaatgtttcactgtgattatgttatgtatcactgtttgtattggctcattgaaatcaagatttcgaagtctcatagcaagattcgttacaaagtgttcgtattacaccaaaaaaaagacttctttagtctaaatcaagaagatgattagtcgttggcagtggcgagctggagagacaagagttcttcctcagggatcatcttaatgtgacaatcagaagttggatacgaagcacatagaagcgtgtagccacgttcaaccacatcatcacttagcatcccaccactttgatccaccgttccggtcacgagtttcgctggacaagtcatacaaacaccgagattgcagtcgtagggaacgtcaaggccagagtcaagagccttagatagaatcgtctcgtctggttcgacttccaattcagtcgtctttccgtcgtgctctaccaccactttatatgcccgagctatgatccttccggtggtgagaaagttccggcggtttgttgttgttgagagtgttgcgttacggagtgggaaggagaaggaattggagagataaggtttagggagagagattgtagaagtttgagtcgggagaggaagagtcgccatgagagacagagagacggagacaaaagagtttttgtgtcaagtgagagtgatgactgtttgtggtgaatacggagataaggttgatcatcggttgtagatagtggtgggacataaaaaccgaaaaccgacttaaaccgaaattcattaatgcattaaaccgaattaaccaagatctaataaaatgaattttaaaattttaattatattcgtaattaagggaaatattttttccaaaacagtttgaacaaataaattcagtattatttttccatactcaaaactccaaatcggactaactgaaaaaaagaaaccgaatgttcaaaccccagttatggaaaatattaaccggacttaatacggatatgaccaaatcagaccgagaagtagtaattctggtgaccaaccaccgcgtttttctaaattgatagcgtgtgccatgtgactgacaccaaagagatcatatatctcatcattcgaagattttattccatacaaccgattttctccattttcttcaaaacgattcgggtcaaggttattgactttctcattcaggtatcatcttcttcctcgtcccatactttttgattcacttgcttattcctctgccggtttcgattatatttgtttggatcggataattgtatgggcttaagcttatttcgctgttaaatctgttgatttggtgttaagagtgttgtataactggattggtgctcatacatctggagatttatgtttgatgattttgtatgatgtgtttttggtttgaggatgatttattcctttggtcttacttttctctttttgtgaatttaagcagtgaagcttgaatcatg

SEQ ID NO: 6455 - DNA, 3000 bp, Unknown
  misc_feature (1)..( 3000): cDNA_ID_1814506_gDNA_ID_1621094_Annot_ID_55604 3000 nt of promoter + ATG
aaaacctcgcaagtattggagcagcttggtatgataaagatgaagcaacttagtagccgtagtatcttataaactattggatgtccccatgtcggtatatagaacctatcttttggatctttgggctaaatgaatgcggagtacttttgcaatttcttgcccttgtttattgcttgtacaactctatctatgcaactttattgtttgatcaaatgttactaattgtctttacctatgaatctctctcgtatcacgacttctttgtttacaagtcgattaaacaaattaaaccaagcacatctaaaatgtctgaatctaatatacaatagattggtacttggagcgaatcttggaagatgttttggattttgcataaatttattgatgtgtaaagttgattaaccttttgatgaagtattcatctttaaggttggtgatttcattgttttgcagtcgatcaatgtgaatactgtttgaaaaacttatgttttggagaatgagaatcaataagagcatattcctctatcaaatttatcgaaacctaaaacagtcttgatgctttaaccagtctgacatattttacatggagacaatttgataaacccccggaagctgatactagtctagtagtcagcttcgtaaaaaaaaacacatattataacttacaacttacatttgatctgaatgattctcgttgaaaagaattcttgaaatatttatgataatgcttgatatatgctctcagaactttgatagattctggtgatatgtttttagccttttgtgctttttttcccttttcttttacccttctcgcaaagtggtgattgattttgtggccagccaatgatatccccttttgttatctttaagtcacatgccaaagagctattcagagttctatggtgttttctagagtaacgaaagtggtagggaagagtatctcgtgggaatggtttgccttaatatttggttaattggtggctatcttggtcataggctatatatgccttattaggtcattgtttttttttgcgctcaaagtttcatatatttgtgttggtgactctagatttagtcttatggattaacatgaaaatataatcatatatacgaagtaacttttgcctgaagtttcacttttgctaaataatatattgtctcacaacgttcttgctatatatatatcttctcaaatacatggcctgaaatggtataattattgtttcatatttagtagtccaagataaaagacagaagaagtgttatgaattatgaatgtttgcttttatcatatatgagattataaccgtcatcattgacaattaggacatggatatattaattttacacataatgattaaaagctttagattatgcagtgtcttaatcatgttgctatataaggttaggccaagattcatgtcaaatcactgcatactctgcacgactttagatcattatgatcccttgtgaatttgaaccctcctaatctctcttatcccttttaaatatcatgttcccttagcccattcctgtttcaacatgcggggagaaaactaatcacgttaactccaaacaatcaattattgttgtagttgtcatttgtcaactctattatccaaaaagtgaaatatttcgtttcattcgctttgttttatcttgtcacaatctttgtaagtaaggctataattcagtatcctcacatatccgtcgttaaaaacatatattttcccataataggactaaaaaaaaacatatattttccataataggatatcttcaatgttgtggacttgtggtccaatactgtgatatggaacattatcttgtgcttcttttgggttttgttaaatgttaacgtatacgataactagctatatatagaaaatgagattcctacgtcgaaaataaaatacgtacgttactttatgttcttatagttaatgatggttagtgcgtggttaaaatgttcaccttatcaattgagtgctcgaagtttaaatctttctactctgatttaaattatggttggcaattttagatgagatgacaaaaatacttgactcttctacaaaatacgatgaacacaaaaaagaaaaaatttatgatgaaaaataaaagataaaattaaaatattgaattatcttcacctattctttttaaaagaaagttttttaacacttctgtaagattatcaacatgcatgtctttgcgcttcaacgagaagaaaggagaacaaaaaaaatcacgagtattagtctgaatttggttctgaatcttttggtcatatatttgattaaattatgtaatatgtaaaaacacaaataattagtgtaaaaaggttttgtgcttacctaatcatcacgtctacaaacacaaatattgggcccaacactccaacgcatgcctatttcattacaccatctacaagttcttctccacaaatgtactttcattttttttcttggcaacaacattctcttttttttttctttttttcaaaatatacgttttactacaaaattaaaatttcgtaaagtacaattttgcatacatttatgccggcaatgcttcactgtcttctgactcaacgcatgtggtggtcacccaccgattttctcctaccttttcctttttctggttcacttaaaccgatacaaatttcggtttaccacaacttttctaaaaatacgcgttctccgctcacgttagcaacaaccaatcgggagtttggtgctattgctgccgtcataaaagtacgcaggcacacaaggcgcactctagatggctgtcataatcgcgccatagttacagacgccattacacgtgtcattcttctgactaatccacgtcatcctcctcctcttatactattgccatttttaggttttcctgcaaaacaaacaaatcagtccttcttcttcacttttgttaccttcttctctgcaaaatcgactaaagttttgagtttcttcaccgtacgattaaccggagatg

SEQ ID NO: 6456 - DNA, 3000 bp, Unknown; identical to SEQ ID NO: 6408
  misc_feature (1)..( 3000): cDNA_ID_2024882_gDNA_ID_1621094_Annot_ID_170836 3000 nt of promoter + ATG

SEQ ID NO: 6457 - DNA, 3000 bp, Unknown
  misc_feature (1)..( 3000): cDNA_ID_2043733_gDNA_ID_1621094_Annot_ID_55610 3000 nt of promoter + ATG
cagactgatcaagttggtcttcctcaaagcaagcacagcgtttgctcatcgagccagttattgctatctccaaaggtctttgtaccagtcttggcactccaacatcacaccaaacctgcataatagcttatgcttttagtcccatcaagtattcactaatacgttatagttctctcccctataaaccggattgatagaagataacaagagtttctacctctccaccttcatcttgactccatcgtgagttgcaattcgattgcttggcttcttcagtcttctgtttctccatgagttgtgcacctctggaggcttttgcttcagctcctttaaggtgtttagttggattcccttggctatcgtagtaccgcccaacaagcttcccaacaggactgttgatcacaaattaaaagctgagaaccaaaccaagaggaccatataatacaaggattaaggtgagcaatgtattatccatacaccaccttcttagtttaactatgcatcagctttctattgtgtgaattaaacataaaagtaataaattacgtgtaggtcctggagtagaaacctcgccagtcaacaatgctcttcacctgcggacaagaaatctttgtcaagccatatcaaacatgtaactaaacataatcggagttatagaatatcaaacagttaacaaactatatgctacttcaatatcttagaaagtaatagttatgaagaaataagcacatctggcacaatggcaagatcaaagactactttagacgtttctataatttcattgatgagatatatggagctaaaaaaacattacctcactgctagataacccttgtaacgaatctgtaagtccatctcctgtacaagaaaataatcatagcacacaaatgagaagtttccacagatttcagggacttgatgtataatattctccaaatagctacaaagtttggataattctgacttcttcacgcatgactaatattgtttatgaggattcaaagatgtgtaatgggaggaacacagaaaatttcctcataacattagcaagaaaagagaatgaaatctcatttttttcgaggatgtcatgccaatgtccataagtactaacagaagcaaagaccataatatactacaaaattttccacaaatttatctggatcaaacaggcatggtgattaggatgcagcaaacgattcgtacctgtaaagttgccagaaacaaatgcacgagaagcgtctctgagcgaaagaatgacatggaaaaacacttcccatcagctacaaacatgaaagattaacaagaagaagatagaagaacatatgagaatctctccacataatttttaacaaaacaaaccttccagcaaaatggttgtaccctcctccactaccgtaatgaaattttcctttcgtcacatcgaacacagatctgaatactcagttcacaagttgttaacatatgcgtttactttcaaaaacctgacagcagaaggaaggaaaagaactcacccaagaatccctaagagtataggtaatgtttcatcagtaccattatacaatgccaattcttcagcagaaaataacctcttttgatactgaaacacaaacaaaccatcaaatcaaagacatgagacatcatcataacattggtttatctatttcaattctaattaaactcaagacccatacataacaaccacagagacaaacttcattggctatagaagaccctgtataattcaatcaaaaagtagcagaagctaaatagagattttgaattccagctaagctcgtgtctgtttggaattttcagaacagggaagttagttagaaagaagagcagttggtacttggtgttgtggagacttgaaggaagatctgaagtagagagagacgagaacgacgataaacgtgacgccgacaaatggagataagagaaacctcctcgccggaatcatcgcattggatccgatttcacgtgtctgcgaaatttgctaattttttacaccactttttaggatgtgatgacttttttaactaaacaacaaaagttaaggtactaaactgtgatacttcaaatattcagagtgcgtttcataaattttttaagaccgaccttgaacacgataaattaataagataataatttttctgaaagtttgatgtgaatgtatggtctcatcaatatcataaattaataattgtataaatatattaactatatatatattatatgtaaaagaatttctttaaaatatattttaaaattttttttgcttaaattcatatttgttctttgtttgagtataattttcatattttattgtatcaaaatttttggtgttgttttctaaacattattattatgttttacttgtaactggttctaaatatatattttctacaatgaaagaaatcttataaaacaattttaaaagttaccaaattaggaaaatgtctgtataaattaataaatattaatttatcgataaattaatacctctctaaattaataaaatttcgcggtcccaacattattaatttatagaggttttattgtatatcgatttatcatttccctgaagattgattgcaagttcaaacatacaatggaaattacttatctgatacactttggttcagtcctaaataatggtctgatacggttcaattccagttaaaattccggttaagttccacgcaattcaagggattttgcttttcaaaaattccaaaattataaaatacacagctcacgagaataacaacaaatcgtggttttaacaacaacccaattacatcattacacgtgtaatatacctgccgttacatacagatgggataattttcgcttataaaatacagcatcaaacaccttcctcataacctagaaatcgaaaatatcagatctaaagaagagcgtcttcataaacgcccttcgtcttcttccctgcaaatctattttctagatctttctttcttccgcgaaacgacaatg

SEQ ID NO: 6458 - DNA, 3000 bp, Unknown
  misc_feature (1)..( 3000): cDNA_ID_1814482_gDNA_ID_1621094_Annot_ID_55611 3000 nt of promoter + ATG
agacattttcctaatttggtaacttttaaaattgttttataagatttctttcattgtagaaaatatatatttagaaccagttacaagtaaaacataataataatgtttagaaaacaacaccaaaaattttgatacaataaaatatgaaaattatactcaaacaaagaacaaatatgaatttaagcaaaaaaaattttaaaatatattttaaagaaattcttttacatataatatatatatagttaatatatttatacaattattaatttatgatattgatgagaccatacattcacatcaaactttcagaaaaattattatcttattaatttatcgtgttcaaggtcggtcttaaaaaatttatgaaacgcactctgaatatttgaagtatcacagtttagtaccttaacttttgttgtttagttaaaaaagtcatcacatcctaaaaagtggtgtaaaaaattagcaaatttcgcagacacgtgaaatcggatccaatgcgatgattccggcgaggaggtttctcttatctccatttgtcggcgtcacgtttatcgtcgttctcgtctctctctacttcagatcttccttcaagtctccacaacaccaagtaccaactgctcttctttctaactaacttccctgttctgaaaattccaaacagacacgagcttagctggaattcaaaatctctatttagcttctgctactttttgattgaattatacagggtcttctatagccaatgaagtttgtctctgtggttgttatgtatgggtcttgagtttaattagaattgaaatagataaaccaatgttatgatgatgtctcatgtctttgatttgatggtttgtttgtgtttcagtatcaaaagaggttattttctgctgaagaattggcattgtataatggtactgatgaaacattacctatactcttagggattcttgggtgagttcttttccttccttctgctgtcaggtttttgaaagtaaacgcatatgttaacaacttgtgaactgagtattcagatctgtgttcgatgtgacgaaaggaaaatttcattacggtagtggaggagggtacaaccattttgctggaaggtttgttttgttaaaaattatgtggagagattctcatatgttcttctatcttcttcttgttaatctttcatgtttgtagctgatgggaagtgtttttccatgtcattctttcgctcagagacgcttctcgtgcatttgtttctggcaactttacaggtacgaatcgtttgctgcatcctaatcaccatgcctgtttgatccagataaatttgtggaaaattttgtagtatattatggtctttgcttctgttagtacttatggacattggcatgacatcctcgaaaaaaatgagatttcattctcttttcttgctaatgttatgaggaaattttctgtgttcctcccattacacatctttgaatcctcataaacaatattagtcatgcgtgaagaagtcagaattatccaaactttgtagctatttggagaatattatacatcaagtccctgaaatctgtggaaacttctcatttgtgtgctatgattattttcttgtacaggagatggacttacagattcgttacaagggttatctagcagtgaggtaatgtttttttagctccatatatctcatcaatgaaattatagaaacgtctaaagtagtctttgatcttgccattgtgccagatgtgcttatttcttcataactattactttctaagatattgaagtagcatatagtttgttaactgtttgatattctataactccgattatgtttagttacatgtttgatatggcttgacaaagatttcttgtccgcaggtgaagagcattgttgactggcgaggtttctactccaggacctacacgtaatttattacttttatgtttaattcacacaatagaaagctgatgcatagttaaactaagaaggtggtgtatggataatacattgctcaccttaatccttgtattatatggtcctcttggtttggttctcagcttttaatttgtgatcaacagtcctgttgggaagcttgttgggcggtactacgatagccaagggaatccaactaaacaccttaaaggagctgaagcaaaagcctccagaggtgcacaactcatggagaaacagaagactgaagaagccaagcaatcgaattgcaactcacgatggagtcaagatgaaggtggagaggtagaaactcttgttatcttctatcaatccggtttataggggagagaactataacgtattagtgaatacttgatgggactaaaagcataagctattatgcaggtttggtgtgatgttggagtgccaagactggtacaaagacctttggagatagcaataactggctcgatgagcaaacgctgtgcttgctttgaggaagaccaacttgatcagtctggcttggagatctataaagactgtgaacctcttgccaagacttgcagggtttgaatatgattcacgagacttgtcttaacaagtttgcaaattgcaatagctagttctttcgtagccttgtactcttgtataccacatagaattctttatgattttgtatggatgcattgcgtgtagtttatgtgtaactaaattaaaacggcgaatagttctaaatactatgggtattttggttacacaccctgcagtttttgcttttgcgtcaacagattgcggattgcgtagtttgtgtactgaatttaaacggcaatcagttctagaatcttacggagtaatttaataacacagagtgccgtttgaattttcgtcgatagactgcatgtcatgtaatgaggaactctgggcgcttctttgttgaaaatttggcggtagcttcttcagggttactaaattttgaaatctaatttcttcaggaaattagctaatcggagaatcaataggcgaaattaagagtaatctccgtcgccgtcactggaaaa

SEQ ID NO: 6459 - DNA, 3000 bp, Unknown
  misc_feature (1)..( 3000): cDNA_ID_1814474_gDNA_ID_1621094_Annot_ID_55613 3000 nt of promoter + ATG
gaaaatggatgcggagagaacctagtttcagttattgggcctttaggttagacccatttttaatttgggctttatattcttatcacacggcctggtaaacctagcttcagttattgggtcatactaattctagttttccttttttttttttcttacgttcgtacaaacttcaaaagagttattattacaaaaacttttttttttgaactaacaaagacatatataaaattatacaactgttatggatcccattgataatacaaaactgtaaaaagaattaagttgttagctggagttgtaagtatttttgaaatagtgcaaaatttacaaaagaattatacgagagagctgtaaaaaaaaaaaaaagtaaaacttttagtaacggttttgataaaacttttatgattggtgttgaagctatccaactctatatttgactgctaattttagttactcatatatgttttttggcttgctcatagcactaccactatgtatagtgactaacttttacaaaattacacttatactatctacaaaattatacatttatcatattattattggaattgtttgtgaaactatacattgtatcgcataaaaacatgctgtctttttctcaaaatcttctaatttttcgatcaagttccatactcaaaattatcaatttaattgtcacgaaaatttcgaaaacctttctaccaatattttaagactttcaaacatgtctactttcgttttcgatcacaaaatttacctttcatcatacgaacaaagttggaaacttcttctcgcagcaatcaatatatttgtttataattctactaaaatgtgtcaaatatttataattaaaaattgcatgcttgacttttctagccactgcgagactatagtctataattatggactgttaacatcatatttgcagattattatatattttagaaaactttgcttggccggttatatcgtgtctacgcaagtaagtatataggtgtcatattttataaaaaatagaccatttgaatttgtgtataataaattagcaaatgagatcaaattgaaccgaccggatgaaatccgttcacatggaccatataacttgtccctccagttattttattttatttcgtcgatgtgtatttaattttgttaatctctatgcaattaagttttcataactaacttatttggtttggttgaggagtttcaaacaagtaaaagcataaacttaaaaggagaaaataggtggaatcatatatttagaaggatcgtcttactaattagaatcatatactagtagttagtggatgtggtataacctatatggctatatcaattaaattgtttttcgtagttatccaaaataattacagaaataagacgaattctcgtagttatccaataatttatttaatgttttcatataaaatctgaagcctagaaatgcaaattatgaaattatgtatggtttacatgtataattgtttatagtggtctcatatgttaaaaaaataattttttttaatcgtgaatgtagtgtggattacacgaaatcggtcgatgtttttcaaatgccgcaggaaattatatttctatgataagaaaatgtttatgatcactaatattagtagacacagcaatatgtaataaataatattaaaatagagagaataataaaataaaaaagcagacagcactaaaaaaaggttattcttatcttttgtaatcactatcactaattttagtaacatactgtataattttaattaaaagaaaaaaaagttcggaaagtggaatatttttacttttgattttttgtcaacagaagagaatttttccttgacgacaaaagaaaacatttttaatttattctcttttattttaacttaacgaaccaaaaaaaaaaaaaaggtgaaatgcttatttcagacagagaaatgaggatttgttcgagatgtgtcaatgttacgcatagcacagggcagagataataaaaaaaggctctctctttctttctctctctctctctctctcttctctaatctaatctaatcaaaaatctcttctttaggaagagaagtttcctccttcgactttcttctttctcaatatgaatcccggaaaatcgggaacctctagcgatttcagctaatctttacttaccttttctttagttctgacaagaagtagcaatacccttttggagattcgatcgtattcgctgttttttttttttgtgttttagctgtcttcgtgtctctgctactttgtgtttgatcatggagagatctgattctagagatttctacaacttcgctaagacttcttctggtcagttctctttcttgttcagctctttttgttttcaaatctaataaaagtgtttttattttgtgattcatcagtttgctaaagcttctttctttgatctgagatgtgaatgatttgatttgcttctgatttgtgaaaactttaagagaaacatactttttgtttcatgcttgttatgtttgatttatcttccttgttacagtatttgattcgttttttttttaagttttgtagtaacctataagatttactaatttgatttttgaagttgtatgaaatgattgaaatgtcacagatttgtttacaaaagctttagttttacttaaattttctggtcaactgattgtcacttacctcatgtgtttgatgaaactggatcttattgtctttgtgcagataacaatagtgcactctttgacgcatctcaatatgagttctttggtcaaagtcttgaagaagtcgaattgggtggtcttgatgatgatggtactgttcgtggacatgttgatgatgaagagtatcacttgtttgataaaagagaggtaatttggactgagtctgttcttggcaatatttgatgctaattatatatgagataaatggaagataaaacaaaacatttacttctggtttcagggtgctggtttaggatcattatctgacatg

SEQ ID NO: 6460 - DNA, 3000 bp, Unknown
  misc_feature (1)..( 3000): cDNA_ID_1814470_gDNA_ID_1621094_Annot_ID_55615 3000 nt of promoter + ATG
caatggagttctttgattggtatatgtgttcgacaggtatctggtttctcctgcagctaactgagaactgcacgtctgactaagaatgcgtatcgcaaaacgtgagaggtcaagcagctttctccatacgtagaccaccactcagctaagaaacaagaatgtaacgagagtcaagtaagagaagtacaagcgaaaagatttatacaagaaaatcaggaaaattaaccataccaggaggcattgtatcccgagctcttattgccaagttttttccaaaaactccaccagcagttttgtgggaggttaactccttgatgattttatcttgaatcttgtcgtcaggaaccaatctctcaaatgcaatcgggcaccgatagaataagctaactacggattttcttcgttggtattataaaagagttttggattaagaaagaaacccagcagcaagcaaaggaatatgctgttgttgctcccaccatgatctataattttccagtatattatgtaatcctccctattaaccagatgtgtcttgattgcatcctttgctcggtacaatgctgcatagacataccccattgcaggtctcttttcagaacaaactattctcaaagcccgcaaaagaggactagttaaatggtttaccaaagctactgccttccaaaaggcttcatcagtgagagcattcatcaccaatccacttggttcttccgaatatgaacattcattccactcggccgaagtaaccatagcctgcagattggatttgagctcggctattcttcccaatgtagcaaaatttgtggcagaagagctaaatgctggtagcagaatatcattaccagaagtaaatttccacatcagattaaaacaccactatggttataaacaaatcttgtgatagcttgagcctgttcaatagtctcacttatccagccaagtttcccaaactcctcgagcatctggtctatgcaatgtgcagcgcaaggaacccaatatagagaaggatacacaagcatcaaccttttcccagcatcaacgtagtaatcatcacattttgtaatcacttgaacaacattggtactgccaacttcttcaaccagttcgctaagtagctcaaacaatttatcagcagaagataaaacctcagatgcgtccacagatttcagaaacactaccttttcagggcaataaaccaaaaagttaagaactttaaagcctttatcagagttcagttcctcaaccaaaatagaacagccagtcctcttccacatcgctttgcattcatcaatctctttcgccatctcctcaacacaattcttcagtatccaccctcgaaggtcatcatgcgtgggagcagataccccgaatcctccagaggcaatggcatcgatcatcggttggaaattaacagaattcactgcatcaaaatcagctccaataccaaacaaaaaccttccaatcgccatatgaattgtattctccctatctctaaaggaaggatgcacaatgttcttcacactactaatcgcaaccggaatcaaattatccatatctctaccaatcaaatcaacattgttactcgcactaccattctcaaaagcattctttttactcctgtaagtcctttgctttgttctgccactcaacaagctctcgttttgcacaacgacatccgaactacccggcgacttaaacccgtcatttacatcaggttgaacgaccatcatatctccttcaataggaggtaaagaagcaacagacaaaggctctgaactagatttatgtctcttcctctgacgtctcacagttccatcaatacactgctgcaaaaagagcctaacatcttcaggaacttggtcacagatagtaccttgtccctttttaccagcaagatgtccttaaccctagttataccaccacctttgaacattttccgacagtagagacaacgcatctgaagtctatcaccatatttgtaaatttcacaatgcttccatgcattgtcttgtttctgaggtgtaagagctacaggttctaattccgcatccatctaattcattcaagaggaagaagatataagaaaaggtaaagactttgttaatgggtaaataagcctagatcctctaatgaacaattcgagaaaaaagatttgaaatttcgcagacctcatgcaccaaattcttagccggaataaacaatttcgatacaaacaaaacaaacccgtaaaaaatttgtacaaggagatgaagagaaaagacctgatttggtttgtggccggttacggtgaatcggtttcggggaaagtgataaaattccggtacagtagcttcggttctggagaagaggaagctggaatcagccggagatggagatttccgacgaacggcggagagaatcagaggagggtggaggattgcgatggcggagaaatcgacccggcccgtttttagggttcgaagaaaataggtttggcagctttttctggtttatgacctataaatcggcaaatctgtatcgtgacgtcaccaacccaattttgctaaaatttgttttccgttttttaacttttttttgtttacccttgataactaaaacgacgtcatttcctttagggcattttctgattgaacgacgtcgtcttttcttctccgattagcgtcggtcgtcttcttcgtcttctctctgtcgctgatctgggttttgcttcaacgtgaaacatctttgaggttgatgatgaggtttctgtttacttaatatcctgtgagagaaaactcttcttgacttgaggtatgataatactctaattattgtttattttgtgttggatcaaatggatgataagaacttgttgatctacttctaaacctcttaattttggagactatgataagagtaaaggacatagtatgtttgaatactgatactgtagtctgtagtgttgctgacaaaaacgtataggtatatgtacatttgttttcgctgaggctaaagatg

SEQ ID NO: 6461 - DNA, 3000 bp, Unknown
  misc_feature (1)..( 3000): cDNA_ID_1814462_gDNA_ID_1621094_Annot_ID_55617 3000 nt of promoter + ATG
ttgaggagatggcgaaagagattgatgaatgcaaagcgatgtggaagaggactggctgttctattttggttgaggaactgaactctgataaaggctttaaagttcttaactttttggtttattgccctgaaaaggtagtgtttctgaaatctgtggacgcatctgaggttttatcttctgctgataaattgtttgagctacttagcgaactggttgaagaagttggcagtaccaatgttgttcaagtgattacaaaatgtgatgattactacgttgatgctgggaaaaggttgatgcttgtgtatccttctctatattgggttccttgcgctgcacattgcatagaccagatgctcgaggagtttgggaaacttggctggataagtgagactattgaacaggctcaagctatcacaagatttgtttataaccatagtggtgttttaatctgatgtggaaatttacttctggtaatgatattctgctaccagcatttagctcttctgccacaaattttgctacattgggaagaatagccgagctcaaatccaatctgcaggctatggttacttcggccgagtggaatgaatgttcatattcggaagaaccaagtggattggtgatgaatgctctcactgatgaagccttttggaaggcagtagctttggtaaaccatttaactagtcctcttttgcgggctttgagaatagtttgttctgaaaagagacctgcaatggggtatgtctatgcagcattgtaccgagcaaaggatgcaatcaagacacatctggttaatagggaggattacataatatactggaaaattatagatcatggtgggagcaacaacagcatattcctttgcttgctgctgggtttctttcttaatccaaaactcttttataataccaacgaagaaaatccgtagttagcttattctatcggtgcccgattgcatttgagagattggttcctgacgacaagattcaagataaaatcatcaaggagttaacctcccacaaaactgctggtggagtttttggaaaaaacttggcaataagagctcgggatacaatgcctcctggtatggttaattttcctgattttcttgtataaatcttttcgcttgtacttctcttacttgactctcgttacattcttgtttcttagctgagtggtggtctacgtatggagaaagctgcttgacctctcacgttttgcgatacgcattcttagtcagacgtgcagttctcagttagctgcaggagaaaccagatacctgtcgaacacatataccaatcaaagaactccattgagcaaaaacgactcagcgatcttgtatttgttcagtacaacatgcgcctcagacaactgtaagtcttagatcttgtcccatctcagccaactgcattgtttccaaggaataagaaagtatagaaataatggttctatgtcttctctaggggtcctggaagcggagatgacacactagacccgttgtcacacaacaggatagatgttctgaaagaatgggtttctggagaccaagcttgtgtagaaggaaatggaagcgcggactggaagtcgcttgagtctattcataggaaccaagtagcaccaatcattgatgatactgaagacttgggttcaggtaaaaagatttagcatcctcggacaactttttttgtgtgtttcgaagattttagattttaaaagttgaaatgaatgtgtacaggtttcgatgatattgagatattcaaggtagaaaaagaagtgagagatgaaggttattatacaaacacatcggagaagttattcacgtaagattgatcatggttggtttaagcttcttcgtcgatgctttctgacttacatgaagctgttgtagtcataggtgtcgatttgtaacattagagtcttccctttagaattatctcttctacaagacgtttcagtattcttattcttcttactctgcattgtcctattaggtttccatagagtttgggttttataatcaggttctgtccagatttttaagttgtttgacaaatatatttaatatggtcatgaaatctaaatgcctattttctttcatatatatatttgatggctttgttagaccatctgttttattactagcataattactccttaattcttgtcaagtttttgaccgatatctaagcatacacaacagaaggacctctcacaatgtatgatccattcgaccaaaccatagaaactggaaggtcattgtcagagattgtaatggtgagaccttgaatttcatcagtttagaaaccaaagacatttcagtggcccatattatatgcccatacggcccagcccattaagaaacaattggagcaatcggagaaaaaagagccagagataagctaaaaggtctacgatagttccatcggacatcggcggcgacatgacttcttcggcggcgatcagatctgacatctacgacagagaagaacgcaagcagttaatcttccttctttcgattcttcttcttcttcattctcttgttcactgtgttcgaattctgtcttctttctcttgattgctcagtcgtgtgtgcaggcaataccaagcacatattcgtggcctgaatgcttacgagcggcataagaagttcttgaaagactacggtactacacgtctttcaatctccttgtaaatgtctttggatttgttagctcgataattaggttttaataatggacaaaaagtttgggaaatagggtaaataagtggctttctatttatccaaaatccatattgtcccaaatcaaaactggttgatgaacagtcttctcctctgagctaggaaggagggctatagtcagccttacatgtcttatttgtggttccattagaaagagtattctttaccctggagttagctactatttgaggagctgttggtgttcttgtttaagattttgtagtttcattctttgttttgcaactttacagttcgatttt

SEQ ID NO: 6462 - DNA, 3000 bp, Unknown
  misc_feature (1)..( 3000): cDNA_ID_3090248_gDNA_ID_1621094_Annot_ID_55618 3000 nt of promoter + ATG
gagattttcaaattttatatagtttcaaattatttcaaaatccatatatcttgatttcataaccactaacaccctattcgttatattaattatttgtaataaatttaaatgtttgcatctttaactctcacacacaatacctatacttttaaaaactataatcctttaccattatttttgtcgtatttacaaattaacagttggattgagaatttttattatgattttagatttgtagttgtgaaagtaaaaatgttgttatatatatacatttctttgtctatataactatattagtgatacttttttattttcagattctgatatgacattcttgggtagcaaccaatactaattatgaaaccattatattgctccggcttgaagattgcttactctctatatatacccactacttggtatattgttttctatataggctatgattaccaggtatcacaaaatgcatacccttaaaatacttgtttgcttcatatggacaaaaacctcacacattgaaaaccatatccggcaggaaatccgaatcttaatagtacattttttgcttatttcatggcttttctggactccaacaaaatcaatattatacaccaaaatctcagtgattagaacaaatatctagtgtatataaggaataagaattctaaattcaaaaaccagaaacaaatttacatgcccaacgaatatatgaaacgaaaacttaccatcaacgttgcttttctcttcaggtaaaggaaagtccaaccaagccataggctcaagatgcatcatacacaagattaagatctttcattcccaaatgatcaaattacaaaccattaagacacattcatgtgactactgaacaaaaagagatatctaacataagttgcaagtgatatttatgagaatagcatttcacttcacgggtgctcagaaccccgtggtccttagaagaaagccatccttaaacaaatgcaaattatagtgacttatcaatgcttgtgactatacatattgttaaaactttgatttattagggcttgtcctgaacttttctttgaggaggagaggaaaaggtatttgccaaagctgatgtagcatcgatttagaataaattgatggttttaattttgagaatttagagtaagatgacatggaatcttgagagggcttaatagaaaaactgatgttgatgacttgagatgcatcagtgagcttcgtttgtttgttacgtgaaatattttgatatgattcataaatgactataaattgaaataaatagatttttcctagaaatctaaatctttggtgtatatatatatatatatatatatatatatatatatatacatatgtgtgtgcatataaataactcaaagaatttattgaatggatttttcactaatttattttaacgctaagaatgccaactttgtgcccacattgtctctcggccatgggtcgactcttatccgatggcgtgaccgttatttttggaggagttaaagatttgtttaacgactctaaatcaccatatgagatttctttttgttttgtgttctctcgcacaaaatcgacaatcacttctcgatatgtcaccatcttaaaaacattttgcttaaacacatttaacggtagagtttttctcaatacgtttaaccaaaaagataagtttactttggtaacataagtggcaaaattattttttcaagctctcctcatgcaccacatgtttcctgaaaccgagatgtttcttgtgttatatatatatatcagttttgaaaatagttttgatcaaaaaaagttcttcagttcacccataggagcaaatctctcttattcacccacttttgattagccaatcaaaatagaacaattttccatgtaatactatattttaaaataaatccaaattaaaaaatatgtcggtttgggtttataaataaggattatggttaaattttataattaccaaattatatgtcggtttggattaataaaagagtgattaggttttagattttataattaaacaaaatgatatgtcaaatttgggtttataaatgagatttaaggtttatattttacaattaaaccaaaattattaagtcagtttgagtttatatattgattggttttggaagattttacaattaaataaaattaaatgcttagggtttaagatttaaaatttaattcaatctaacattttttaatgaattaatttaatttatttagataataggtgagcgtgttttggtttagttaattagattaaataaaaacattaattggctagttaagagggttgaataagaaagggtgaacccaagaattgaaaattagaattaaaataaggtctttcatgtttttgaatttcgaaatttgtatctaatactattataagatcttgatttttttttttggggacatcttataagatctgatatataaagaatcaaagtaactaagagtaaacatttatgatttatggagttcgcttcccatatatacactgttaaagatatcaatcataatggacacaatcaaaccagattcaaatacataaatctccacacacacacacaaaaaaaagcttaaggaaatatatttaaagcctaataaataaataaatctctaaaacataaatgcattgttaatttctctcttgcagacgtatatatataaccatgtaactagcaacttcacatattgagaattcttatcaacaattaaacatctcgataatggcttcccttggcttgttcctatgtctttcctcggttcttctcatgagcctttgtcaagttcctacagctattgaagatgaaagaaaagcaagtcatttctgttttgtttcgtaaacatatataataacaactatcaagttcctctcttaaacaaaaaaagaaaaagaacaaaatctatcgacgttcttaatttgtattggcctatttcattcgttgtgtcatgacgcaggtgtatatagcttacatg

SEQ ID NO: 6463 - DNA, 3000 bp, Unknown
  misc_feature (1)..( 3000): cDNA_ID_1814446_gDNA_ID_1621094_Annot_ID_55621 3000 nt of promoter + ATG
gacactacctcaaaccaacttccagtgtttgctcctgtaggtacccgcaagtaaaccatcagtctttgaaggctttgatctcgcagatctaagactgacatgacaaggacaggtagcttcttgagagttgagggtcagagtttgctcaacagttgcaggaaagtatcaaggattgataccattgtatgaatctcttggatttgtgatcgagagatttggggataagttgatgaggtagaaagtagaatcctttgtgataatttcttccacgggttcgatattcttagccagatatgatgactcttcacaattcgctctaaagaactagtatttgttgtatgactctatgaatctctctaacctctttcttttatgatcattacattcatgtctgctatttctaagcgtaaaatattgtgatccagataccttttaacaactgatgtgttacgtctttggtgacataattgtaagacacaacaatggctttgtcaaaagactcgaaaccaaggtttttctaattcgaaaatgtaagaaatgtaagaagaaacttcaaaacgatcataagtgaaaaccctataaattgtagtatatgaaaaacattcattgattaaaatcttcaatcaaatacgagttggcatgttgttgaagaaagtaacaactcctggatcatcgtcttatgtttatcctctgtatctggagtagacttaaacaagattgtcgcagtctttaagcaacaagcatttctcaaaatatatttaagcatatctatctctttctgtgatccatgcatccctgtccacttagtttcgagattcgacctcaaacattcaggaacatagttcaactgattctccaagcaaaccagtggatcgaccacacaactatctatatgatcctgagatgatcaaacatgagagttttccttaaagtttgaatgcagtaaattaaaccaaaagtaaaagactatatcgaaaatacttacatcgttcagatcgatctctagctctagtaaattatgcgaattttcgagaaaacggacaagtaactttgaccaatttgcatcacatggacaaagcttcagattctcaagctggttgaagaaattccctcacaataaaaatcctagaataaataatgatttaagctcaatatgaaagtgttcatagatgagagtatatatatagatggatggaaataaattacctcttccgcagagttgactcttacacataatgaaagccggttgacagatgtgattgatgttacaaacttgttgatatcggggtatgtcgtttcgatatccgcctcccctaacttaggcatatctttaaaatcgtaggagtagctatctctatctgtaagtaacttgaagtacttcaaaggagtgtttatggttgactaggcttccaactgggtttagaatttttatagggactttcaagatagattgattgttaggttgttatatttggattgatattttggttcttcattagtgggtgttcttattgtttaattcagattggtcccttagattttgattttagatttaatacattttgacaccaaaaagtgttgttgaattgtttgaaacaatataggtgagcaaagtgtccttagccgacgagagttgaggttaatttactttgtgaacatatcaaactggacgttaatggttgctcgttttcttagattcaaacgaaagtttagtgtctggaaaattcattgcttagataatcaacactccaagagcggatgcaattttcgtgttttgagttcaagaatggcttttaatgcaatcttatttaattgtctattcttttgccatgaaccctgaggattccctttacccgatgtcttttacctattgatttacaatcgtttttttttcgttttttttttcttgttaatttctgaatttttggccaaaactctttagcattctagcttaatctaaaccatcatagattcataatttatatcgtattcacttggtctttgtggttcattccgtacatatactattgcgtttgttaaacacttgcagtatattttctaggaaaaaacacgtggatcacaagttgacgttgttgccgtggaccaataaacgagtgccctgtgaatttttggttaagattttatttaggaatatttttcatttcattttatttatatatttatttatttttgtttctgtactaactatttatttatccttcgattatacgaaagtgggcactacgtcaaaactagtcgttgccattatttctttgaaactgccgctttctctcttcttctgatttctctttctcagcttccccaagcaatctccccttgataaaaaagacttcatcgaaataatgatcagattgatggttatggtgttaattacatagcctgttattagttagtacatctcaccaatcaattttttattagtataagtaaaaaaaaaacattattttagttgggatacataaccatgtatagatgtcgattatatagccatctgttatatcttaactgatcattgactttgcgttcagatgacctataaattttaacattgtacggctgtaaactttttcaaatctatataaatagaatgaggaaagatccgcaagttatattataaaagaagaggaaaagattagcaagttgtcaaaaaacaaaaagagagagacaagatccgccagctacacatgattaatgtccatggcgccattcaaagtcgaccgttcaatgcttttgggaaatgagaaacaaaatagtggaagattatttaaacaaattttgtttacgaagacaatcgtgtagtgcataaacacgaatactaaactcttgtaatactccaaattgatcgttgactttgtagtcgcgacagcccctaagtttgtcaatgtctcgttaacaaattagcaattagaaacatagtcaaaataatcatctcattctcatatctctcgttgctcaaaaaatctctcagcatctcttatg

SEQ ID NO: 6464 - DNA, 3000 bp, Unknown
  misc_feature (1)..( 3000): cDNA_ID_3048384_gDNA_ID_1621094_Annot_ID_170888 3000 nt of promoter + ATG
aagtctttaccttttcttatatcttcttcctcttgaatgaattagatggatgcggaattagaacctgtagctcttacacctcagaaacaagacaatgcatggaagcattgtgaaatttacaaatatggtgatagacttcagatgcgttgtctctactgtcggaaaatgttcaaaggtggtggtataactagggttaaggacatcttgctggtaaaaagggacaaggtactatctgtgaccaagttcctgaagatgttaggctctttttgcagcagtgtattgatggaactgtgagacgtcagaggaagagacataaatctagttcagagcctttgtctgttgcttctttacctcctattgaaggagatatgatggtcgttcaacctgatgtaaatgacgggtttaagtcgccgggtagttcggatgtcgttgtgcaaaacgagagcttgttgagtggcagaacaaagcaaaggacttacaggagtaaaaagaatgcttttgagaatggtagtgcgagtaacaatgttgatttgattggtagagatatggataatttgattccggttgcgattagtagtgtgaagaacattgtgcatccttcctttagagatagggagaatacaattcatatggcgattggaaggtttttgtttggtattggagctgattttgatgcagtgaattctgttaatttccaaccgatgatcgatgccattgcctctggaggattcggggtatctgctcccacgcatgatgaccttcgagggtggatactgaagaattgtgttgaggagatggcgaaagagattgatgaatgcaaagcgatgtggaagaggactggctgttctattttggttgaggaactgaactctgataaaggctttaaagttcttaactttttggtttattgccctgaaaaggtagtgtttctgaaatctgtggacgcatctgaggttttatcttctgctgataaattgtttgagctacttagcgaactggttgaagaagttggcagtaccaatgttgttcaagtgattacaaaatgtgatgattactacgttgatgctgggaaaaggttgatgcttgtgtatccttctctatattgggttccttgcgctgcacattgcatagaccagatgctcgaggagtttgggaaacttggctggataagtgagactattgaacaggctcaagctatcacaagatttgtttataaccatagtggtgttttaatctgatgtggaaatttacttctggtaatgatattctgctaccagcatttagctcttctgccacaaattttgctacattgggaagaatagccgagctcaaatccaatctgcaggctatggttacttcggccgagtggaatgaatgttcatattcggaagaaccaagtggattggtgatgaatgctctcactgatgaagccttttggaaggcagtagctttggtaaaccatttaactagtcctcttttgcgggctttgagaatagtttgttctgaaaagagacctgcaatggggtatgtctatgcagcattgtaccgagcaaaggatgcaatcaagacacatctggttaatagggaggattacataatatactggaaaattatagatcatggtgggagcaacaacagcatattcctttgcttgctgctgggtttctttcttaatccaaaactcttttataataccaacgaagaaaatccgtagttagcttattctatcggtgcccgattgcatttgagagattggttcctgacgacaagattcaagataaaatcatcaaggagttaacctcccacaaaactgctggtggagtttttggaaaaaacttggcaataagagctcgggatacaatgcctcctggtatggttaattttcctgattttcttgtataaatcttttcgcttgtacttctcttacttgactctcgttacattcttgtttcttagctgagtggtggtctacgtatggagaaagctgcttgacctctcacgttttgcgatacgcattcttagtcagacgtgcagttctcagttagctgcaggagaaaccagatacctgtcgaacacatataccaatcaaagaactccattgagcaaaaacgactcagcgatcttgtatttgttcagtacaacatgcgcctcagacaactgtaagtcttagatcttgtcccatctcagccaactgcattgtttccaaggaataagaaagtatagaaataatggttctatgtcttctctaggggtcctggaagcggagatgacacactagacccgttgtcacacaacaggatagatgttctgaaagaatgggtttctggagaccaagcttgtgtagaaggaaatggaagcgcggactggaagtcgcttgagtctattcataggaaccaagtagcaccaatcattgatgatactgaagacttgggttcaggtaaaaagatttagcatcctcggacaactttttttgtgtgtttcgaagattttagattttaaaagttgaaatgaatgtgtacaggtttcgatgatattgagatattcaaggtagaaaaagaagtgagagatgaaggttattatacaaacacatcggagaagttattcacgtaagattgatcatggttggtttaagcttcttcgtcgatgctttctgacttacatgaagctgttgtagtcataggtgtcgatttgtaacattagagtcttccctttagaattatctcttctacaagacgtttcagtattcttattcttcttactctgcattgtcctattaggtttccatagagtttgggttttataatcaggttctgtccagatttttaagttgtttgacaaatatatttaatatggtcatgaaatctaaatgcctattttctttcatatatatatttgatggctttgttagaccatctgttttattactagcataattactccttaattcttgtcaagtttttgaccgatatctaagcatacacaacagaaggacctctcaca

SEQ ID NO: 6465 - DNA, 3000 bp, Unknown; identical to SEQ ID NO: 6460
  misc_feature (1)..( 3000): cDNA_ID_3090256_gDNA_ID_1621094_Annot_ID_170886 3000 nt of promoter + ATG

SEQ ID NO: 6466 - DNA, 3000 bp, Unknown
  misc_feature (1)..( 3000): cDNA_ID_2043719_gDNA_ID_1621094_Annot_ID_170883 3000 nt of promoter + ATG
ataattcaacggaaacaaaagagtaaataagaatgcattagagaatcaaaataaaagatcaaatccataatccaaacttcaacaaaacatcttccacaatccaaaacaggatccacatttttcaccatgggaaatgaaccctagaaactaaaaaacacgataacaaaacgctcaaaatgaattcctcacgaaatagaaaatttcttcagaacctgagcttggtaaagaaccatctgttcttaccggttttgaacctctcctcaagcttagccttagcttccttaagagcagcaaccttcttatccttactctgaagagcatcaagagtcgccacttccttgagatccacgtcgagtgtgtaacgagtaggcatcagatgctggtaattaacaagcttgatgaaacacttaaccctagatttcttagctgtcttcttagctgagtctttgcggatgactttgctcgggtacttcttgagtccggcgacgaggcagtgtccgtaaggacgatcacggttaccgtcgtcgaaggatttgatgatgacggctttctttccggcgtaacgtccttgaagaaggatcacggccttgttctgcttcaagaacttcaccattgttgcttcgtttggtagatccctctcacttgtctctctctctggctgctatgaaccctaagtggcggattctatgagaaatgcggctttaatagtaatgcagaaaatggatgcggagagaacctagtttcagttattgggcctttaggttagacccatttttaatttgggctttatattcttatcacacggcctggtaaacctagcttcagttattgggtcatactaattctagttttccttttttttttttcttacgttcgtacaaacttcaaaagagttattattacaaaaacttttttttttgaactaacaaagacatatataaaattatacaactgttatggatcccattgataatacaaaactgtaaaaagaattaagttgttagctggagttgtaagtatttttgaaatagtgcaaaatttacaaaagaattatacgagagagctgtaaaaaaaaaaaaaagtaaaacttttagtaacggttttgataaaacttttatgattggtgttgaagctatccaactctatatttgactgctaattttagttactcatatatgttttttggcttgctcatagcactaccactatgtatagtgactaacttttacaaaattacacttatactatctacaaaattatacatttatcatattattattggaattgtttgtgaaactatacattgtatcgcataaaaacatgctgtctttttctcaaaatcttctaatttttcgatcaagttccatactcaaaattatcaatttaattgtcacgaaaatttcgaaaacctttctaccaatattttaagactttcaaacatgtctactttcgttttcgatcacaaaatttacctttcatcatacgaacaaagttggaaacttcttctcgcagcaatcaatatatttgtttataattctactaaaatgtgtcaaatatttataattaaaaattgcatgcttgacttttctagccactgcgagactatagtctataattatggactgttaacatcatatttgcagattattatatattttagaaaactttgcttggccggttatatcgtgtctacgcaagtaagtatataggtgtcatattttataaaaaatagaccatttgaatttgtgtataataaattagcaaatgagatcaaattgaaccgaccggatgaaatccgttcacatggaccatataacttgtccctccagttattttattttatttcgtcgatgtgtatttaattttgttaatctctatgcaattaagttttcataactaacttatttggtttggttgaggagtttcaaacaagtaaaagcataaacttaaaaggagaaaataggtggaatcatatatttagaaggatcgtcttactaattagaatcatatactagtagttagtggatgtggtataacctatatggctatatcaattaaattgtttttcgtagttatccaaaataattacagaaataagacgaattctcgtagttatccaataatttatttaatgttttcatataaaatctgaagcctagaaatgcaaattatgaaattatgtatggtttacatgtataattgtttatagtggtctcatatgttaaaaaaataattttttttaatcgtgaatgtagtgtggattacacgaaatcggtcgatgtttttcaaatgccgcaggaaattatatttctatgataagaaaatgtttatgatcactaatattagtagacacagcaatatgtaataaataatattaaaatagagagaataataaaataaaaaagcagacagcactaaaaaaaggttattcttatcttttgtaatcactatcactaattttagtaacatactgtataattttaattaaaagaaaaaaaagttcggaaagtggaatatttttacttttgattttttgtcaacagaagagaatttttccttgacgacaaaagaaaacatttttaatttattctcttttattttaacttaacgaaccaaaaaaaaaaaaaaggtgaaatgcttatttcagacagagaaatgaggatttgttcgagatgtgtcaatgttacgcatagcacagggcagagataataaaaaaaggctctctctttctttctctctctctctctctctcttctctaatctaatctaatcaaaaatctcttctttaggaagagaagtttcctccttcgactttcttctttctcaatatgaatcccggaaaatcgggaacctctagcgatttcagctaatctttacttaccttttctttagttctgacaagaagtagcaatacccttttggagattcgatcgtattcgctgttttttttttttgtgttttagctgtcttcgtgtctctgctactttgtgtttgatcatg

SEQ ID NO: 6467 - DNA, 3000 bp, Unknown; identical to SEQ ID NO: 6458
  misc_feature (1)..( 3000): cDNA_ID_3048396_gDNA_ID_1621094_Annot_ID_170879 3000 nt of promoter + ATG

SEQ ID NO: 6468 - DNA, 3000 bp, Unknown; identical to SEQ ID NO: 6457
  misc_feature (1)..( 3000): cDNA_ID_2043733_gDNA_ID_1621094_Annot_ID_170876 3000 nt of promoter + ATG

SEQ ID NO: 6469 - DNA, 3000 bp, Unknown
  misc_feature (1)..( 3000): cDNA_ID_3090281_gDNA_ID_1621094_Annot_ID_170869 3000 nt of promoter + ATG
aatctccatcgctccggttagagaaatccgtacgaaatagagattagagagaaaaagaaggagaaagcttttggagcttgtaattagtggagtggcttaatttgataatgactaactttaacacttatttatagtaatttgggaagttatgaacttaccatttgaaaaaatcaaatcctttatcgtctgtagtgatacattatatgtttcataataataataactatttttattttaatatattcataaaattgtttatatgaattaaattatgtaatttccaatgttgtcttgaccacaatgttgtctttaaataaatgaaacagtcaatctagtcatttattattcactaatatatttttgtaataatgcgaatataaaagaaaaataactttcaaaaaaaatcttattccattttcacatgtttcgtgtacacatcccatccaataattttaagtgttatcatcatgtttatgtaacggctaacgataaagataaaagaactttattgttagaggttgtggtcattttcacgcaacaacaaagtggtcaagttcaatgtataaacaaaacatttccatttattcctacactcttttgaactggggttgaaagatacatcaaattattgtccccttaaaattttgtcatcaacctatctagaggaaaacgttttctagatgacttactagttactacgtgtcataccgcaatcgaccgtttgtaactttgtattatttactttcacacaagtcgcaataacaagtcaatgtcaattaatactttatgggtttggttttgatttattcgttattacattcatggtggtttattgttgttttgtctaagtttgtttcgaacatattagagtcattttacataatgtataatactaccattaattattttcccattcaatattttgaacttgcatagaaaaatttggtgaaagcaacgtcacaactaataataaaacagaagcttgcaaatcaacgataaagttgggccaatcctatcttaagcttgataatggatcgaaaaataaaacgtcatgggaaataagaaaaccatactaatttttattacttatccactcatcgatgggcccaagaatctaaatgcacgcttttatatcattttccaaaaacaataaaattggacttatatttatgtcacattacacaaaattatcagataaaacaataaaaacggagtcatgatcagccctcaaacctcataacaaaaagatgtttacagtttctctgaagacttgatgcaaacctaaacacatccgacgataagagagcgtctacggacagctatagagaccgagtttggccactattcccaaacgtgaagggacaagaaccatcacccacatttaaaataacccacttagaccgaaccgtcacctttattcgattccgaaaacccttaccgaagcattcctttgtattctcttcttcggttcatataattatcttaatcgaccttattttctttttatttcataagtgaaatcaattaacattatgcaagtaatatttttcctgtgaacctttatcaaacttcatcgccattttaaaaaagctttcatcgccaattatctctatgcaagtgattgacaattttaacataatattttacttgagggtgagatttttaaagaaaatgtagtgaacgatttttttataaatcttttgatacatgtaatgtgatatgcactcttcttgcaaaatgcatataaatatcatgggtgaatctatattcataatcatgatcatgcaactgaagtatgttagtcatttcatcacatccacatagatatagattttattacccaaactattgaactttttttttttttcatcaaaaaaaaaaaaaaaaaaaaaaactattgaactttttttactattgaactttttttttttcacccaaactattgaacttatctcgataattcaagtctaattttgtttgctttttatatacatttcttgatagttgaaagatcaagaaccgattaggaaccaaaaattttgaagtaattttggttttggtctatatatctgaataacaaagaattgaaaatgttttgagtatatttttcttttcagagttcgaatatttttttgttattttggttcagatctatttggtttattcgggtatttttcgttcaaaaattcttaaatttttccgattattcagttttagaataactattatttttggaaatatttcggttttagagtttatgatttattcgaaaatttagttggtttggtttagttcagtttctctacttaggattcggtttcgttttggtattttatgtttgggtattttgactaggactaatgggacagtacatgtatataactcagggacatgtttgtttacactaatagtctagtagtagtaaataattgacataacctatgatccttttgtcgagggatgagatcttgccactttattcttcaatatcgggaaataacgctaagggatttcccatcgtcgaacgagatttggagggaaacagaaaaggtaagtgacaaacctacaacgtttaagaaataattaagcaacacaattaaatttaaatttaacaaaaaattctatttacaatagtaatgagtctttttttttctttttttttacagtggacatataattaggccgtgtgaaacaaactctcatctctttcttccattttaaatcgttgttggtggccggaaaaattacatctccgcccaccgccgtcggaataatccatgttatctgatcggcggagtcttccattgtcgcgtcggaaattattctctgtaattactgtcacgtttcgtctctcattgagggaatatttgcagatcgatctatcgtcgatttagatctggcgttcctagggttcatcgacgctggagattcatggtctctggtgattgcattttcgaatttttgctgaaattggggaaaattttaggtgctgtgtagatg

SEQ ID NO: 6470 - DNA, 3000 bp, Unknown; identical to SEQ ID NO: 6455
  misc_feature (1)..( 3000): cDNA_ID_1442397_gDNA_ID_1621094_Annot_ID_170865 3000 nt of promoter + ATG

SEQ ID NO: 6471 - DNA, 3000 bp, Unknown; identical to SEQ ID NO: 6454
  misc_feature (1)..( 3000): cDNA_ID_3238302_gDNA_ID_1621094_Annot_ID_170863 3000 nt of promoter + ATG

SEQ ID NO: 6472 - DNA, 3000 bp, Unknown
  misc_feature (1)..( 3000): cDNA_ID_1814431_gDNA_ID_1621094_Annot_ID_170904 3000 nt of promoter + ATG
agttgatcatcacatggaaggaaaaggaaaagaaaattcatttagacctttccatgtacaagtatatgatactcgaactattaccataacgaatattcatacatataaaatacgactacgggatcttataatcgaatttatgtaggatagtttgaacaagttgttcgaatactaaactatgaacaccaaaatgcataattttgtagtcgaatagttatgaacatatttatccatatcatgtgatcacgtttgagtatatttgtttccaaagccgcttaaattttttgtttccctttctaaatgagttcttaaactcgaaatgacgatatctcaaattggtaaatgctatttaaagttctgaatgaagacaaaatcgcattatgtagtgcgttattaaaaccataccgcattttatctctaattgaatcgtataattctattaagtttatttaatttatccgtccacaagtcctcaaaatatgaaaaacaataaacaactaaagaaaattacaatagtcaaagttttcattctgctacaaacaaagtcagtatacctaacatttcttcctttatgttttttttcctcggaataggtaaaaaactagaaaaagaacatttctaagaataatataccgttttttcctcggaataggtagtattgctattcctctccgacgacggagcataacctcctcctcctcctccaccaccctctctactctcctccgcccccacaaaaccatcggtagccactgcgttaggatagctaagagtgctcacgttgtttgacgacgaaaacatgtacggtcgctgttgttgcattagctcgttatgagccatttggttctgcaaattagcgtattgccaaggagaggaagatactccggcagtgggatcagacgaggtgagactaaaaccagacgacggcgaagacccgaacgcaacggcggatggaccgccggtgaattgttgcaccatggctctgaagttggctgtgtcggtgttgaaaagtgtagtaggtgtacgacgtgaggctctagatctccgacgtgttggctttgcaacacggcgattatccggactcagaggagaatcagctgacgtggcggtggtggtggtggttgtgacggtggaggttgcggtggtgaagaaggtttggttgttgtagaattgagaccagtcgttgttagagttggccatcttcttcttattattatgggagagatcaaagaggagcccttgtttagtatttatggactttctctcatcttttggtttttaatagcattttaaaacttgtcaattggttggatttggtcaaagtaagaccatctaacaaatcacagccgttggttttggtttgtttttacattttagggacacgtggatctaaaaaagattgtcgttgatgcgtcgcctaatgtttggatgatgttgtcgatttgcatttctcaattctcacatgcagtagtaaattagtaattcaagaatgcgatttttttatctaacttttttgttttgggaaaaatataaaaaaaaacatgaactttcaaatttgggataagaaaccatgaacttataaaatattattaaaatcgtaaagttttgtttgactttcaataaaatagcaaagtttccttgactatgccattttaggcatgtcgttaagttttcgtcaacaaaaaaatcacggaattaattttccgttagcattttctgttaaaagcaaacaacgtcgttttgataaaaataaaataacaattgggagcccggcaaggctttgaacccatgacctattattttcctatcatgtactcaaccattaggccacaatctcatttcaataatagtgcaaacatatctatatagcatataaactaaaaataacaaaataaccaaacatgcacaaatattaaatatacataccataaatatacgtttcgaatatcatatacttaactttacatatagcaatttcttctaaatgcaccgaattttcatctgaaaatttattatttcttcattttatcttatataaaaaactaaaacttattgaattagaaaattacctaaaatttacacaatcaatctcaaataaatataggattaatttatacatgcacatagaatggaaagtattttaaaaacttatgcacataggcaatatatttaattttctatatttcataaatttcatttttatatcatttaagaaagactaacttaaattcaatgcattaatatacaagaaatctttatatacatggaataaatatttttggtgtattaaatatttgtacaatattagttgttaatatattttagtttggttatttttaattaattgtgtatttatatgttatatatattttggtttgtcattttgttaaaatattatcgtggctctgtggtttagttgttgtaaggaagacagaagttcaatggttcgaatcaccatgggctcgtttttttttttttataaacgacgtcatttcgtttataacagaaaatgctaacggaaagttaaccctgtgattttcttgttaacggaaatttaacgacatgctcgaaatggcaaactcaacgaaacttgaccattttatcaaaagtcaaaaaagactttacgattttaattgcgttttagaaattcatatttttttcatcccaaatttaaaagttcgtgcttttttttgacattttacccgttctacattcgtaactttgcaactatccacctcatcttctcattttcttaaacttttgacactaatttaatttacttagcaactaaataagccaatttgttttttaaaaaccgcgaacgtgtatgacacgtgtcacaattaaaaaaatctttggtccaagtgcatctgtgtcgtcgttatgcttggtgcttgaagtggccattttcaagcaaaaagataagaatgttcttcaatcttcttctccttcatctaactttagagcttctcttttcatttgaagatggtagcagccatg

SEQ ID NO: 6473 - DNA, 3000 bp, Unknown
  misc_feature (1)..( 3000): cDNA_ID_1814438_gDNA_ID_1621094_Annot_ID_170900 3000 nt of promoter + ATG
aggtatctagctttggaagaaggagattctcaagtactgcttgagtacttcaagcgtatcaagaaagaaaaccctaaattcttttatgctatagacctgaacgaggaccaacgtttaagaaatctgttttgggctgatgccaagagcagagatgactatttgagtttcaatgatgttgtatcctttgatactacttatgtcaagtttaacgataagttgccactagctttatttattggggtgaaccatcactcccaacctatgttactaggctgtgcattggttgctgatgagtctatggagacttttgtgtggctgataaaaacatggctacgagcaatgggtggtcgagctcctaaagttatactcactgaccaagataaattcttgatgtctgctgtttcagagctcctaccaaacactcgtcattgctttgcgttatggcatgttttagaaaagattcctgaatatttctcacatgtgatgaaacggcacgagaatttcttactgaaattcaacaaatgcattttcagatcttggacagatgatgagtttgatatgaggtggtggaaaatggtcagccagtttggacttgagaatgatgaatggctgctatggttgcatgaacatcgccaaaagtgggtgcccacatttatgagcgatgtgtttctggcaggcatgtcgacatctcaacgttcagaaagtgtgaactctttcttcgataagtacatccataagaaaatcacgctgaaagagttcttgaggcaatacggtgtgattctgcagaataggtacgaagaggaatctgttgcagatttcgatacttgccacaagcaacctgcattgaagtccccctcgccctgggagaagcaaatggcaacaacttacacccacacaatatttaagaaatttcaagtcgaggtcttgggggttgtcgcttgccatcctagaaaggaaaaagaagatgaaaatatggcgacgtttagagttcaagactgtgaaaaagacgatgactttcttgtaacgtggagcaaaactaagtcagaactttgctgcttctgtcgtatgtttgaatacaaagggtttctttgtcggcatgctttgatgattctgcagatgtgtggtttcgccagcatcccgcctcagtatatattgaaaaggtggacaaaagatgctaagagtggagtattagctggtgaaggagcagaccagatacagacccgagttcagcgctataacgatttgtgtagtcgagccactgaattgagtgaggaaggttgtgtgtcagaagaaaactacaacatcgcattgcgcacactagtcgagaccctgaaaaattgtgttgatatgaataatgctagaaacaacatcactgagtctaatagccagcttaataatggtactcacgaagaagaaaaccaggtaatggctggggtaaaagcaacaaaaaagaagactgtatataggaaaagaaaggtatgcttttactgaagcttctcgccaatctaaacctacgtacattttcttagcttcaaaggttaaaaagaagatactcaaattgatcttatgcagggacaacaagaggctagccaaatgcttgaatctcaacagagcttgcaaccaatggtttgtgctttgatttgatcttctctaattagtttgatcattgtaactgcacattgctttatgagattaagagtaggatgtcttggatatatggccttatagttttaacattttgtgcaggaaactataagttcagaggcgatggacatgaatggttactatggtcctcaacagaacgttcaaggactggtatgctatgttagttgattaatacaaacctggttaagccattcgacatctattataaaccctaatactaaacctgtttaaactgtggatatagttaaatttaatggagccacctcatgaaggctactatgtagatcaacgaaccatccaaggcctggtaggttacatatagtttaaatgcttgaatctcccaaatctgtgctagagtataagtcaacgacatgaattttggttcttttgactcttcagggacaactgaattcgatagcaccggcgcaggatagcttcttcacgaatcagcaagccatgtctgggatggtggtacattataaaatccttcaaactgattttaaaaactgtgttatgaatgatcgtgttgttaacatcttttgtttattgtccggtccagggtcaaatcgatttcagacctcctcccaatttcacttacactttacaggtctcagctgcctggataaagtctttactttagtatcattttgtactcgaaccacacgtgttgatatcgttaaatcttttcgttattccaggaagagcatttgagttctgcccaattacctggtagttcatcaaggcagctatagtagcaacacgttttgattactttggagagaagttttgtctcaggaaacatttgcaagaagctgttccaaacatgagaaaaacacaagatctttcatggagctgagttgcaatgacaagatgtaatcttttcttaaattggtttctgtatattatgggattgccttatgatgtattaatgtgggatgaaatattgtgttatctgattgaatgtcttgagatttaatagatgcacttgtaacaacatctttatctaaacacatagaaatctatcctctgtgtattagtcaaacaagtaattttgagatcacattaaatcaaaattgttaaaacaggtttcaacttatttagtagaaacaaaaagttatttttagattaaatgtggttaatttggttaaatacacattccctggtcgttgtcgtatgtaggtgtgtcccttttgacaaaacaaacaaacagaaaaggtttctttattcagacaacatcaaaactggggaagaaccaaaactaatagagttggtcaaaagaaacatttgcaaaaaaaaaaaaagagaggcaaagatctcgagagatttcaattttca

SEQ ID NO: 6474 - DNA, 3000 bp, Unknown
  misc_feature (1)..( 3000): cDNA_ID_3090248_gDNA_ID_1621094_Annot_ID_170889 3000 nt of promoter + ATG
aacaaaaatcatttgttattcaatcattgattttgaaattctaattaaaatcatgtgttattgattcgatgatttataaatactagttaaatcatttgttattcgtttagtcatctgtttttggatttgagaatccaaatttatgttttaaatagaattgaatggatttgaaagagaaaaatagaatgattcaaatccatgagtaaacacatttcgaaatccatatatcttgatttcataattaatagagattttcaaattttatatagtttcaaattatttcaaaatccatatatcttgatttcataaccactaacaccctattcgttatattaattatttgtaataaatttaaatgtttgcatctttaactctcacacacaatacctatacttttaaaaactataatcctttaccattatttttgtcgtatttacaaattaacagttggattgagaatttttattatgattttagatttgtagttgtgaaagtaaaaatgttgttatatatatacatttctttgtctatataactatattagtgatacttttttattttcagattctgatatgacattcttgggtagcaaccaatactaattatgaaaccattatattgctccggcttgaagattgcttactctctatatatacccactacttggtatattgttttctatataggctatgattaccaggtatcacaaaatgcatacccttaaaatacttgtttgcttcatatggacaaaaacctcacacattgaaaaccatatccggcaggaaatccgaatcttaatagtacattttttgcttatttcatggcttttctggactccaacaaaatcaatattatacaccaaaatctcagtgattagaacaaatatctagtgtatataaggaataagaattctaaattcaaaaaccagaaacaaatttacatgcccaacgaatatatgaaacgaaaacttaccatcaacgttgcttttctcttcaggtaaaggaaagtccaaccaagccataggctcaagatgcatcatacacaagattaagatctttcattcccaaatgatcaaattacaaaccattaagacacattcatgtgactactgaacaaaaagagatatctaacataagttgcaagtgatatttatgagaatagcatttcacttcacgggtgctcagaaccccgtggtccttagaagaaagccatccttaaacaaatgcaaattatagtgacttatcaatgcttgtgactatacatattgttaaaactttgatttattagggcttgtcctgaacttttctttgaggaggagaggaaaaggtatttgccaaagctgatgtagcatcgatttagaataaattgatggttttaattttgagaatttagagtaagatgacatggaatcttgagagggcttaatagaaaaactgatgttgatgacttgagatgcatcagtgagcttcgtttgtttgttacgtgaaatattttgatatgattcataaatgactataaattgaaataaatagatttttcctagaaatctaaatctttggtgtatatatatatatatatatatatatatatatatatatacatatgtgtgtgcatataaataactcaaagaatttattgaatggatttttcactaatttattttaacgctaagaatgccaactttgtgcccacattgtctctcggccatgggtcgactcttatccgatggcgtgaccgttatttttggaggagttaaagatttgtttaacgactctaaatcaccatatgagatttctttttgttttgtgttctctcgcacaaaatcgacaatcacttctcgatatgtcaccatcttaaaaacattttgcttaaacacatttaacggtagagtttttctcaatacgtttaaccaaaaagataagtttactttggtaacataagtggcaaaattattttttcaagctctcctcatgcaccacatgtttcctgaaaccgagatgtttcttgtgttatatatatatatcagttttgaaaatagttttgatcaaaaaaagttcttcagttcacccataggagcaaatctctcttattcacccacttttgattagccaatcaaaatagaacaattttccatgtaatactatattttaaaataaatccaaattaaaaaatatgtcggtttgggtttataaataaggattatggttaaattttataattaccaaattatatgtcggtttggattaataaaagagtgattaggttttagattttataattaaacaaaatgatatgtcaaatttgggtttataaatgagatttaaggtttatattttacaattaaaccaaaattattaagtcagtttgagtttatatattgattggttttggaagattttacaattaaataaaattaaatgcttagggtttaagatttaaaatttaattcaatctaacattttttaatgaattaatttaatttatttagataataggtgagcgtgttttggtttagttaattagattaaataaaaacattaattggctagttaagagggttgaataagaaagggtgaacccaagaattgaaaattagaattaaaataaggtctttcatgtttttgaatttcgaaatttgtatctaatactattataagatcttgatttttttttttggggacatcttataagatctgatatataaagaatcaaagtaactaagagtaaacatttatgatttatggagttcgcttcccatatatacactgttaaagatatcaatcataatggacacaatcaaaccagattcaaatacataaatctccacacacacacacaaaaaaaagcttaaggaaatatatttaaagcctaataaataaataaatctctaaaacataaatgcattgttaatttctctcttgcagacgtatatatataaccatgtaactagcaacttcacatattgagaattcttatcaacaattaaacatctcgataatg

SEQ ID NO: 6475 - DNA, 3000 bp, Unknown; identical to SEQ ID NO: 6452
  misc_feature (1)..( 3000): cDNA_ID_1814522_gDNA_ID_1621094_Annot_ID_170858 3000 nt of promoter + ATG

SEQ ID NO: 6476 - DNA, 3000 bp, Unknown; identical to SEQ ID NO: 6451
  misc_feature (1)..( 3000): cDNA_ID_1024003_gDNA_ID_1621094_Annot_ID_170855 3000 nt of promoter + ATG

SEQ ID NO: 6477 - DNA, 3000 bp, Unknown
  misc_feature (1)..( 3000): cDNA_ID_3090297_gDNA_ID_1621094_Annot_ID_170854 3000 nt of promoter + ATG
tatcaggttaatttcgaatcctcctatgtaattgaatcgattgaattcgaatctcagatgtgtgatttctatggttttgatctgtggtgcagagtcgccggagcttcctccgcttcagagtattcagttcacaaatccgtttgtttccggtaagaaacggattattccggtggattctgttttaagtttcgttgacatgtaacttgcttcattcattcatattctgcaggtaataatgtttctgcctctcctcaatcagtcgacttagcaccggaagtttcaccaagctccgatctattctcaccggaaacagccaccctagcaccaccaccaccaccaccaccactaccagttctacaatacttctcaagcgactctctcaagatcagaaacttctggtttccatcgactatcatcatgacttttgccacttctattctcgctcgtatctgaactgttttaagctctctgtgctttttactgcttatgtttacttcattgatacttaagattttaccattgggcttgtgttaaagtcttccctatgtagaaacgcagagaatagagatgatatagtagaagaagatgtttaggtttacattgcactatcttttgcttcatatacgcaataaggaaagaaaaagttcaacacatgcatatcatcatcattatctaggaactttaatatccagggagcttgaagttcaacagagaatataaatgtgagccgagtaacataaatggactaataaacacaatgaaaacaacttaggcatcagcagtgctgatacgccatccgtactcacgggctccgtccttgtcaacaatcttgataacaaagtttggtggtgcaatgaccagccttgacctgatctcgagtatgcatttgtccaccaattcaatggcttcttcaacagacatgtcgctgcggtagtgtctgtccattgtagagagagagaagtatgagccgtatccaaatgctcccttatcaaccttgtggagggttgcaatgtagtcaatgtagtatagagatgcgccggcttctttgtcatagccagccatcaggatgttcaccgaatatggattctggaatcaaatagaacagacaacaatgggaaatctcaaaatgtcaagtgcgaatatgcagaccagtcctaaacaacccaaaaaaatccagggaatcaatcagatcatttaacaatctatagctaaggctacatgggtataaaccccactcaacactgtccaaagttggaagatctaccctaaaccggtaaaaatgatcacacatcagttagccttgagtatcagattttcaccatcaagacacagaagtcagagtaaccttggaaggtagcacaaaattcctagtcttgtaaattcttagttaatgaaataatattacttatcaagcttggcataagaaaactattaagctgtaatccgagtttcatcttttctgcatcataattctaaatttcataacttcgtccaactcaaagataatcttctgtaacatccaaggacataaaactgcaacaatgtgtagaatagtctgaaataccttgaatatttctaaaggccacactatgtctacataatgaacacattaggtaaagtttctaatggcatttagctactctgaggtaatgaatattaacaagtattagaactacctgtatcaacaatggttttacaccaccatacaagaggaagtgaaacacaaaggcttatataaacttatcaacaagtattaagcatcaaacatcttaacacaatcaaaaccatagtatgacagaggaaagcttcaaaaaaattgacatgtttaactaaagaagaaagacaagttcaactacattgcatcaaaagaggaaactaaaaaaccaagaataagcactaagcaccaatcgctgatctgatgataccccacaatctcactatttcataaaagtatatgtacctcaaagagattaaaaccctaattccccaaatctaaaataaggcagagaaacttctgaaataaaaaaataaaaaaccgtagaagaaaagttagaacctttctcaaagcagtggcaagttctccacgagtgaagttagcagcagcagcagtactcaaaggaatcccattacgaaactgatacagtgacacattcttctgaacatactccgtaaactgaaccctaaagtaaatccaaaaaaaaacagaaatcaaattcatgtactactactactgaatcacagacagagagagagacggagaagtttttttaccggtcaccaggctcaccactagcggcgacgagcttgtgagagtcaagagtcatgatcttgtcctctttgttcttgtgaagaagaatactgtgaactgctgatgtatccgccgccacgatagcgaatccattcccaactagaccaaatacacactccatcttcagatctgtttcttctcagttcctttttcgaatttttcgattccgattattcgtttcttccggtcgctggaagaatagtttaagagctttttagatcaaagcgacttggcgaacaagacgggttgatttggtagttctagaatatagtcaggggtattttagacatattaacgttatggggacatttctattttttaaagtaggagggtgtaagagagagtaataggaaaagcttaggggttaatttgtaaattaaaaaggaacctctcgttttcttctctctcccgcttcttgctgagtcgccgaccctctgagaagaataaggtctaacaatggaagtctgagatggtttcttcagtttctaattataaaagagaatttggttttaatttctctttattgtttatctcgtcctcgatttcaagagtttgatttctgtaactttgagcttccttcaaagcaaatgaaaggtgtcgtcgtgagtatactcgaattgtatttcccatggtgaataaaggataaggaagtgttgtgtcttcatttcaatagataaaacaatctaaacatg

SEQ ID NO: 6478 - DNA, 3000 bp, Unknown; identical to SEQ ID NO: 6450
  misc_feature (1)..( 3000): cDNA_ID_1814533_gDNA_ID_1621094_Annot_ID_170852 3000 nt of promoter + ATG

SEQ ID NO: 6479 - DNA, 3000 bp, Unknown
  misc_feature (1)..( 3000): cDNA_ID_2041095_gDNA_ID_1621094_Annot_ID_170848 3000 nt of promoter + ATG
ataccgaaaagttaataatgcaaccatatcgatttatttcacctaatgctatgatacacattgttttaaacatggattgattataccatcctcacaattgtacatttttgtcaaattatagttcagtgttgttataatattcaccgggatgagaaggacacaataatgccacccttataacaacgacatttctccatacctaacattgacaattcacttactatatggcaaaatgaatatgatatgaagaccctacactttatcttacatatacgtccaaattggctacatttgtccatgaatataataaaatacacaaacacaaatcttctgagaaacatgtattgcttggtaattaccattatattatcacacgatggaatcaaattttacaaagaaaaaaaatcttttatcatttttggcttttgatgaggactttacagattaattgagtttctattgttagcttcattagtgaccaaaacaagacaggttataaacttgttctcacatataactctttttgtgacatcccacctttttttatgtctcttctactcacatttttttctgtggagatcttgatgacccctcttcttgatcattatccattttttagatcttgaacgtacacttattgatgtttgttggtggaaatgtggcttgcgtgcaaaacaaaaagaaaaatatttgaacatcttgcggtttttgagactctaagattgtaatttgacaagcactttatcctcactaatacatgtaatcaaatgatataacaatttgaattataactttttatacatttaactgtgtttgtaggcatttgttttagtttaaatatctttttaaactatctattttcaatattgatatttcaattttgacgatttttgtaattaaaaaaaaattgttatttaaataggcgactttacattggaggcaatatctcttactaaattttgtgattaaaatttgttttttttttttaaaatgcagtcatcttccggaaaagatcaatcgtcctcttgaaacccctaattttctattgctgaaatctttaataatttcactaaacatcattaatatcgatgatcacatcttatccagggccaaaacaatatctatctcaccgatcctcccgttaatagttcatttgtcaacggctataatcgttcagacatagtattgaatatcagtgagatctttcactttgcaacaattttttttattagttaagaagagacattaaacaatatttgcttactcctttgttaatacatatgattaattaagaacacaaaaagctaatatgcatgattacacgggcaataatgttgttcaacatgtccctttttataaagtgagaagtgtaaatatttattttcttgaaaaagtagttacaggtgataagtttgtatatagaacaacaattgaatacatgcatgcctaacatttcttaaaacataacatgcccaacttattgctaacttcagactaataaatgagatggtgtgatacacacactatatataatatatgagagaagcttaaactactaaatacatgtaaaatgctaaaataatgttttctttatacagttgatcattttagactaaaaaatcagattacataatctaaaataaatcattgtcgaaattaaattaaacaaagatatctaagacattattcattattgaaattactgtatttaatgtggacacatttgtcgtatgttgaaatttttgatatgtcacatttgtgcctctctgcatatcaaagtctttcatatttaaatcctatcatattgccgacacttaaaatccttttttttttctttcactaaaccatattcctataaagatacaaaaatttccttaaatttcgttaaacaggtaatttttctactatttaattacaaaatgacaccaagataaaaaagagtccaaaagatatagacaaaaaaaaggtaagaaaatttatttttacaaaaaaaaggtaagaaaaattattaaaaatcgaatatttactatatgcgccaatcatactaattattctcttgtcacgcagtgtagacgaaggagagagagaagagaatgttgtgtgtctctgtggttctcctccattgatgtctgaaactgaagagtcaagtgattgaatttgtgttcttgttttttaccctttgtatatatttctttttgggtaagtaagtgcttttgatcctttagaaattctctgagataaatcgttttcgcttgatgtttcagttttcaatcgaaagttgtcatctttgtgtcgctgttgcttgcattcatcacaagtttttctcctgaatttcgataaagttacttcctttggcaattttgttgctacccattttcatatttctggttaatttcatctacaagtaagatttgtttagctttgtttgtgtatataagtttgattagttttgttcccaaagtttgacgaagaattgttatttgctgtctctattattggtggttgatgaagtgtctgtctctctatgatacattttcctgaagtctgcagttttcagtttgtaccaactcaattcttatgaaacataaagactagcttttcccttttctccctcttcttgattgtgttttgttatacattaaaaagcttactcatgtttgtatctttgtctatgccttgtttgaagatagttttgtgtgttatctctctgaagattgctgttttttttttcttgttcaggacgatccagtgtttatcattcttaaggacaccaaattgatatttagcattaagtacaaatccacagtgcaaaggtttgtttgcattgggaaagcaatttaaatctaatgtaacttccttcgttgtttagcttgattataaggtcattttgtttcagttttgtagaattcttagtttctagcatactagtagaggatcaaaggaatcaagtagtttactttggcgtagaacccgttcgttgagcttcttgcagcagctgtt

SEQ ID NO: 6480 - DNA, 3000 bp, Unknown; identical to SEQ ID NO: 6448
  misc_feature (1)..( 3000): cDNA_ID_2024980_gDNA_ID_1621094_Annot_ID_170847 3000 nt of promoter + ATG

SEQ ID NO: 6481 - DNA, 3000 bp, Unknown
  misc_feature (1)..( 3000): cDNA_ID_2041104_gDNA_ID_1621094_Annot_ID_170845 3000 nt of promoter + ATG
acattagtttcggtcagatatattagacatatactccattaataattttaaaactaaaaaaaaacataagtaaatatactcgtatgtggatacagaaacataggtacgaatgaaaccatatttccatttacgtgttagtatcgagacatatgcatggaccacataaccacttaattcctacgtattaaatgtttactaaagtggatgagctgtcaaaattatagagttaccatggtttataaatgaaatctgttaacatatcgaaacacgaaactctcggttctcggatcatgtcgccactttctgcttacaaaatttagcttcttctacttctatttctggttctttttgccaatccaatattgaaatttgtctcaatgtttcaacattatttgattgactgacgtagacactattttcgaatcttttatttctgctgcatttagatcttttgcatgtcttctgagttctggcggctaaaataactggacgtgatcagtgttataagtagtgtatattagtttattaattgcgaagtaagcgttaaggaatgaagcccaatgccctaatagatataaggcccattaccaaagtcagcaaaaccaatctgtgatgtatgagtaggactgaacacgaactacaaaatgaaatcgagaatatatttgtttggttagaaaccactgaaattgatatgtatatgcccaatgtttggattttatatgcgatgaatgggtagacgacacaaataattgattgtatgcggaaatatagcaaggtcgtttgagttttgtttttgtcccttttagatattaaactagatatgtatatgtcaatcttttatttaactagatttacttagatacagtcttgtcgtaatataggaaactcattgtatataaatacttctctttgctactcaataccatcaagctattacgacatatttcatttggggatctccaatcatattggtgttcttattgcgttttcgggttttaattggaaagcttaggggaagtcttttgagtttgtacttcaattttaatgcttaaggttgaatttgtgccgtgattttaatcctcttttataaaatagaaacactggtaacagaaacaatgggaataggaatttatgggagttgaatcctttggatgatgacatctatttgtggaagtcggaccatcatcccccgtgaaccgtgatagacttaggatcgagggacattttatctctccctcttgtgttcgttgcaacggttctaatgagttaagagagtacttgttttttattacctgttatgttgtttgaacttttttttttttgaataacaggaagttctggaccgaaactcataatctcccagacccgaaactacagccagtaatattagtttcgtcctaagcgtcactcgaaccagcaatctctaaactttgtctaggatctttaccaattgagctaacgacacttggttacccccaaaccattttatggcttgttttcactgggtctactcggctactagggatccaaatcttgatttgatcataataattgtgtttcaggcagcggtctatctcctttggaagaaatgtaactctcgtatctgcactacgaatttcaagaccccacgtcaatcatcaaagacatcaagtcgttaatgtgggcgcgtcttgatcatcttgctaaaaagcaacgtatcgctcctccatggttttctctactctccgcttggttaattttcttagattaaggggtctcttctccttttgtgtccggacttcttgagcgtttaagatttttttatagttttggttttttttttttgttgttgtttggcatatgcgtttttttggggtatatgtgcctctttcagtttgcttgaccttgtatttgtttctctttaataaaaaataaaaaataaaatagaaacactgttttgctttagaatggcgactgctcaacgtgagagttctgaagtcgtgatctttattacataagcgtgttcgatgggccggtgacttgactttttgccattctatcggataaaatagaaggcataccgtgtcctataaactagatgagcatgtttgacataaatacttttaaactataaatgcaacttcttagaattttttttaggtatggaattcaacagaactttttaaacacttattactttctactttttaagtatcacatggctacaatgaagtaaaaacatattatgttaaaaatagaattatatgtctatgactaattaatctattaatctgatttagtatagagttttaagattttttattcctagaattctagtataaaggatttctctattttcttatgtagaattgtttcatataaattatttagaatctgattaatagtaatcatagtatgaattttcaattcaataaccctgtttatttgagaaaactttatatcagtggcatttttagaacaaaaagaaacaggtttgaattattaatttcaacactaatttattgatcataatttattagctttctgccgttttttttgtcagattcatccataaaacttgttttgttcgtaataaacacaataattatattatatatgatagaacttaatatcaatgtcaatattgtgcaagtgcaacaaaaaaatatgatatgaatgattattattcttctcttttttatttgctccaatatgatatgattattttcaagactaatttattgaatatgttgaccctaaatatataaaaaaaacaaagaaatgaaaattaaacgcattaattggatctcagcaatcaactaataactaactcaagaaaatctgtagccaagtcggtcagtccacatcactattgacatccgtatccaccttacacacttaccaaatcctcaactaatttatataacaaaagtccaagaatctttcgtcttcttattttgttatttcaaattaattgttttctgtgtacttcaaattaagggagaagaagacagaatcatg

SEQ ID NO: 6482 - DNA, 3000 bp, Unknown; identical to SEQ ID NO: 6447
  misc_feature (1)..( 3000): cDNA_ID_3090071_gDNA_ID_1621094_Annot_ID_170841 3000 nt of promoter + ATG

SEQ ID NO: 6483 - DNA, 3000 bp, Unknown
  misc_feature (1)..( 3000): cDNA_ID_1814442_gDNA_ID_1621094_Annot_ID_55622 3000 nt of promoter + ATG
gatccatttcccatctggtcttctcttcacatgcatactagccttgcaatctgtttttttcacagttgaccttcgactactactaccactactctcagactcaggagtcacaccatatctggaacaagcaaacttagcatcaatgaagtctttagttttcttggaacgtctactgtttttaatcgacgtagtaaaaacccatagattttgcatattcctgataaaagatatacgctgcctcatgggtatcaaagtctataccatttcgtggctcaagatccagatcaccactaaatccaacatctccacctatattgaactcatcaacaattcctatatctctgttactatgcggttcaactacaatgtcaaccatatggtcatcccctgcatcactaaccagattctcttgcaaatccatcctaaccttagccacatatggattcactaacacactcaaaagcaactaccccactatgggcttccatgaaattggaaactgaaatctttctactagataatccaccttagcacctgaaaaatgtcacaaccaaacttcataagaaccagcgcgacatcttctacctaaaaacatcaaacttgaaacacacaaagcaatatgaaatcaatggaatcaaatgaaagtgaagaactttcaacaacataacttctaatagtagaaaagttctgtttctaaagccaaaaaagagtaaaatttcacacaaataagagaaggagacctgagaactcaaactaagagagtcagagacaacatacttctagtagtagaaaagttctggttctaaaatttcagtgaaagaactgaactttcattagtatcagcataaaagacagagactttaatgtatcttaagagaaaacctgagaattcaaatgaagagactacaaaattcaggaaatgtcaaacttttggattggtgagggctttttactgtattttctcggccacccagagagagacaaagggagggaaggcaaaattctgacgtgaaaagagcaaagcaaagaagaacacgaagcaggcgagtggggaagcaaaagcgagtgaggaaccaaggagcgtgagaggagaaaatctagggttctttttgggaatttttagggatcttggattatgtttttatttttatttttttcatttgttgtaaatctcttactagcctttactaattaaacataaaggctttttgattggtaacacgtgtaatgacataatgacgtttgttttcgacgcgattttttttcataatcgcgtctatatttacgtttggcgtgtgagaagcattgctgatttatgtattcttagaaaaattgattattttaaaagcatcagcattgtgattttttaccaaaatctctcgcctacattaataataataaaataataaacaatatttttttaattaaaacaatttctaagaaaatatgagaaagtttttaatttaaaagatttgaaaaaactattttaaaaaactcttcaaattaaatattttttttattattattactttagtaaattaaaaactttggttagaaaccaccactacacatgttctaaaagattttaattttaactgtatgataatcttcttttcatacagtttactataatttttccacatttttcaaaagagttatgtagtaaactaaatttatcataacttttaatatgatttttacatctatttttatgatttttacataactattaatatctacagttttttttttattataagttcaaataaaacaaaaaatacaagaatattaaaataaataacattaaatctatttttgtacatatgagatacatgcttattcttattatgacaaatcaagtatacttttttttttaatctttaccgtcattttttctatatatatgtgggtatctcatattctatatgtaatatgctaatcaattacatgatgttgatggctttcacatcaaaacagagctgacatttgccaccaaatataaataaaactgtagggcaaattgtacgagagttgtgctctgagtcacttgcttttagatttagttatggagttacaaatgcagggtttgcatcttatcttttaatattttttttcttttctactcacatatctttttttttatgtggagtggaagataattgtttttaattcatttaatattttttgatttaattcctttttaaacagcaaaatcttttaatatttgatttaatttggctaaattcttctaaaaatctgaaatttagacattaaataactttctaatatatatatatttaagtattactgagaactttttaatattatataaaaattatattatttaattaatactttaagctaccatattatcattaataatggttatataatttaaaaataattaaaatttgctacggaaaaaaagaaaatatcaaagaggtgaaatagacacgtaagctaaaaatccagcgttggtactaatagtaaccagtaaccactttcatttgtccgtctcgctcttttagcctgtcaacgcttttctattttgtcttttttctttcttctaaaaattctctcttttattccttcttccatttctctctctcttcttccttctccagttactttggtctccgccatggctacacagtaagctttttcttcgctattcgactctaaatttgctaactttgaattcgcttaggtcatctctaatttcacattcgttatttttcttttattttcaatttaatatattacaggagtttactttcctctttcgtcacttgactatgactgacctaccatagttagttagatagggagagatacgaagaccaagaagatattttctcagcttggtttctcttatatccttctgggtttcgcaaaactgcaagcaaaattgtctctttttacgatttgcggcggcgttagggtttcgtttagattttgtgattcgtgagtgtgttcaagctttgggaggaagcaaaaatg

SEQ ID NO: 6484 - DNA, 3000 bp, Unknown
  misc_feature (1)..( 3000): cDNA_ID_1814438_gDNA_ID_1621094_Annot_ID_55623 3000 nt of promoter + ATG
gattcctggatcagcaggattgattgcagtacaacgaacataaagaacgaaaacaataagagcctgcaaaacaaacacatgacacaagaagcaaaagggtatcagatatgcaaaactaccatgtacctacctagctcttatcaattccttatcattctctaaagcgattctagtacataccacaggagagtaaacaccgagaagaatatactcccagatgcgtcctccaacaaaaggagcgaaaaacgcatagtatgctacactcaataagcagaacaccgtaatcgcaaccacctgtttcatgaccaaacgaaacaaatgaactaaaacccaaatgttagaaattggagaaaatcagagaaaggttgaaataaaagacctgaaatttgtgagcaggaagttgccaaccatgtttcctcaccatttttgcttcctcccaaagcttgaacacactcacgaatcacaaaatctaaacgaaaccctaacgccgccgcaaatcgtaaaaagagacaattttgcttgcagttttgcgaaacccagaaggatataagagaaaccaagctgagaaaatatcttcttggtcttcgtatctctccctatctaactaactatggtaggtcagtcatagtcaagtgacgaaagaggaaagtaaactcctgtaatatattaaattgaaaataaaagaaaaataacgaatgtgaaattagagatgacctaagcgaattcaaagttagcaaatttagagtcgaatagcgaagaaaaagcttactgtgtagccatggcggagaccaaagtaactggagaaggaagaagagagagagaaatggaagaaggaataaaagagagaatttttagaagaaagaaaaaagacaaaatagaaaagcgttgacaggctaaaagagcgagacggacaaatgaaagtggttactggttactattagtaccaacgctggatttttagcttacgtgtctatttcacctctttgatattttctttttttccgtagcaaattttaattatttttaaattatataaccattattaatgataatatggtagcttaaagtattaattaaataatataatttttatataatattaaaaagttctcagtaatacttaaatatatatatattagaaagttatttaatgtctaaatttcagatttttagaagaatttagccaaattaaatcaaatattaaaagattttgctgtttaaaaaggaattaaatcaaaaaatattaaatgaattaaaaacaattatcttccactccacataaaaaaaaagatatgtgagtagaaaagaaaaaaaatattaaaagataagatgcaaaccctgcatttgtaactccataactaaatctaaaagcaagtgactcagagcacaactctcgtacaatttgccctacagttttatttatatttggtggcaaatgtcagctctgttttgatgtgaaagccatcaacatcatgtaattgattagcatattacatatagaatatgagatacccacatatatatagaaaaaatgacggtaaagattaaaaaaaaaagtatacttgatttgtcataataagaataagcatgtatctcatatgtacaaaaatagatttaatgttatttattttaatattcttgtattttttgttttatttgaacttataataaaaaaaaaactgtagatattaatagttatgtaaaaatcataaaaatagatgtaaaaatcatattaaaagttatgataaatttagtttactacataactcttttgaaaaatgtggaaaaattatagtaaactgtatgaaaagaagattatcatacagttaaaattaaaatcttttagaacatgtgtagtggtggtttctaaccaaagtttttaatttactaaagtaataataataaaaaaaatatttaatttgaagagttttttaaaatagttttttcaaatcttttaaattaaaaactttctcatattttcttagaaattgttttaattaaaaaaatattgtttattattttattattattaatgtaggcgagagattttggtaaaaaatcacaatgctgatgcttttaaaataatcaatttttctaagaatacataaatcagcaatgcttctcacacgccaaacgtaaatatagacgcgattatgaaaaaaaatcgcgtcgaaaacaaacgtcattatgtcattacacgtgttaccaatcaaaaagcctttatgtttaattagtaaaggctagtaagagatttacaacaaatgaaaaaaataaaaataaaaacataatccaagatccctaaaaattcccaaaaagaaccctagattttctcctctcacgctccttggttcctcactcgcttttgcttccccactcgcctgcttcgtgttcttctttgctttgctcttttcacgtcagaattttgccttccctccctttgtctctctctgggtggccgagaaaatacagtaaaaagccctcaccaatccaaaagtttgacatttcctgaattttgtagtctcttcatttgaattctcaggttttctcttaagatacattaaagtctctgtcttttatgctgatactaatgaaagttcagttctttcactgaaattttagaaccagaacttttctactactagaagtatgttgtctctgactctcttagtttgagttctcaggtctccttctcttatttgtgtgaaattttactcttttttggctttagaaacagaacttttctactattagaagttatgttgttgaaagttcttcactttcatttgattccattgatttcatattgctttgtgtgtttcaagtttgatgtttttaggtagaagatgtcgcgctggttcttatgaagtttggttgtgacatttttcaggtgctaaggtggattatctagtagaaagatttcagtttccaatttcatggaagcccatagtggggtagttgcttttgagtgtgttagtgaatccatatgtggctaaggttagg

SEQ ID NO: 6485 - DNA, 3000 bp, Unknown; identical to SEQ ID NO: 6472
  misc_feature (1)..( 3000): cDNA_ID_1814431_gDNA_ID_1621094_Annot_ID_55625 3000 nt of promoter + ATG

SEQ ID NO: 6486 - DNA, 3000 bp, Unknown
  misc_feature (1)..( 3000): cDNA_ID_1814641_gDNA_ID_1621095_Annot_ID_55632 3000 nt of promoter + ATG
tttcgtatgctcctaaaatctgggcaattcattagatttcgttgcgtagataaacttaagcttgatgtattctttggtacaatgtaattctgtttagttctataacttggaatcactctaagtgtaatgtatattgatgcgaagtcaaatgttgctgaatttttgctctcctgcattttccccaattttttctgagccagtattgtgaaaaattggagtctgagaaaactgaaaagtttaatggattctcatttaatcagtgttcatagattcactagttgtttgaccagggcttaggcttaatcattcttgtgacacttggttttcttttaaatctgttttgatgttcagttttctttggaagctatatacccataaacttaaaatgaataaagatggaagctttagctgatataatttgggtgtttctttctttcttccttggtgtgaagctgtttcaaaatgtctcggaggtatgatagtcgcaccacgatcttctcaccggaaggtcgtctctaccaggttgaatatgctatggaagctattggcaatgctggttctgccattggaattcttggcaaaagacggagtggtgttggttggtgagaagaaagtcacttctaaacttcttcaaacctcttcatccatggagaaaatgtacaagatcgatgaccatgtggcttgtgcagttgctggtataatgtctgatgccaacattctgattaacactgctcgagttcaagctcagcgttacacctttatgtaccaagagccaatgcccgtttagcagctggttcagtctctttgtgacaccaagcaaggatacacccagtttggtggtctccgcccgtttggagtttcctttctttttgcaggctgggacaggaaccacgggtttcagctgtatatgagtgacccaagtggaaactatggtggatggcaagctgcagctgttggagcaaataatcaagcggctcagtctattcttaagcaagactataaggatgatgcaacgagggaagaagtggttcagctcgctatcaaggttttgagcaagacgatgacagcacgacttgacagctgaaaaactcgagcttgctgagttgtatctgactccttcaaaatgtgttaagtaccatgttcactcgcctgactcgctcactaagctcttggttaagcatggtgtgactcaaccagccgcagaaacttcctaagctagaaactggtgacagttttacctgacccgcctggttactgtagatgtccatttgctttctttccctttggagatatcgtatcagaatcaatttaccactctgattatgtcatgtgattcatttgggttgactatcttttatcttgagattgatcttcttctagtctaaagtaaagttagactttagaggttttattcaataaatgaatgagcaatcaccaacgggcccattagaaagcccataacattcattgattgaggtaacgggttttaatggctcaaattaacgaagaatcagaatctctttaagtttcaccacgtcgatttacggtcaagagtgtctgtttattaacagaacagtaaaaatgttaccgctcaaagcgtatatcttgagcgccaaatggaatttcattggtacaatgcccagaagttctgggccagaactggcctcattgtaagagattttttaggagatttatgcagatctggaaaaacaagtttttctctcttggattatctacaaaatattatttacttaagtagttgtcagttagacaatgccctgaatccaaggaattgtatcgaccgggattgaagagaccattcttgcatcgtctcttctttttgcagcatcgcgattgtatgaaacattgatggccagatctttcttctataagtcaatcaaccggccaccggaattaccctaaaaacatagaaaatatgttgaaatatattgagatattagtcatcgactatgactaagtgtcacaaacttttgtgtgataggattcaatcaatccaatggatcttagtaagaatattttacattctataccagtctagttcacatattttctaccacaaattgttaattcctcacaccttttaaattcattttctagtttgcagtttttttttaagtgtcactttaccagattacctcaaacttaaaaattatcaaattattatcaaaatatacaaatttactaattataaaacaagtatatatctaatatcttatcttaaaaggtaaatatataaatattttctaccttttgtcatgtaatacaatttttttcctatttattaggtatcagaatctcaattaattaaattcagaaaaagtgtgagaaaataatttccagtaagcaaaaaaaaaaagtattaacacgacggcttcttctttcagcaaaaaaaaaaaaacataaacggagaaagagagagagaacgatacagaagagaagccaaggtcgcagagagaaacaatacacacggcgacagatatatttcccggcgaaacgggaacaataatatatacagagagagagagagatttagtgagagagctttctagggttttcttcttctcgatttatcttcctttgacctcgatctattcctcttccttctccataaattttcccttcttctcaccttcattcatatctctcctagctccattctagggttcttgatccgtttctctaccttttcgttttcttcctccgggtataatttcttcttcaattcgtttgttttcgcgtctcttcgtctcttctaatttcatcaatttgggtcttgtagggttttgagattttctccttcgtcgggtgaagaaaaccctacattttgttttgtcactgattgtgttttcggtgtttcaggttgtttaatttactccggcgggtgaccaaattggcggtggcaaagtatgagtattgatttccctgggaaaggggagagttagggaagtttgggctagagagaaattggattgggtttcc

SEQ ID NO: 6487 - DNA, 3000 bp, Unknown
  misc_feature (1)..( 3000): cDNA_ID_3100843_gDNA_ID_1621095_Annot_ID_55635 3000 nt of promoter + ATG
ctttcttattttcctgagtaaacggaggttatcagcttcgatttgtttgacgagcttttcaatcaacaaccgtctctcagcatcctcaagtttagtaacatcaataatatctgacgagtcatctcctgtgtgtaacaaagcagtagtaacccttttaaaagttggtaatctctcaactgttgcccactgcgaccgaagcttctcctcatcatcaacaccatttccacaagcaaactcaacttggaaggactttgccttgtcaacatcttcacctgtttgagccattgtcaggtaaaagcagccaaagaaactaataacaacaaggagaagcaagcaaaactccacatgaatgaagaagctaatgaagtcagagttttatatatataacttgaacaaaacttacgcatacactaatatcacgcgagctccacgtgatcataaccatagaatccggtcttgtacagagagaaaaactgaacaaaagaacgaataaactagtgaaaaatcaggtaagcgttgaaaaaactggtgattcattaaagtaagtaaataaaatcaacgaagagatcttttagacaatagtcaactcactaaacaatgtcagaactgatttcacaatgtgcgaacggattcatactgacacacaacttattggctttctgtgaggcattccatcgaacactttatgtgcgttttatctgtttcggtagacgaatttgttcctgagatttgtgaatctgatcgaatcgaagctgcagtgaggtagacgaatgaataaacaatgcatgggtgagaaatcacatggataatttcttcaagatcacgtactctggaagatgagatatcacaaaatacttgatgcatgtcagagattaatgagattagcttgcattacaatttacagaggaagaatcatatgcaatcgaatcgttggcgcgcgtttacagtgttattcgctgacgccgacactgtgagaattgatgacgcgacaacagtttcaaaatagtttttggcttttataatattataaacagtccaatcagatgagtttaatcgtatttttttctatcacaagtgtgttttattaatattatagagccaaaattaacaggccaataattcacaaaaactgaaataaacaagcccaaaaaaaaaaaaaaattcccaaaagctcaaatgaataaaccctaaactgaaggaagagaacaagtgattgttgtgcgccgcatagaaaacacgtgtcagtggaaaacattttgaaggacacgtaggaactggaagagaagggagtcgccgtcagaagcttcaattccggctgaaacaccggaaaacttgttcaactggcatagctcactcgtcgcccaaaggattaatggcgaaatttcagttgtaccttggatgagaatttgactccacgaagtgctattcttcttcttcttctttttctttttcttcctcttcttcttcaatcaacatctttttaacttgggttcatcaatctttaaactacaggcagaagataaaaaaaacaaaacaaatctaaatccggtcaagaaaccggagagaaagccggccaaagacgccggagaaaagcccggcgaaacaaaaaagaggatatcttgctctcgggagataagccagccaccaccgctgaaagtagccggtcgatgccggaagctgagccaaccaacgcttctaaggaagccagcgatgccagagtagaagccgaccaaacactgctgataaagccagtcattgccggccagaaaagctgaaactggtttgctctctctgaaagatgaggagagagaagagagagaaaacatgtagatcaacaaatctatgtcgagtttaatcgtattttaatgttaaaaaaaacgtattgtgtgatgttatttacaattccccggtaagttttatatatatatatataattactcaaattaacttgaagtataagtcaactattctgaaaaattcagatttaacacaaaccgaattattatccagattttgatttatctttaactcgtggaaattttaaaacagattatttggcacgaaatattgaaccaaacacatattattatatttgcaaacaatatttctcaacattggcttatttgagtcaatctaataaaattgtcgacaaaaaaaacacaccctcacgaacctaatccaacggaagcccattcaatttcaaagataacaaggaggtaaagttcactattttttctgaaagtcactctacctacatcttttttctttctttgtaatttgtttgacacattatcaataagatcactctttcactttgttgttttctcttgattcccttttgttcagtcttcatttagctcaacttagtaacttacagattttggactccagtttattttcacgatttataaaatccatcacaccaaatttttgacatccacataatccacctactataatattcaagttgtaagacatcaacactaaggtaaattttgacattgagcttacttattaaggtaacaagatttgaatggtgaatacagacatgaacaaatatcatttgcatttactccacgtgcttaaaaacaacacatggagaaacaaaaagaaggccggcgagtggcgacaacacaatcagtgtcggaaatcaaaatcggtgaacctcaattatagaaaaaggtatcattccaaagaatctcaggaaatgacgaaagaggacaaggaagacgccaaaaacagagggcaataaagtcattatacaatcctcaaatggaccgctgaaaacagagcaccagtcgttttagatcagtacacaaaaatcacaaccactcgcataatatcatctacttctatataaagagctcgtgagctttctttaagagagacatgtgagcttcatctactactcatattgcttatattttcctacaacactctctcaacaaaaaaacaaaaaaaaaagacgttctttctttgtttgtatttagaagaaaaatg

SEQ ID NO: 6488 - DNA, 3000 bp, Unknown
  misc_feature (1)..( 3000): cDNA_ID_1814625_gDNA_ID_1621095_Annot_ID_55637 3000 nt of promoter + ATG
catggaaatgagaaaaatgtaatgttttccgcagaaaatcccaaaatggtggatatggatgtactacctgagccctacatcgtgggtgttggaaggattactgagttcgcagtatggagatgtcgagaaagagataacagtatttggagagaagaagagtgtttcagctttcttggaggattacttcggctacaaacatgactccttggctgttgtagcgtttgtcctcattgcttttcctatcatcgttgcttctctttttgccttcttcatgagcaaactcaattttcaaaagaaatagttctttttatttttgtcagttaggcttttctttctcttatgatatcatcataaacgttttacattttctctatctggtctcaaaaatgggcaattgtgaagcacacaaagaacaagttttgagaattgattccagcagcaaaagatgatcttttattacatataacaacataactagaaaattcttgagaggtggcttggttttgttgtttattcaaaatgcggtatggaccataccgtatggtctaaaatgttcgacgtaacgattccaacggaattggctcgagaaagcaacccctatttgtttattgattacttggcctgtgttattcagttgcaccatgcctataaggacggacttgtctaacttttttttttttttttaattttattttgtaaagttgaatctttttatttttctaatgtggtttccaataatgaaaatgcatcaagacggatgaaatttagtatgatgacttgatgatgagattaccaaattttaggtaatttgtcatcggaaaaacgtgttttcttttctcaaaagaattttaaatttgtgtgttgctctcccaaaaaaataaaacattccttacactgttacacataccaaataggcaaataaaaccgaactctgctgtgtaagatttggttttaaccaaaaaaacaacaaagaaaaaactatttcttggtggaatttgaagattccattggttaaatgatctactaactatcctcatccatattttactaataaagtaataatcatgttaatttatgaaagaactaaaaattgtcactgtttggaggattaaactcctctgacatgtttttaaaaaactatatacacacagttatttgaaagttaagttttgttgcgtcaccacttctcatattgtaaacgcgtttgcaagctaaggttttttgattaaacaaaaccttatctcattaaattctgacaacgaatcaaatattcaatcttcgtgctgatgttgaagataatatcacgtctctctcactgcagattcgatctcagggaaatataatacttttacagagttacgtggtcaaagtgttcgacgaaatgcctcacagaaagccaataagttgcgttcaagtatgaatactcttgcagatagtgggatcattgtcaataagctgattttcgaaaagatttcgtcttgataacattttgtcaacgcttaccagatttgtattagtttattcgatctttttctcccggattctatggatatgatcacgtgaagcatgggagatgataatgtatgcgtaatgtttgttaaagttattataattacaaacattcttccttcaatagttcttcattcatttgacgtttgcttcttcttgttcttgttaagtttgttttttgttgttgagttccgttggcattttaactgaaaatgatccaaacaggtgaagaagatgaagaaaaggcaacgtcccttgaagttgagtttgcttctggaaatggtgttgatgatgaggaagagcttcggttgcagtgggcaacagttgagagattaccaacttttaaaagggttactactgctttgttggcaagagatgaagtgtcagggaaagggcgagtcattgatgttactagacttgagggtgctgagagacgcttgttgattgaaatgctcgttaaacaaatcgaggatgataatctccgtttactcagaaaaataaggaagagaattgacaagtaagtcactgcacgactctactgtgtttttttatgtcaagtagagcaacatttgttttgtaaattgtatgtgcatgttagcaactattgaaccttcatgtaattgtagagttggtatagagttgccaacggtggaagtgaggttcaataacctttctgttgaggcggaatgccaagtaattcatggaaagcctatcccaactctttggaatactatcaagggcttactatctgtaagtactcaaatttatttgctgcatcgatctgaatatggagcgcttttctgctctcaatgttctttattcatgtttttctgctttccatgttacaggagttcatttgttctaagaaagaaaccaagataggcatcttgaaaggagtgagtggaatcgtaaggcctggaaggtaaagtattcaagaggttattctctagtccctttagttgcacggaagaagaaatgaagggtgactggttattttgtgcatgtagtgtttttttataggttttcattacagagttcaaaagaggtgttggttttcttgcagaatgacgttgttgctcggtcctcctggttgcggtaaaactactctgttacaagcactttctggaaaattttccgattctgtaaaggtttgactaacagagtaaaaacataagcctgttgaactaatataaaataatatattggagatcattaaggttgtcttcactttacaggttggaggagaagtatgttacaatggttgctcactctcagagtttattccggagaaaacgtcgagttatataagtcaaaacgatctgcatattcctgagctgagtgtaagagagacacttgacttctctgcgtgttgtcagggcatcggaagccgtatgggtgaggatcagatttctgaaagtttgaactgaaggatacttttgtgtgtttgaactcagttcacattaacaagcaatggtttattaaacagaaatt

SEQ ID NO: 6489 - DNA, 3000 bp, Unknown
  misc_feature (1)..( 3000): cDNA_ID_1814614_gDNA_ID_1621095_Annot_ID_55640 3000 nt of promoter + ATG
aatcgtctaattcctggagcagggtatcagaaaatggagagaccaaacttgtgacagaaggttctaaagttgaagaccagatcttgccgaaatctgatggagaaggacaatcagagtaagggttcagactctgaagtctgtgtcctaaaccagtgcagttactagcggtccactgacatccttggcaaagagaaacattttcgttcatacagtgtactgccgtgggttgtaaggaacatttctcgcagagtagagatcgcgtgtgtctttgagacagaggattcgctgagtgtacattaacgtcacagtttaaacaaagtttagccgaatcagatttgcagtagattaatgctttttcggttccacaaaagtcacatcgagcctccatacttcttcgaagacaaaactccaaagaaataacgatttctcaatcccaatcgctacacacacctaaaatcctatagcatagaaggatcgtgagacaaaaacagaacattcagagatcaaacaaaattacgattcattataggttcatgtatctttttaatgtgtgactgtgactgtgactaatacatggttgtgtttgaatgttagagaaacactcacaaactaagaaaatgtggattctcgagaccgaatcagtactaaaatcacaatgtctagaaactcataaccagttaattacagagttttttctaaacaagagtataacaataatcgtgtaaaattgtttatgtttcagggttccagagattagaagctttacaagggtgtgtgagagtccagtgagaaggagatgagaaagaacagagaagaaaaggttttgctctgtttttatcctgtgtggggtccaccttgttaagcgggtttgccacgcggggtatcttttgtcacgtgtggttttattgttccttagattttgttgatgtcataatgtggttgaccatacaattcggagtttttgtttgattctttaggtactttctgtggctcgcaagaatttcgagaattgttaataaaaaaacgtgtaaatgtcattaattttgaacacgtttttcttgttattcaaaacatccgagtaataagactagttcgaagcaatttattccgagtgttggtttaatggatctaggagtttgcagcatactagtccggtttcattaacctgtggttatggatagttattgtatctatttctcactaattttactaagtgtgttttcacaacttaaaatatgagatgttagaagcacttaaatgattgaaattctagtgagcgatcatgttttaagagagaaaactttgtgacaacgattgatattcgtttacgattttttaccagcctcagtaaaaaggctaaatgtactatttttgaaacatctcccaatgcattccatgccaaaaaaggctaaatgtacttgtaaacaattcaacagacagtaactgctggcattagctgaaaaggtcgctcatggcatgaccagtctggttgtcattgtttgtttgccaaaagatttcattagatgtccaaaaagcagctcattcgaccaaacaattgtttcctgataagtcaattgttttgttaatcaattctataggaacgctaaatccattattcgtccaaaaatcagctcatagttttcaattgttttgttaaccacttattttgcaaaagtagtgaagaaaacataacatttaaacacaccaattgttttcataaagcccttccaccaactgaaaatcaaagaataactagctaatctcttccggtattaaaaaagaggaaaaacaaaaccaattgatataatgtgcgaggcatttccaggatcaaaaggcatggaaaaaagcaaaaagatcaggatataccacaaccaatatagcgtcacaagccattatacctgaaggaactgtttttatccttcagaattggtaatggacgccaatacaaaaacaaaaaacactaaaactctttcttcaatagggcaaaatttttgataaaaaatgctcagtggaaggagaagtcgttttaaaggagagctcacggtaaacccactgctcttctcacactcttcgtgctttcatctcatcattgcatcatcatcatcaaacccataacagtaatccaacaaaacaaaacaaaaaacattgaaagaacaaataagcttcagtgtgtgtaacaaattcagttcattgattcaaaaacctcactgaaatccgctaagataattgtttttatcatcatcagctttataacccaaaacaagtacatacaaacatcaatcaaacctattaacaataatccaactaaacaaaagccaaacattaaaaaaaaaaaaaagcctcagtgtgtgtaacaaattcagatcattgattgaaaaacctcactgaaatccgctaagataattgttttctatcatcataagcttataagtggaaaaacatcaaccaacaaaaaaaaacaataacagagaaatttgtcttcaaaccaatcaaaagataagattttgggtgaaaggggaattaatactcagacagccaagggttaatcttcaacttctgggagaagaatcccagatctgaaactctagtccacaatactcttgtatcatcaccatattcaaccccttccacatcccataaaactaagacatcacaaatctctttcacaaaaaccttaaatatcaccaatttcaacatatatacacaaacgaaaatagtcacagacctaaccctaaaatcacctaacatatcattcagacatgaaaagaaagagagttcctatgatttgcattagacgaaaccttataaatacacagacacagcagacaattagggtttacttcggtcggcggctaccatatctattttaggttctcggcccaattatactaaatgggccagctttcgtgacccaacaaacaacttacatttattttactttattaacacattcactttacaaacccaatcaacgaaaagtccaaaaacgtaaaaacagaa

SEQ ID NO: 6490 - DNA, 3000 bp, Unknown
  misc_feature (1)..( 3000): cDNA_ID_3090357_gDNA_ID_1621095_Annot_ID_55644 3000 nt of promoter + ATG
tcatagatgacttggtggaatcaaacacataattgagcaaatgatatggacattaaactgaaagttagtctgtctaatggtacaactcgggttctccgattaaaattttgtcattaaaagtttgtgttgtatacttgtatgatttaaaagtttaaaagtttgaatggtacaaaacttgattttgtcataaacttgtatgatttaaaagtttaatggtacaaatgatatggacatttaaaagtttgtgttgtatacttgtatgatttaaaaaataataataataataataataataatatatatatatatatctacttgtatgatttgtatagatgtggctgtctattttttctccaccgttaactcatgtaatatatataaaaaacaaatttatacttttttgtgaaggtcttttttaaataataaaaacaaatttgggtagggaggtctatttaaaataatatggtcgcaatatttaacaatttttaaattgccaatagcttagagtcgcgtaataatagaaccaaactatgcaactatcattcctaccaaaaaaaaaaaaactatgcaactatcattagaaatatgtatctaataacgtgcatgttcgcattgcacgtcgtccttctttctccgacttttcctattttttttaatattattttatcaaatgtatctagcttagatacttttgatggagatgctccaatgataaaaaatagttgatccgttagccacgctagtaacatagtagttctgcataccattttctcttcattctcaattgcgtctgtttaaaatcaatgattgtgattttctaactttttcatattctattggatgggtctccaggtcaaggcgtcaagccagataatccagtggttagcagacttttcggaggagttcccgcaaatttttttcttttctttgaatttaatgtatatgcaaacttttttttagcataattataaatttttatatcctggatgttatctcgatatgaacaacacttggagtcctcccacaagcttctctacattcccttgccttagagtactcaattttgaccatagaaacgctgcacatcttgttgtattgttcccgcaaatcttttttgataaaggattcaggctaaatccctaagtccaaatagccacgtgattcctcaaccctaaatgtcaagacttgcacataataagtttgaaccatataaaaaataaaacgcctaagcctaaaccccatctaacaaaacttgcttacaccatgtgtttgatgtaagaatgatatccctctttccaacaatcttgcttcttccctgatttgccataattcaccactaatttggtaagttgtgaagaaacttccatgaggggtaacatgaaaagaatcaccagatctacaatccatgagctatcgtcagcgacaatgttgcaaatattactttgttcaatgagatatacatctacatcttcatctgccacggcagtggtggtcttttcatgttgttgactaaaaatgataccaaaggctcacaggcacatgttaataccattataccacaatttactatctagatattaaagacataaatggtaaataagttatagataaattttcctatatggaacggaaatgccttctgtttaattttctggatggtgaaaaacaatggagcaattcttcttatttaccaagattatgcgagtgggaaaaagttctaacctcatagatgatatcgaagaagtgtgtcggtctaatctgtaggtcgagacgtggaggctatccccagttaaaggaatctgtaccaaactgaaacatcttctactcagtcaaatcccaatcctcatctcctacttatttcacaaacgcaaaaaaaaacagcccattgtatagatcgtgagttcttactattgaaggttacgaattgatggaatcggcttcttgttgcgattgaacggtagccatcttggtacgacatcatcgtaagaagccttgattttaattccctaaccagaaaccaatatgagaattctaaaacggtcgtgaaagtaaggaaaaacgaccaaaatcaatcccaactattttcatgtggcttttctcaatccctatgactttttgaattaatcaattcgaactcacacaatttttaaatagcaaacttgaactatatgaccgttaaccagtttcaacatagaactcgactttgtgatcgacgtgcgcatcaacaattaaaatttgatttgctcaagcatatatgaaaatgttttggcaagaatcaatagtgtaattaatcgttttcgtttatgtttacgtcatgtttgtttaaacttttatttcatgtatgttttaaattttataagttgtaataattattaaggttttcaaaattaaagtttttgtatttttaaatattttttttttattaaaactccaagttaagatctcacaattacatattgctaaaagtttaatcttttaaccaaattcttattcaaaactaagctaagattaacctaagatactaccgataataatgttcttagtcttgttttagtcttcttttagttggttcatattttatttttaattaaatttaagtaaatgactaaattatatagaaaaaaatcattgatattttaatgttatatctatgaagggttctaaaccaatgtatatgctctcacgtgtttatatctagttgtttgtaaaatactgcggcgatagtattgactgagttgacatcataaatttataactgttttacaacttgcttcaattagttgcctcttttaaacataaagacaactgtatttttcttaaataaataattacccatatatgaaatattttagagagaacacccctaagactaacacacatattcactagtataaatagaatgccttcttcgtagaaccatgtataccccttaaacacacaacttcaaagttgttgaaaaaaattaaaatggtagaatttcatgagttattgactgtgatg

SEQ ID NO: 6491 - DNA, 3000 bp, Unknown
  misc_feature (1)..( 3000): cDNA_ID_2041178_gDNA_ID_1621095_Annot_ID_170965 3000 nt of promoter + ATG
tatccatggttttagggttgtaactttaaatcgtacttgatattttcatatatgcagatattgattaacgcggtaatgcgcacatggtagttgtgatcgagtgattggtgagactttgaaatatatgctaaaacgcttcttccagaatttgaggattaggcacattgtcaaacctcgtgaaattgcttgtatgttcatacagttgtattaacatctactattagagagggacacctcgttcagaaatcattcttctaaaataattgatatcgaggaagagaatatgaagacatatgaacgactactcgatgtttacaatcctctattgttagatggtgcaagttatggatattggaaagtgagaacaaagaacaacatttgtggcacccctgaagacgcttggacggctgttgagtgtggttggaaataactgtatgtgacatttgaagatagagaagtaatagtgaaaccaaggacaaggtggattgcaactgaggctgtcaaagtttaattcaaaggcgttgaatgaaatttctaaatcggtgaatcaaagagaattcaaacttataccagggtgtagataagataaagaggcatgtgatatactgcaaaacgtctttgagagaaaaaatagtttgcaaaaaaggttgaaagtaataatgaggttactacttaccatatatggattggtgtgcttgcacttatttgattaaatcaattttggtccaactcttgcaagtgaactttttttttgtttttgacaaataaaagttggctagccaaagcttttccctcttcaccaaaaaaaaaaagtttttctttgctcgcagccccttaaatctgagaaccggttctggctctaatcattggtccaacgaaaacatgcacttgagtctcttcctcagcctagctaaagtgctcatgatgtccttttcatgcatgtgctaattttttttgttttttaaggtttagttgtgtgctagcttaagctgaaaaaaaaaaaactatttgagttaaaagaaagctatggttatgcaatattagaattgatgaaatggagtcttggaaatatatttaaaaaaattgacatgtacaataatcaaatgtgggaacctaatcaaatattgtaagagagtggtcctatatgctaccgcttcctcatggtcaaagccaggtctatatatataactccaagccaccgcttccctagtttctgcttaaattcaggtttgatgaaacctcggggctcagtatgcatgtcaacgtggaacttgggaaagtgaaaagatatgaggtaagacatgtaacaaattctcggatgttttcatccttttgccattaaattgaacaatgtctcgttcatgctcaaggaggctcaattaatgaactgaactaacctagagccacgtgttttccttctgccttttctgattcaaaaagttgactgaggataatgacatacgggtagttaattatagtgtatcacacatcttataagttgtaatattgtctacttcaaacattagctagccaccaagtataaaccaggaagtttctagggatgtatttaatttggctcgatgggctttgtgtcaaaaaaaatccagtcgctattaagtatgagatatctcgaccgttctagtcgaattcgtctattatgtataagtttgccatatacggccgacaacttgagattttgctcatggatattaaagatactttataaaataaagttattgataaataaaaaaaatcaaactaaaatggagtggagaattcacaagagaattcaaggacaggaaatatttatgttgataagtggatggaaattaggataagcattggtcatcggtaaaatttgtaaatgacggtttattggtaattaactacgtcatatcagcggagggattattttcagaaaaattaaaccttaaaatgatattccagtaggtttcatttcttgcattacatcttgaagatcagtgtatccaaatctttattgaggaaacaaaaattttagtgcaggatttaaaccaaaacactagggtttatggaagcaaaggcgagcaactctgggttctgctcaaaggacgacatgttctcttcaggcaatgtgacgaacgcttaaattccttgtccgtccttggaatctatcaacatggtcaagtagcttaacactggggcaacatttccggcaacccaaacggagaaccccatccacagctggtctcgtaaagatcaggtagcttgcaccagctactcacagtattgggttcgtgagtttcatagctcaaccgaggtagcttgcaccagtttaaaactttaaataagtacttgtaactttagttaatctcaacttaatggaattgttggagtttgaaatggccgacttatttggaaacgcaagaagttaacaaacaaatgtcaaacataccatataccgtacaaactctatcaagattataaccacatcaatgatcaagtaaatcaacaagaatttcgaaaaaaatgttttttttttttttcatttgttgttcatgtggcaaaatgcaaaagctaacaattctaaaatcaagcatagatcagacttgaatactcttgacaattttcctttataaaatgaagttgttttcaagttgtgaacgtaaaatgatttaggcaagaagaaattggaaggggaaaagaataaaaaagaaaaatgtaagtccaaaagggccaagattaggagttttcaacaaatatatattttaagtaatttttccacaaaatataattctaattggcaatatatgtaaatacaaatacaaaatcaggtttaaaggtcattttcaaaattttatatgctattttattaagcttgattttggttaagctgttatagtcattctcataaatttatgtgctattgtaagtagtttccgtagcttttatgtaacacatacataattgactttagattagcatcccatttctcatcttcctctttctctttgagcaatt

SEQ ID NO: 6492 - DNA, 3000 bp, Unknown
  misc_feature (1)..( 3000): cDNA_ID_3090349_gDNA_ID_1621095_Annot_ID_170955 3000 nt of promoter + ATG
tgtcttctagagagacaatttttttaacagtatgaacattgtcctctaaaacgattattgaattagtttattaatattgagggaaaaaatccaaattgaaaaatttgtagaacaaacctaaatcagggtcaaattgtgaaacgaaattttgaattgataaataagtgtattcttgttttggaagagcagtaataaatggttagatagaagggtatatgtacaaaataatttttgacttgtaaataatgaacaaagtaactttgatccaatagtactcatttgctacagaattttcggcaacttttggtttatactatatattgtgggtgattggttagactgtaactgtaaattttttgctgtagaattttagctgtaagtgtgtaagctgtagctgtagaattttggcggtaactttttggctctgtagattacaaaaatatataattttggtggtaaatttattagttgtaattaaaaattatgattaataaatatttgaaattttgtatatataaattttattttcttaaattgtaaaattatatattatagttaataaaattatttaataacaatgtaaattgtattatgcacatatatgtaaacagcaatctatataaatatagaaatcatttctaaatgtataaaatattttatatggtattcatataataactaaatattagtttaaaattatttatacatataagattttttcgttcaaaatatatatacatctatgtctatatattaagactagtgaataaatatatatgtatatatataagaaaataatagtgacaatataaaaactagacgagagaatcaaaaaaaaaaagaaaaacctacagcacaaaataataggatgtagaaattaaaagatttacagtcaaaacaaaaatagtttttttttttgggctgtaagttagaaaaaaaccctacaacatgattggtaaaaatttagtttttacaaaaatattgtggctgtaagtaccaattacagcccaaccaatcaacaccattatccttttactttatttttctttttttttgtttttttctttacgagatttcagccatgaaactctctttctctcttcattttttagaactcaaaatcagattcaccatctcattttctttttctttctccttctcttttcccctcctagaatctcttcaggtgaatcttgtcgttctagctggatatttggtggctctaaaacggccgagttgtagtcacggaggaggtggttcgggtcaatttggcagaggcttgtgggtgtattttggttgttatattgttccttccgtttctaaaagggttttttgcatgaaaaatattgcatctcattgtcactctctctaaagctgcctttttgacagttttatttgttgtttgcaatgtgggaaaatagtatgtaacgatagggccgaccctaggctaatgtttgttcactgtccattggtagttatttccttgtaccaaaagcaacccgagtacaaaccaataagatgtgtttgttgtacatattagtccttttctagtccttgtttcatttttttctttcctctcgccttgtacatgtcaattttctttgttaagtttatttttcttttgattcactaatttgtgtcttttcaatatatgaatctaacttaaagctataaattaaaggtttaactaaactaaaaggaaaaggaaatatgcatatttccaaaaactttgaaacattatgattaaccatccaccctcgttggtcgtctatgccgtctgaagaaagcccataaccaaacctaaataataaattcatgtataccctaattacctaattttaattacaaaagctacaaaaataaaaaaataattattattattattacaaaagttaaccaatatacccatctagttataatgagaacctaaccaatctaaccgcctaatcttagatccacctaactaaattaactactttaattaaaaatcataaaacttagtaatacatattagagtccaaaaaccataaaactttcacttttccactctaggctaaatcaattatgacttacttatatttatccgttaataatccatatatgttagatttataagttcaaatctacatcatatcaagaaatagtttggtactgaaatggcatttgtatacaacatccttataaattattttatatttttttaacatatacaacacttaattgtgttgctaatttgcatgaaaattaatgacattctttacttattttatgcatttttctattttcaagaaactgatgaatttatcaacagatttacctattccattgctaatgtcgctaaattaacacaaccaagatatcgtacatgttagaaatactcaagagtacaaatacataagactattttggtatcgtcgttaatagtttgctcaaagttaagtgtaaacgtgaatggtatattcaatattgtatgtgtcgatatcccctcaggtttattaaagatggaaatatttattagaagaacatttttatttgattagaccctccaataccgtagtccacatcttataaatcggaataatttagaaattgtgcatgttttatgttttaattcttaaaatcgattacatgattataaaaaacgatcgagactctaaataatgtatatcataaacaaaacgatataaacacactaagttaatattctaaattctttcttttcagtttattatatcatttgggttgtcaacagattattacatgtacctttaatgagataaaaattttaagaagttaagaaatttttttagtaataagatattgcatatatagttgaaagactatttaaaacatatgtgattttaaagtcaattaaaatgtagcccaatctacatcaatccaaattatatattgatgtgtatatataaaaacttcagaagcatatagcattacacacacacacattcatataaaaaaaacaggaagaaagctcctccaatg

SEQ ID NO: 6493 - DNA, 3000 bp, Unknown
  misc_feature (1)..( 3000): cDNA_ID_3090353_gDNA_ID_1621095_Annot_ID_170954 3000 nt of promoter + ATG
tgttagatggggtttaggcttaggcgttttattttttatatggttcaaacttattatgtgcaagtcttgacatttagggttgaggaatcacgtggctatttggacttagggatttagcctgaatcctttatcaaaaaagatttgcgggaacaatacaacaagatgtgcagcgtttctatggtcaaaattgagtactctaaggcaagggaatgtagagaagcttgtgggaggactccaagtgttgttcatatcgagataacatccaggatataaaaatttataattatgctaaaaaaaagtttgcatatacattaaattcaaagaaaagaaaaaaatttgcgggaactcctccgaaaagtctgctaaccactggattatctggcttgacgccttgacctggagacccatccaatagaatatgaaaaagttagaaaatcacaatcattgattttaaacagacgcaattgagaatgaagagaaaatggtatgcagaactactatgttactagcgtggctaacggatcaactattttttatcattggagcatctccatcaaaagtatctaagctagatacatttgataaaataatattaaaaaaaataggaaaagtcggagaaagaaggacgacgtgcaatgcgaacatgcacgttattagatacatatttctaatgatagttgcatagtttttttttttttggtaggaatgatagttgcatagtttggttctattattacgcgactctaagctattggcaatttaaaaattgttaaatattgcgaccatattattttaaatagacctccctacccaaatttgtttttattatttaaaaaagaccttcacaaaaaagtataaatttgttttttatatatattacatgagttaacggtggagaaaaaatagacagccacatctatacaaatcatacaagtagatatatatatatatattattattattattattattattattttttaaatcatacaagtatacaacacaaacttttaaatgtccatatcatttgtaccattaaacttttaaatcatacaagtttatgacaaaatcaagttttgtaccattcaaacttttaaacttttaaatcatacaagtatacaacacaaacttttaatgacaaaattttaatcggagaacccgagttgtaccattagacagactaactttcagtttaatgtccatatcatttgctcaattatgtgtttgattccaccaagtcatctatgattgatttacctctaaactctagatagcaaagtgtggtattcactttttaccgtgagtctgtgatatcatcttttgtcaacaaaatgcagcggcccggatattttattcgagatggacttgcgcaaaactcttgccaatagacgtcacgtgctcacccccaaattattcggtttcacgtggacactggagccattataaagttggaaaatctcattcaataattttaagtgacgccaccaggaccggtcatgaatgatgaaataatcggaaatccatacggaaaagtagaaacttattttttatagttatgaaaaggtctatgagatagttaacaaaaaaaaaaaggtgttgagataacttcttcaaacgtgactttgacgcaacccacgttgataaacgaagtcaatggagaatgaagaaaaaggaagtattccagaaagattgcggtgaaaatttataagattattttcaaaaacattattttgcatgacaattttttccgaaaaaataatttttaaatttgtcatttataaaaactaaagatttcagaattatttttttcgtaaaagacatacttcaaaacgaaactatatcctaaaagcctagaacctaataaattcaaaatcatgtatttttttttgtgtttttatattaaaaactgacatttttaaaactttttgaccaaattgtgaaacttataaacacccctcaaataattcccttattatgaaatagtaattgattcatttgaaaatgatcgttacaaaacaacaacaaacaaaaaatatatataactgtatattatatattacacgatctattgatcaaccatatatattttatgacttgaacgtcgactcgactatagagttaactcataaaagaaaagaaaaatgaagaatcgactatatatagagagccataactatgtgaatcatacaagtagaacttttaatctttaaagaagaaaaacaaatgtcagaaatttatgtcttagcattgtctgttgtattctcactcatagtagtgaaactctgccattgggtttaccagtggagtaacccaaaatgtaaaggaaaacttcctccaggatcgatggggtttccgatcatcggagaaactttcgaatttatgacgccatttgacatcagtctagtagtttcaccgtatctgaagaagagaatatccaggtttcttaacttcttagtttttatttttgagttcccttatgctgttattatacatgcactgatcatggttagaagtacaaataaactgtttcatatctaatttctaattttaaaagcatgatttattgtaatatcgtaacttaaaatttctaatttcatatgccatctaaatactaaaaaagcttgatatgttagagtcacttgttttttgattagcattacgtttgactatgaaaatattaatcaaatgtttattgaaaatttgaaatgtctaattattatttcagaattaaaaataattgtcaggatatttgattaattttcatttcgatatatgacttcaatctagctagaggacaaaaagtttcagaaaaaaattatctacgaacttctgtttttattataaatgatatgagtatgtgtttcaataacattgtatggaactttaaataattatttgttatttacaagtaaacaaatctgaatcagatatggttcgaaagtgtttcggacaagtctattcggggcaaaagttattgtctctattgatcccgacgtgaat

SEQ ID NO: 6494 - DNA, 3000 bp, Unknown
  misc_feature (1)..( 3000): cDNA_ID_3090357_gDNA_ID_1621095_Annot_ID_170951 3000 nt of promoter + ATG
tttgctatctagagtttagaggtaaatcaatcatagatgacttggtggaatcaaacacataattgagcaaatgatatggacattaaactgaaagttagtctgtctaatggtacaactcgggttctccgattaaaattttgtcattaaaagtttgtgttgtatacttgtatgatttaaaagtttaaaagtttgaatggtacaaaacttgattttgtcataaacttgtatgatttaaaagtttaatggtacaaatgatatggacatttaaaagtttgtgttgtatacttgtatgatttaaaaaataataataataataataataataatatatatatatatatctacttgtatgatttgtatagatgtggctgtctattttttctccaccgttaactcatgtaatatatataaaaaacaaatttatacttttttgtgaaggtcttttttaaataataaaaacaaatttgggtagggaggtctatttaaaataatatggtcgcaatatttaacaatttttaaattgccaatagcttagagtcgcgtaataatagaaccaaactatgcaactatcattcctaccaaaaaaaaaaaaactatgcaactatcattagaaatatgtatctaataacgtgcatgttcgcattgcacgtcgtccttctttctccgacttttcctattttttttaatattattttatcaaatgtatctagcttagatacttttgatggagatgctccaatgataaaaaatagttgatccgttagccacgctagtaacatagtagttctgcataccattttctcttcattctcaattgcgtctgtttaaaatcaatgattgtgattttctaactttttcatattctattggatgggtctccaggtcaaggcgtcaagccagataatccagtggttagcagacttttcggaggagttcccgcaaatttttttcttttctttgaatttaatgtatatgcaaacttttttttagcataattataaatttttatatcctggatgttatctcgatatgaacaacacttggagtcctcccacaagcttctctacattcccttgccttagagtactcaattttgaccatagaaacgctgcacatcttgttgtattgttcccgcaaatcttttttgataaaggattcaggctaaatccctaagtccaaatagccacgtgattcctcaaccctaaatgtcaagacttgcacataataagtttgaaccatataaaaaataaaacgcctaagcctaaaccccatctaacaaaacttgcttacaccatgtgtttgatgtaagaatgatatccctctttccaacaatcttgcttcttccctgatttgccataattcaccactaatttggtaagttgtgaagaaacttccatgaggggtaacatgaaaagaatcaccagatctacaatccatgagctatcgtcagcgacaatgttgcaaatattactttgttcaatgagatatacatctacatcttcatctgccacggcagtggtggtcttttcatgttgttgactaaaaatgataccaaaggctcacaggcacatgttaataccattataccacaatttactatctagatattaaagacataaatggtaaataagttatagataaattttcctatatggaacggaaatgccttctgtttaattttctggatggtgaaaaacaatggagcaattcttcttatttaccaagattatgcgagtgggaaaaagttctaacctcatagatgatatcgaagaagtgtgtcggtctaatctgtaggtcgagacgtggaggctatccccagttaaaggaatctgtaccaaactgaaacatcttctactcagtcaaatcccaatcctcatctcctacttatttcacaaacgcaaaaaaaaacagcccattgtatagatcgtgagttcttactattgaaggttacgaattgatggaatcggcttcttgttgcgattgaacggtagccatcttggtacgacatcatcgtaagaagccttgattttaattccctaaccagaaaccaatatgagaattctaaaacggtcgtgaaagtaaggaaaaacgaccaaaatcaatcccaactattttcatgtggcttttctcaatccctatgactttttgaattaatcaattcgaactcacacaatttttaaatagcaaacttgaactatatgaccgttaaccagtttcaacatagaactcgactttgtgatcgacgtgcgcatcaacaattaaaatttgatttgctcaagcatatatgaaaatgttttggcaagaatcaatagtgtaattaatcgttttcgtttatgtttacgtcatgtttgtttaaacttttatttcatgtatgttttaaattttataagttgtaataattattaaggttttcaaaattaaagtttttgtatttttaaatattttttttttattaaaactccaagttaagatctcacaattacatattgctaaaagtttaatcttttaaccaaattcttattcaaaactaagctaagattaacctaagatactaccgataataatgttcttagtcttgttttagtcttcttttagttggttcatattttatttttaattaaatttaagtaaatgactaaattatatagaaaaaaatcattgatattttaatgttatatctatgaagggttctaaaccaatgtatatgctctcacgtgtttatatctagttgtttgtaaaatactgcggcgatagtattgactgagttgacatcataaatttataactgttttacaacttgcttcaattagttgcctcttttaaacataaagacaactgtatttttcttaaataaataattacccatatatgaaatattttagagagaacacccctaagactaacacacatattcactagtataaatagaatgccttcttcgtagaaccatgtataccccttaaacacacaacttcaaagttgttgaaaaaaattaaaatg

SEQ ID NO: 6495 - DNA, 3000 bp, Unknown; identical to SEQ ID NO: 6489
  misc_feature (1)..( 3000): cDNA_ID_1814614_gDNA_ID_1621095_Annot_ID_170946 3000 nt of promoter + ATG

SEQ ID NO: 6496 - DNA, 3000 bp, Unknown
  misc_feature (1)..( 3000): cDNA_ID_3090367_gDNA_ID_1621095_Annot_ID_170938 3000 nt of promoter + ATG
tgcgtaaaaaccgattgttctcattgctggttgttcggtcttttcttgcaggcagaacaaaatggtggttgagcaactgagttctgcgtctctgggatcagaagctttgaggtttccttcgcaattttcacaaacagcttgggtgcaactaaaggcttgcctttggaaacaacattactcgtattggagaaacccttcacacaatataactcgcatagtcttcatattgctcgattctacgttatgtggccttctcttctggcaaaaagctgaggacatgtaagtctctgctccccatttcgaaatatgattgtatgctactagatagtggaatcacagtttttctttcttagaggtaaagttcgaactaaaatgatcttactagtaaacataatttctcttttcttctgtatcaggtctttttttatagaatattctgttcgtttatggtgggtaaaatttgagtttacctttgcagaaataatcagcaagatcttatcagcatatttggatccatgtacactctagtagtcttcccgggaatgaacaactgtgcggcagtgataaacttcattgcagccgaacgcaatgttttctaccgtgaaaggtttgcacggatgtactcctcatgggcgtattcattttctcaggttaacactgtttcctttaaaaataggttatgtcaacttttaagaaatagatcttatagcaaatcgcttaggctgtttataattttcttggatatagcatccactagcaaatatctctctacataatccaggaatttaatgttttgcaggtcctaattgaggttccatactcactactccagtccctactatgtacgataattgtatatcctacgatcggctaccatatgtccgtttacaagatgttttggagcttgtacagcatcttctgctcgttactcatcttcaactacagtgggatgcttatggttgctttgacgccaaacattcacatggcagtgactctacgctcatcttttttctccatgttaaatctgtttgctggctttgtcattccaaaacaggtaaggctccccttatcccccacgccgtttgacatatagccaagatccaacgtatgtgtcacttagtgcatgttaaacctgtggtcttgtagacttattgcatcaataaccagtaggcttagagctatgtcaggtctatttaactcgaaatgttgctgcgttgcgtggaatattaattgtatatcattcatataaaggctcctgaacacaaaaaatgtatcgttttccgtagaaaatcccaaaatggtggatatggatgtactacctgagcccgacatcatgggtgttggaaggattactgagttcgcaatatggagatgtcgacaaagagatattagtatttggagagaagaagagagtttcagctttcttggaggattactttggttacaaacatgaatcattggctgttgtggcgtttgttctcatcgcttatcccattatcgtggcaactctttttgccttcttcatgagcaaactcagtttccaaaagaaatagttgcttgcttgtaatagtagtagttcactacacttacttcagttaggcttttttctctcccaccatatcttaagttattatcagaaacattttacaattcttatggtcacaaatcttggccgattgcaatggtcctgataatcccatagtgacaatcttacacctacacttcggtttaaccggaaaaagctgagttggggcaacagatattattgaagcatacaagaacctttgttattggcagaaatgatgattccaaacagccaaagtcgaatcttttacatatcaagaaaaattctttagaggtggctagtttttacaactatggtactatggtccaagtgttcgacgtaatgatactaaccgaaagcaacccatttgttcttttgttcattgattactttgtctgtcttattcagttgctccatgcttgtgaggacttcacattaaaaccgtttacttcttttatccacattgtgaagccacttgattatcataatatcgtccaccatggtttatttttattataaaccttatctcattaatttctgacaaatgaatcaaatatttttctgataatcatgtgggttttgtccatgcacgtctctctgactgcagatatgattcgatctgcaaaattattagttgacaaggctcactcaggggattgggaaataatactctctatcagttgcgtagtcaaagtgttcgatgaaatgccaatgagacatatttgtggtattattgttaaaggagccgacttttgtcgaaaagataccatcttgatgatgccattgtcaacgcttacaagatttgtattactttattcattctttcctctgtgcaggaccggatttttattatttttatggagatgatcacgtggagcatgggggctaataatgtataccgcgtaagttttgttaaagttattatatttacaaacattctgacttcaattagcttctccttgttgttgttctcaagttgtttgttttttatagactttgttggttgctttgggacagtaatttggattttcactactgttacatacaagtaagattttttttttgagatttgattcttttacataacaggataattcttcagaggcggctcggatttgttttgttttgttgtttcttcaaatttggtatatatatggtctaaaatgttcgtcgtgaaagcaacgtgtctttcacctattactttttcaatgctctcccatttgtttattgattatctttgttttgtctgttgttttagttggcacttggtccatgatgatagacataaagaccgttgacttgtgtgtcaaccttgtgaaaccaacttggttgtgattaattgtttgcaagctagcacactaacttgtatataaacattctcttctctttgtaagtctaataatcctttttttcgaatttggtttctaataatgaca

SEQ ID NO: 6497 - DNA, 3000 bp, Unknown
  misc_feature (1)..( 3000): cDNA_ID_3090203_gDNA_ID_1621095_Annot_ID_170935 3000 nt of promoter + ATG
aaatttcctccaagatctagtatagtcagcttatacttttaatcaacactcagactaatggggccattaaagggtccttgcctttcgccactggtccaaggcgctaggttgttaaaaaaaaaaagttatttgcatacacgtaataaaaaattcatgtattatagttgaactcttgaaacattagccaaaagatgttaactcaaacagtgatcgacagtgagttaccggaagcataacgtaaacgggaacataattaagaagaagcttctcgttgtaattggtagccatttttcttctaaatacaaacaaagaaagaacgtcttttttttttgtttttttgttgagagagtgttgtaggaaaatataagcaatatgagtagtagatgaagctcacatgtctctcttaaagaaagctcacgagctctttatatagaagtagatgatattatgcgagtggttgtgatttttgtgtactgatctaaaacgactggtgctctgttttcagcggtccatttgaggattgtataatgactttattgccctctgtttttggcgtcttccttgtcctctttcgtcatttcctgagattctttggaatgatacctttttctataattgaggttcaccgattttgatttccgacactgattgtgttgtcgccactcgccggccttctttttgtttctccatgtgttgtttttaagcacgtggagtaaatgcaaatgatatttgttcatgtctgtattcaccattcaaatcttgttaccttaataagtaagctcaatgtcaaaatttaccttagtgttgatgtcttacaacttgaatattatagtaggtggattatgtggatgtcaaaaatttggtgtgatggattttataaatcgtgaaaataaactggagtccaaaatctgtaagttactaagttgagctaaatgaagactgaacaaaagggaatcaagagaaaacaacaaagtgaaagagtgatcttattgataatgtgtcaaacaaattacaaagaaagaaaaaagatgtaggtagagtgactttcagaaaaaatagtgaactttacctccttgttatctttgaaattgaatgggcttccgttggattaggttcgtgagggtgtgttttttttgtcgacaattttattagattgactcaaataagccaatgttgagaaatattgtttgcaaatataataatatgtgtttggttcaatatttcgtgccaaataatctgttttaaaatttccacgagttaaagataaatcaaaatctggataataattcggtttgtgttaaatctgaatttttcagaatagttgacttatacttcaagttaatttgagtaattatatatatatatataaaacttaccggggaattgtaaataacatcacacaatacgttttttttaacattaaaatacgattaaactcgacatagatttgttgatctacatgttttctctctcttctctctcctcatctttcagagagagcaaaccagtttcagcttttctggccggcaatgactggctttatcagcagtgtttggtcggcttctactctggcatcgctggcttccttagaagcgttggttggctcagcttccggcatcgaccggctactttcagcggtggtggctggcttatctcccgagagcaagatatcctcttttttgtttcgccgggcttttctccggcgtctttggccggctttctctccggtttcttgaccggatttagatttgttttgttttttttatcttctgcctgtagtttaaagattgatgaacccaagttaaaaagatgttgattgaagaagaagaggaagaaaaagaaaaagaagaagaagaagaatagcacttcgtggagtcaaattctcatccaaggtacaactgaaatttcgccattaatcctttgggcgacgagtgagctatgccagttgaacaagttttccggtgtttcagccggaattgaagcttctgacggcgactcccttctcttccagttcctacgtgtccttcaaaatgttttccactgacacgtgttttctatgcggcgcacaacaatcacttgttctcttccttcagtttagggtttattcatttgagcttttgggaatttttttttttttttgggcttgtttatttcagtttttgtgaattattggcctgttaattttggctctataatattaataaaacacacttgtgatagaaaaaaatacgattaaactcatctgattggactgtttataatattataaaagccaaaaactattttgaaactgttgtcgcgtcatcaattctcacagtgtcggcgtcagcgaataacactgtaaacgcgcgccaacgattcgattgcatatgattcttcctctgtaaattgtaatgcaagctaatctcattaatctctgacatgcatcaagtattttgtgatatctcatcttccagagtacgtgatcttgaagaaattatccatgtgatttctcacccatgcattgtttattcattcgtctacctcactgcagcttcgattcgatcagattcacaaatctcaggaacaaattcgtctaccgaaacagataaaacgcacataaagtgttcgatggaatgcctcacagaaagccaataagttgtgtgtcagtatgaatccgttcgcacattgtgaaatcagttctgacattgtttagtgagttgactattgtctaaaagatctcttcgttgattttatttacttactttaatgaatcaccagttttttcaacgcttacctgatttttcactagtttattcgttcttttgttcagtttttctctctgtacaagaccggattctatggttatgatcacgtggagctcgcgtgatattagtgtatgcgtaagttttgttcaagttatatatataaaactctgacttcattagcttcttcattcatgtggagttttgcttgcttctccttgttgttattagtttctttggctgcttttacctgaca

SEQ ID NO: 6498 - DNA, 3000 bp, Unknown; identical to SEQ ID NO: 6487
  misc_feature (1)..( 3000): cDNA_ID_2991458_gDNA_ID_1621095_Annot_ID_170933 3000 nt of promoter + ATG

SEQ ID NO: 6499 - DNA, 3000 bp, Unknown
  misc_feature (1)..( 3000): cDNA_ID_3048432_gDNA_ID_1621095_Annot_ID_170974 3000 nt of promoter + ATG
tggttaaaaactaagaaaaaacattgaaggaaatctacactaaacacttaaattatcatgaagtagttattagtaactggaaaaacaaattgacaaaacaaataaccatatagagtacaaacaagatcaaggtaacatataaactgaattaacatggaacttgaaatgattggtcactttattcaaatcacaacgaaaagcgaaagccaataattaattaaatccagcgtagagcaattggtagtagtcttgtttatgccacgaccgggggatttaggacggcataagcaagcaactcttggtcatcgacaaacacggacatgtcttcctcaggtaagcttatccatgcttctacaccatcaccttcttttgaatcaatcaacacgacacccaccatgttgtcgtaaatggtatgtgacgcgtatcccacccagaccggactacccgatccgaagtcaacctcgtagaaaggctttctgcaccagctagacattatgtatcggtctatctccgttgactctgacacagtttccgccatcaaactcaacaaactctgaccaattgtattgccttgaagactctctttgatcatctcgttgactctctctttgttcttcctgaatgtggccacgatttcagggatctcaaactcgctctccgcgtctttcttgagagaaaatccgctttgtaggttaccaatcacgtcttttggcgcaacactagatggaatcctaagtcgaatgtccatggcctgccacatgacggcttgccttggaattaacaagttagagcgtgaggagtttctagcacatctccagataagtgacatgatagcttcaacacgtgtaggcacagggacgctttcgctagcggccttgtgtttcagctcagcaatcttagaaggttcgaagacgaatcttttgagtacgtatttacttgtgatgttagaatcggaatccgttgatgggaactgttcatacatatgagaaggaggaggaggataaatagtcgtttcagcgaactcgatagtactgtttgacttccctttggccgtggtggtagcccagtcttttacaaaggtaaccaatgaggctatatcacagattttgtgagagacagagacagaaaccgccactcctgatccagacccgaagaaagtgaccttgacactcaacaacggccaggccgctggagattctccagcagctagtgtcgggaggaatcccgacagggagtcagtgttgaggtttctaaggaaatcaggaagaaggagatcggtgcgtgcctcggtgaagacggctccttcgtcgttacagctgatggaaaggccttctattcgtccagctagtggatagaagcgtgagagagtctcggacagagagagtttcagattttccgagaaaacctccgaggactcggtgatgagatcgtagaagaagatcgtcgacacgtagattccaggacaatagagatcaaggatagagagctgaaggcgatcacgaggtgatggtgaagcaggtttgatcacttctttcccggtcacctctagcttcgcttccatcgtcttcctttaaaagtcaacgggttacaagattgaagtattgaggaaactttgacaagaggagaagatggaagagacaaatggatcagagatgtgtccttttaaactggtagttgaatcgttgatacaagtttcaactcctatccatgtgtccacactaggaacaaaatttaatttaagaaaaaataaagtctgctaacaatgtttatttaattcattcatattagtaaattaaataaaacttcaaatgcttaaaatagacgactatgtaatatttaattggtgatagtaatataattcgacttctaaacaaacaaaaaaaaacatatattgaagattgatttaattgtatttaaaattttagagagcgtttatgaattataaaaggggaaataattttgaaatatatagttatatatatagaaataaaataaaaaatcagaaagaaaatataaacgttatgagaaagaaaaaagagcaaatgatagtggcatataccaactggtaaaacttctaagaggattgtttgttaaaagtctcacatcgaatatgagactgagccctagtccaaaaattactaaaatggtcaaaatgatttgttcaaaaagggggtatggaacctcactaaaataatagtggttgcattttagtaagtgaggttagactaatggttgaattttagtaagccaaaaactttccatcagtaattgctaattggatcaactaaatgccatcacacaaagaaactattgctgaaattgaatattgatattatcaaattttggtatatctccaacaaccatagtcctcaacaaacatagagtaagtctagttcctaaattttcaatatctagctgtttttttcttttcaatatccaacttagtaaacacattgttcagaaacacgccaaaaaaaaaaatcaacacatctcaaaccatcattatccagaagggtacagtaaatccagttcctagttttcgatttctaacttcaaaaatgctctctttctacatacacttttttacaagtctctatcacagaatcggaacatgtggatagagcaatggttagtagactcttttccccgaccactctttgacgttcctcgataaatccgaacctaatgatcaatgaacacgacgagtcatttatacaaaggcaacaacaaaatgtggtttcttctcagtttgcttccttgaaaatttagctgttatatactaaaaggccttttgtaaggctaaaaggccaagcctttgggcccattaacatcaccgtttattcgaaacgtatgttgttaagacttgagagaagtttgacggtgaaaaaaggaaaatatttacatatatatagtaaaattaaaatagtagaaagaaaaaaatcagaaagctacgaaagaaaaaaaaaacaatctagcaacagaagaagcttcgagaagacg

SEQ ID NO: 6500 - DNA, 3000 bp, Unknown
  misc_feature (1)..( 3000): cDNA_ID_2041166_gDNA_ID_1621095_Annot_ID_170971 3000 nt of promoter + ATG
atcttgacttcatctggtttgtaatttaacgacttgccaattcacctattgcccatgatctaattctttaaaccaccagaagttgtattgaactgattgatctattttttattttttttttttttgaatatttggaagttcgggcccaaagaccctatgtttctcagagacggaacccatagtagattaaattcatctcttttatagagagattccttccaacgtgaaaccattcctgaattgcttagaatcttttctaaattttgtaaactcttttctaaatttcagtttttttggcaggaaaatttgagagtagttttctacggaaaacttttggtgttaccagaaatgtttttgcgaaaaacttttaacgaaaaaattttgggcaagaaaatattgtcaggaatttttggtgataaatttacgtaattttttaaattttaattttaatattaaaaataaaataattatttaaatactatttttgtgcaaaaaaaacttttaagtactatttgtgaaaatttctcattttcaaattgccttaggattttatgtttctagccttctaggcccttttcggttatgtctatcaaactcaaagacaaaggaattaattggtcggccaagggacctttggttttggagttaatcttgaatatgattatatgaaatatgtcttaatatgattatatgaaatatgttaatcttgaatccaataaacgtccgagctgtggaaacctccagttaaaagatgaaatacaccaattttctcctttttcgcaaatctccctaagctcttttaaaaaaatctcaatccacgttttatccatattgtggaactgtgaacccaaaaaaaaaaatctgtattgtgaaaaacatcattaatgatacaaactacatcatattcactaattaaatcttgtaaatgtgatgcaaaaaatcatattttacataaattacaagtggtttgtaccatcctactatattatttgggaagtatattttaaatataaccttaatttctgtaattaattacatgacaatgtcattagaaaaatttaatcaaaaacaaaatcgtttaatgacgtcattaacaaaatcatttaatgacaatatttatttcttaattatagggcttattggatctaaagacggatcatcaaagattttctaaactgaagcaaaatatagtgaatattcaaatatctatctgttactaaatgataaacaaataagttaataagtcaataactatttagagtgacgggtttttgaatcaacattaataaaaaaaagtaaaatataattaatccaccgtttcaatacgagttaaatcattaatttattaaacatatcaaatcaataatatttttaaaatattattaatatgttgttttaataagagttaaaacttcagttttttaacaattgtctcatgtattcgtcgtataacgttacttaataacaattataaactgtaaaatataaatattttataaaaaataaaatttgtaagttttaatatatattacctttaaaaaataaattgtcctgcggtgtaccgcaggttaaaatctagttggggtataaatcgggaggatgatgtttaggccaatttttataaaacaagtgtcctgagtcttattgtatacaataggagtgtcaaaatgggtcaaaattcatgagtcaactcaactcaactcaacccatgaatcctaataagttgaaatttttgactcaaatgagttgatgggtcaaatgagttattgagtcaattggtttgatgagtaaaatgagttgagttgtaatggttaatggtttcagtggtttacccaattaacccattatattttgtaaaattgaattaaaccaactaaaatctctaaaccaatatcaatttaagtttaaccaacacatgtaaaccaatttaatacaatcattatttttccaaatttcttaaatatacaagcgatgaaattaagaaaaaataaaccggtgatttttccacaaaaaaacataaatccgttattttcccgccaaaaacgtaaacccatgattttcccgccaaaaacgtaaacccgtaattttcctgccaaaaacctaaacccgtaattttcccgccaaaaacgtaaacccgtgattttccgccaaaaacgtaaatccgtgattttcccgcaaaaacgtaaatccgtgattttcccgcaaaaaacgtaaacccgtgattttcccgccaaaaacgaaaaacccgtgattttcccgccaaaaacgtaaacccgtaattttctcgccaaaaacttaaacccataatcttcccgcaaaaaatgtaaacccgtgatttttctgctaaaaaagtaaacccgtaatttttccgccgaaaacgtaaactcgtaaaaagtgaaatccgtaaatatcctaagtttgatgatagtgaattaataattattaataatggtaattatttattattgtttaataataatatgaattaaattattacttaaatgggttaacccatttaacaactcaacccattttgtaaatgagttgggtacaaaatgagttgggtcaacccataactcatttaaccttaaactcatttgattatgagttgagttgagttgggttacccattttaacatccctagtatacaacttggttttaaagttactcataaacatgatcgtgacacatgtcaaatgtttatataaatatttttaacaaaaagatatatatactaatttaaaaataaattaaattttctttcccataatccaaaaacgaaaatgtataaaatattaaaaatgtataacgaaaaacaaaaactaacaaaacaatatataattaattttatattaatggttataattaatcaacgacttgccaattcacctacgtactactagttaatcgaccagagagctagactagtataaaagagatagtgcctccctcataatttttatatccaaaagactaggaaaaagaaaataacttaacat

SEQ ID NO: 6501 - DNA, 3000 bp, Unknown
  misc_feature (1)..( 3000): cDNA_ID_3090207_gDNA_ID_1621095_Annot_ID_170931 3000 nt of promoter + ATG
tgcgtagataaacttaagcttgatgtattctttggtacaatgtaattctgtttagttctataacttggaatcactctaagtgtaatgtatattgatgcgaagtcaaatgttgctgaatttttgctctcctgcattttccccaattttttctgagccagtattgtgaaaaattggagtctgagaaaactgaaaagtttaatggattctcatttaatcagtgttcatagattcactagttgtttgaccagggcttaggcttaatcattcttgtgacacttggttttcttttaaatctgttttgatgttcagttttctttggaagctatatacccataaacttaaaatgaataaagatggaagctttagctgatataatttgggtgtttctttctttcttccttggtgtgaagctgtttcaaaatgtctcggaggtatgatagtcgcaccacgatcttctcaccggaaggtcgtctctaccaggttgaatatgctatggaagctattggcaatgctggttctgccattggaattcttggcaaaagacggagtggtgttggttggtgagaagaaagtcacttctaaacttcttcaaacctcttcatccatggagaaaatgtacaagatcgatgaccatgtggcttgtgcagttgctggtataatgtctgatgccaacattctgattaacactgctcgagttcaagctcagcgttacacctttatgtaccaagagccaatgcccgtttagcagctggttcagtctctttgtgacaccaagcaaggatacacccagtttggtggtctccgcccgtttggagtttcctttctttttgcaggctgggacaggaaccacgggtttcagctgtatatgagtgacccaagtggaaactatggtggatggcaagctgcagctgttggagcaaataatcaagcggctcagtctattcttaagcaagactataaggatgatgcaacgagggaagaagtggttcagctcgctatcaaggttttgagcaagacgatgacagcacgacttgacagctgaaaaactcgagcttgctgagttgtatctgactccttcaaaatgtgttaagtaccatgttcactcgcctgactcgctcactaagctcttggttaagcatggtgtgactcaaccagccgcagaaacttcctaagctagaaactggtgacagttttacctgacccgcctggttactgtagatgtccatttgctttctttccctttggagatatcgtatcagaatcaatttaccactctgattatgtcatgtgattcatttgggttgactatcttttatcttgagattgatcttcttctagtctaaagtaaagttagactttagaggttttattcaataaatgaatgagcaatcaccaacgggcccattagaaagcccataacattcattgattgaggtaacgggttttaatggctcaaattaacgaagaatcagaatctctttaagtttcaccacgtcgatttacggtcaagagtgtctgtttattaacagaacagtaaaaatgttaccgctcaaagcgtatatcttgagcgccaaatggaatttcattggtacaatgcccagaagttctgggccagaactggcctcattgtaagagattttttaggagatttatgcagatctggaaaaacaagtttttctctcttggattatctacaaaatattatttacttaagtagttgtcagttagacaatgccctgaatccaaggaattgtatcgaccgggattgaagagaccattcttgcatcgtctcttctttttgcagcatcgcgattgtatgaaacattgatggccagatctttcttctataagtcaatcaaccggccaccggaattaccctaaaaacatagaaaatatgttgaaatatattgagatattagtcatcgactatgactaagtgtcacaaacttttgtgtgataggattcaatcaatccaatggatcttagtaagaatattttacattctataccagtctagttcacatattttctaccacaaattgttaattcctcacaccttttaaattcattttctagtttgcagtttttttttaagtgtcactttaccagattacctcaaacttaaaaattatcaaattattatcaaaatatacaaatttactaattataaaacaagtatatatctaatatcttatcttaaaaggtaaatatataaatattttctaccttttgtcatgtaatacaatttttttcctatttattaggtatcagaatctcaattaattaaattcagaaaaagtgtgagaaaataatttccagtaagcaaaaaaaaaaagtattaacacgacggcttcttctttcagcaaaaaaaaaaaaacataaacggagaaagagagagagaacgatacagaagagaagccaaggtcgcagagagaaacaatacacacggcgacagatatatttcccggcgaaacgggaacaataatatatacagagagagagagagatttagtgagagagctttctagggttttcttcttctcgatttatcttcctttgacctcgatctattcctcttccttctccataaattttcccttcttctcaccttcattcatatctctcctagctccattctagggttcttgatccgtttctctaccttttcgttttcttcctccgggtataatttcttcttcaattcgtttgttttcgcgtctcttcgtctcttctaatttcatcaatttgggtcttgtagggttttgagattttctccttcgtcgggtgaagaaaaccctacattttgttttgtcactgattgtgttttcggtgtttcaggttgtttaatttactccggcgggtgaccaaattggcggtggcaaagtatgagtattgatttccctgggaaaggggagagttagggaagtttgggctagagagaaattggattgggtttccatgagcgatgggggtgtcgcatgcatgcctctactgaatatc

SEQ ID NO: 6502 - DNA, 3000 bp, Unknown; identical to SEQ ID NO: 6493
  misc_feature (1)..( 3000): cDNA_ID_1814598_gDNA_ID_1621095_Annot_ID_55645 3000 nt of promoter + ATG

SEQ ID NO: 6503 - DNA, 3000 bp, Unknown
  misc_feature (1)..( 3000): cDNA_ID_1814586_gDNA_ID_1621095_Annot_ID_55648 3000 nt of promoter + ATG
cagtcaccaagcctctgattctctccgcctcaccggtctcctcagaacaactcctccccatgatcatcttgcagatggtgttgttattgagcttcgctgcttcctcaacaatctcaacactctccttcttcatcgccttgtcgagcagagttttataaaacctatcaagctcatcttcacggaatcttcgtgaccgctcgagtgcctgcggtccaagaatcttggtaaccatgagcttcctcatgaatttccagtaatctccatagggggcgctaatgaagctatacgaccccaaaaagagagactcttcaatcggaggcgaatgccgaaatgatacattcacgtcttggtccctgaagatttcgtaggccactgaggctgaggaggcgaggactataggtacgtggaagatgcggagatggagaagaggcccatactttgatgagagtctctgaaaagacttgtgggttaaagtagacagaagaattaggtgaagatgaccgatgattggaagagaaggagggctcggaggaaggtcacggccatctcgtgaatctttaggtttcatgaagaagagagagtaacataggaatgacaagagacataagaggatgaagatgatcaatactgccattgttgctcaaagtgcagagacaaatgaaacagagtaatctttgatcaagatgcatgtgttatcgtgctctgttttattagcaaaaatgatacgttgtcgctttgaaagaacgtgaaaaaaaaaaactcgttaagcgtgtacgtcccaagttgacaatagacattcaatattgtcagattcgtctaatataagataggcgcatgtgaaatatttagatattagggtaatggacgctttaaacgtaagaaggaaaagagatggaactctccactctcattaaagctttgatctagtgtgaaacaggagactgcatgccttttctttcttggccgaaacatctcaaatttccgttgacttaagtttcataggctttaaatttaaaatcaactaggactctcccggggcaaaatatttcaacttacttatatttttcttttattctattttcttaattaaaatataatcttgtcttaaaaatatctagttgaattgtatcatttaagcaactttgctactcccttccgtgcctattaagaatcatatgtatatatcaatttgttgccaaaaaaatgtaaatgtcaattcataaatgtatgtatataaaatcctgtattttcgaaaacaagatgaagtaaagttatgttcaccttcacgactcgataaacagtcgtcccaggagtgttgtatgagaagttaaaccaattagttcggaaatcaacccaacaaagtcccaattcttttacagccccagactccattacatcacgataagatcaaccaccatcttcaagttgttaaggttagaaatactcattagacatgagactgggacatccttatactacacaagatttttcgaaaggttctcaaatataacaaatatatagttattatattgtgtaggaaacgttaactatgactaaagtctgcttgggaattagggaccttggttgcggatggagaaacgtgtacgtgatatgctaataattattgctattttctatagttatgttataagattatattgttatttcctttgttcgtttaggagatgtctttaaatatgtactctttagcaaaaagtcgatcatcaaggaattaggttttacaattttctattggacggctacgccattggacaagattcgtcttgttggagagaagtacattctctaggagagctattgctctattctatatttcagatttgttattcacttaaataaagtttattccaaattcatttttttcttctattcgtaattctctctgatcttaactccatcaattggtccgacctgccaaccaaatgccgtaattagataggatacaaatcatcgttaggagaatagatttgttcgagggaaattgataatatataatatagaggtaaacagttagaaaagggcaaaataaccggaaccaaaatcgaaccgaaccggaccaaatctgaatatagtttatagaatatttcaatggatctcaaatttcctaaccggagtacccagaactgaaccatatcgaaccaaaaattaaatgggtaatcaaaatatccaaaaaccgaatgtacacccaaaatacacgcaaagtaatgattaaaatacccaacattataatgataaacccaaaataattatgtttagactcaaaatactctaaataaccaatatatcaaaatgttgttagttatatttttcaaaactaaatattattttttggtaaattaaataatattttatagttttatgggtatttcagatagttttggtattttcggtagttcaaccgaacccaaaaaagttttacttctatttcagttctccattcaaatatttgaaccgatccgaaccaagagagaacgaaaccgaaccggaatcaaaattttaaaatacccaatagattcttaaatcccctaaccaaatttactgaaatcaaaaacgaaaatgatctgaacttgaatgatactcgaacgcccagtcgtactgtacacttgtggaaaaggtgagcttgtggttggtgattggaattttattaaagttttcatttccacgttttattttcatatcttcaagaaagcttcttgggagttgttagcatgtactttgttaaagttttcatttaaaaattatatatctttcaaaagaaaaaggaaaaaggttgatcttgtagaaaataaattaaaataaaagaatactttcctatagaaaaatagcacaagttaaatacgttaagaaaacaaattagttgaaaattattaattaacttatcatcagttcccactcaaatcatcgttttcacaagcattatcaatctatataattagttgttttgcctctcgactgaacttggaggattaatacaaaatg

SEQ ID NO: 6504 - DNA, 3000 bp, Unknown
  misc_feature (1)..( 3000): cDNA_ID_1814574_gDNA_ID_1621095_Annot_ID_55651 3000 nt of promoter + ATG
ctttaacaattgaggttagtatttataaatttaaatatgtgtattgcttatatatgagaattcatatagaatatttgttatttatgtcaatagtcgtatactaattttatctagatcaacatgttttaactcatagtttcaaaaaagttttcacaattaatataatactctgtataaattaataaaatattaatttacactataatctaataaattataaattataaattataaattaataaattaccataattccaacactattaatttatattgagatcttactgtgcctcataactttgtacgatattcggagctgtgcttacttagtttaaaaaaaagggcaatagccctagggcacatcctcaatcattatttttgaggcaacatttgacaagtatttttttttagtttttttttcagttaattgtaatgtttaaccgtttgatctttatcatcattatcatatatatttttgttgtcatctgttatactatttatttaattcaaaaactttataaagttttattttaaccacattttcagatgatttattgttagttaatttttctaacaataattgataagccttccgagtcattggtccggcggtgacgttattcgttttgtattagtagaggcgtacctcctacgttatacattgtactctatccgttatatatattcctacttgccatttatcagtcaactagttacctcataagacttgtacattctgtgatcgatattaaaatgatatacattatgtgaatcagtgaatgatcgggggaaaactaaaaaagagtttcatttttctttactaatttcacttagtagataacatttgtagttataatctttatttgtcgttattacatgtggactagtactggactattgaatttcattttttgtcgagttcacactggtgttaaataaaactggcatatataatagattattggtgttgaatcttgtacctaaatctggtctaaggaaacttccatttgtattttgtatagttattttgcagaaaagaaagtgattgaccagtgatgtgacgattttgaccactgaattcttttatttaaagtcaaaactaaacaagtcatgcaatattatataaaaatggacaataactcactataactttttcatttaatcttcaatgaaattatattccaatcttcttcttgatattttttttttcaatatttgtttcattatacaaaataacaaaatttaatatgtgcatgacaaattaaaaactttacttttttttcatcgagttataagatttatacagtatatggtttgatctgtcttttctcttgagacccggtgtaacttcaaatggatatctcaacctcggttttcagttttcaccttccgctgaacggatccactggtatttattcggttctttgaaaaatgagacaatggtgagaacgaaataaattccttcaactctgctagatttaagttcaaacccttggtcacctatagttggtggaaattgagctatctcgaaaggagttcaggcttggtagccttggccaaaagactttggagtttgagcaaatggtcaagaataaattgttggcactaattaaggtttaacatgttgaaagtaaacatgaaattggcactaatatttttgctcttgtagaagatatatgagtaatttgacttctagttgaaggctcatttttttttaaagattaagaggaaaacggctatttacgtagcatactactctaaggctctcatgaatcatgatcatatatattaatgaactaaaagtgtcatgcctaaaactacatgaacaaaacaatattatgaatttagtacatgacctatttaaatatgtagtcggaaacctacgttgaagtagatatcattacccaaactattagtgctttcttactagaataccatgttgtacaataaaacgaatatgttttacgaaaacaaatcggtctcctcgaaacgatattgttttatttgttaaatttgacttcagttaaaaaataatatatgaattagattataccatgttgtttgtatttcaccatgtatctcatccttgtatttcactttggttgcttttttttttttgtcaaaccttgctttcattcagtggaacaaagaacaattacaagtacaagagttaaacaacccaaaggttaaaacattacaacaagaggtattccccaataccataaaaaaaagatagagttcatcgatttgaagtccatgtatctcatccttgtatttcactttggttgctatttcatgaataattcagacggaaaaaaaaaagattataccatgttgttttgcgtctccctctcttctctctcctctcttactccaatttcaccactacgagttagagaaagattctaacgccgataagtatgtttaatagcaagtgtaaataagagatcgaaagataaatccaaacttcgtatatcgatttaaatagtttttattttatttttatttttcaattaaacttgggtgagaaagtgagactgtataagtgatagcaaggtaaggtgaattacttaaatatgtgagaacgtaagacataaatttaaagttcaaagcttaaattgattaaattacggaatgttgaagtttaattttttttttttttaaatttactttataaaagttatttgattaaaaaaagtcattaaataaaaaaatcatagaaaatcatatatatacttttaaaaataaattatgtaacggtaattactaaaatatgattaatgatttcaaaaaataaaatatcaacttttagaagatgaggatatagtactataacgataaaatatgggaattattaaagttatagttattaaacaactagatagtagatacactagtttttcccaacatgcatgcatcgtcagtttctttcttatttatatgtatagggtatcgcgtattctttcattccgaataaacttgaacgattgatagaaaatg

SEQ ID NO: 6505 - DNA, 3000 bp, Unknown
  misc_feature (1)..( 3000): cDNA_ID_1814559_gDNA_ID_1621095_Annot_ID_55656 3000 nt of promoter + ATG
cattgttcagtttgtagagaaagacttcaagcttgctgatacggtcattagaggacttctaaagtattggcctgtgactaatagttcaaaggaagttatgtttcttggagagttggaagaagttttggaagcaactcaagcagctgagtttcagcgatgtatggttcctttatttcgtcaaatcgctagatgcctcaacagttcacattttcaggtgcgactctcgataagttgttcatatagtctcgcaattttgcaggttatattcaaagttgcttcttttgtcaggtggctgaaagggctctatttctatggaacaacgatcacataagaaacctgattactcaaaaccataaagtgataatgcccattgtgttcccggctatggagagaaacacacgggggcattggaaccaagcagttcagagtctgactttgaatgtgagaaaggtaatggcagagacagaccaaattctgtttgatgaatgcttagccaagttccaagaagatgaagcgaatgaaaccgaggttgtagccaaacgagaagcaacatggaagcttttggaagagttagcagcttcgaaatccgtaagcaacgaggcagtgctcgtcccccgattttcatcttcagttactcttgcaaccggtaaaacttcgggtagttgaacactttctgctctctatcaccgagacatactttcaaacaatccagcagaattgtatcgatccgttcgagcatcaggatcagtccttgaagaagattaagcacgatgattaagaagggcaatatcatcagtgaatacttaattataacatttttttcaggtttatggaatcatgggttcaattgtttgttgcttctgatcctttttttttcttactcagctcttagttgaataacaatctgaggtgtaagaaatatggcttatagatatagttcttgagaggacgactaaacaattattcgtatttgtattgtggaatgaattgtattttatgctttgaagttcattaatttagctcccctactaaccaaatcataaccgaagttatcgaatctcggtttggttcggtatatatgcaacggcattttcgtaaacaagtcatgttttttttcgtgtgagttttagaaaatacaaaaatcatatataacactagattttaatttaaagttagtataattttttttttgcaaattgtatctatctataatatatttttattttatagtttacaattgttattaagtaacgtcctgccaaacccgtcccgccaaacctgtcctgtaaaaaaatcatttatttatattaatattgatcttatttatgatatgtttataaatcattctctaaatatttttgtcgatgcaggacattgaacccacacattgtttgccaattggttaatatatgttcatttttaaaattttgaatcataaaatgtgacagaaaaaattaagatttttttaaactctatatattatataatgatgttaaaaaattgtgatatatcaaactttttataagtttaaatattaataatgttttataaattttaaatatataaataataatatttaaaaaattaatatttttgcttataaggtaatgacataataactctaaaagcaaggatttagaagatttaaatctttaattaaatattttcattaataaataattaatgtcagtgacatgacattgtaaataagtttaaatacaaaatttatttatttaaacaaaaaacggttagtaagaataatatttatttaacaaaaaactttgttttaaaatattgttaacaaatgtctatgctaattttaagggattgatttgaattttgttgggattaaatttgattgataatgtgattgactatttaaatcaaaaatttaaaataaaattaattattttggaaaaaagatttaatgctaatggcattagattgtaaataagttcaagtccaggatttatttgctaaaatggttgcaaaaatgtatatatagatagtgtaaaaataaattgaattaccgatgtatttttaaaaaaaatcgtgaaatctaatttatttacggaaaaatattaccacattatttttgcaaatattgtgtatggtaatgaatccaatccattattctaatttgttcttagtcaatgagtggtattcaatttcattgtcccggtcccacggactgactactcagcaacccaatcttacaaagtcaaagtcaacttttattttgtttctctttttttccgtttccatcccaaattcatttctttataaattatttattcctaaaaggatttgtaaattaacctaatttgcatttcaaaatatttttatctattttagtattaaattggaataattgttatttttgtattaaaaaaacactaatatccaaaattgttatattgctttttattttgcttttttctatttttaatttctattttttaatagcatcgccgtatcgtcgcatcgatactcggatttagtaaataagtgttttttagcaagagtttatgcaagtccgcttcgattaaagtatctaaaccaaaatccaaacacgtgggagtttccgttttaatttctagttatattatacccttcgttatttaagatataaaacagcaatttattatcactaattgataaaaccttcattgcaaatataaactagattttaaaaataaaatttgacttttaaaatacaatgtaatattattaatgatataaaaacaaaaaacctaaaatggtattgaagtgtcaaacagaggaagtatatgatatatatgtaattaactagtcaaaatctgctgtgataacgaccaattctaaacaattataaaatcttctaaaaattaatgagaatctactatatttaataactaaaataatagaaggatgacaattgacaactataacaatattgaagaagtcataccaaatatattaagacgtgtataaaaagggtatcataaccgaagacttaag

SEQ ID NO: 6506 - DNA, 3000 bp, Unknown
  misc_feature (1)..( 3000): cDNA_ID_1814702_gDNA_ID_1621096_Annot_ID_55659 3000 nt of promoter + ATG
aggaaactataagttaaaaaaaaaaattgttggcagtctttaattgtaccaatcctgtgagactttattattacagactagatgatcacccgcgctacgctgcggttttttcggatttttttgtattatttaatttaaatttaatttttatttatctaatcattcactcatgcaataagtaattactttaatattaaaaatatttttttctaacaacattctcaacaatgcatcatacatataattcataaacaacatttgtcttaaaccaatttaagagagggtagggttggattctagaaacctgagaatttgatgatagagctccttacgtattcatcagcctcagtgatttattatataaatatcataagagaatataaatatcaatttaagagaataacttactcaaatcactaagtaatccacgactattatacattcatactttgagtttggattaaaaaaaaaatcttcaagtatgagaaaactattaaaatagttttattgaaaaatcatataaaataaaaataaatttagtaataatataattaaatatgtaaaataaaattaaataagaaatatatcattaacctataaattagaagttgaagaacttacattaattatttaatagacacatgtcaaatgctaaagtgatgatgtgtcaatcatatggagagagttgaccaacttttcatatatatgattggtaagaaaagttgtgtgtggttgtagttgtactacaagcttagtagaaacaaaagtattattgtgtaaagcatattgtatttttatgtattaaaatacagaagaaacgtgatacaaaatttggcgttttccactaaatcaaaaagtgagcaccattgtaatcgatgaacagtagaatttttgttttttctttacagttgaataatataatactaaatactaatgaactcaaatttttacatgtgaattttatgtttgttacatgttataaactcagataaaaggtttcgctatggaaacactaaaacgaagctcaaaagtatggctacaagagcttcgttcaaacctaaacattttctggggaacaatcgaatccgaaatctccaaaaacggtgccgcttcatatatcttccctctccaacgttgcatcttcagtttcctctgcgcctctctcgccggcgttgacgcttccgtatcgccggacatcgctgagaacggttggaaaacaatcaatacttggcttgcgttgcaagttattcccactgctaaacttggcgtagttcctcagcctcttgaagagattttacttcatacttggccttatccttctctcttaatcgccggaaattacaaaaagctttacaatttcatcgacgagaacgccggagattgtctccggttaggtcaagaagaattcgggttgacccgagatgaggctattcaaaatcttctctttgttttaggttttaatgcctacgggggcttttccgtcttcttaccttctttgatcgggagaataaccggcgacaattccggtttacaggagaggattagaaccgaagtcaggagagtttgcggatccgggtcggatcttaatttcaagacggttaacgaaatggagctggttaaatccgtggtttacgaaacgctgcgttttagtcctccggttccgctgcaattcgcacgtgcgaggaaagattttcagataagttcacacgatgctgtttttgaggtcaagaaaggtgagcttctttgtggttatcagccgcttgtgatgagagacgctaatgtttttgacgaaccggaggaatttaaaccggaccggtatgtaggtgagaccgggtctgaattgctgaattatctctactggtctaacggtccacaaaccggtaccccgagcgcgtcgaacaaacagtgtgcagctaaggacattgtcactctcacggcttccttgctcgttgccgatttatttctccggtatgatacgattactggtgactccggttcaattaaagctgttgttaaagctaaataagttaaagattgattagtgtttaatgttatgtaatcaatcttcaacggtttcatttgttcggagtgtataaattatatgtaaactaaaataatccgaattgaaactcaaattgttatgttagatggtgttgctatgttagagagattttaactgctttttacattttattaaggatatatgactctaatttttatgatagcaagataatttttgtaatacaagaaaataaatacaaagctcagtagtataatcataaccacaaagctcagtagtataatcataaccacaaagctcagtagtatttagggttaccaagcaatataataaatgtaataaatttgtgcgatggctctaaaaaaatgtaactttgtgtgatcagcagtataataaatttctgatctaaaaaactgtaactttgagagttgtctcaaaaccaactctctttcttaacatttatgaactattaattaatcaaaatcgatttaggtcttagtggcaatctaatttttttcctttcttacatttcaatctcttttggatttactttcaagtaagccatcttttatgttgaaacaaaatcttatggatgagcttctttaaatgttttagccatttatcaagaatgtattgcttaaagagtggtgtagttctaataataataaatatatatatatatccagatatttttgttagtctaaaataatccttcttgaaacacaaattgccatgtcggtaggattcgtaattattttaaataatttcttgaaattgccataataagagaagacaaatgtggtcatgttgggggtcctagaataaagtagtttgcctcgattaacaccgaaagtaaaaacattgtataatcaattcctcttttttgttttctatttactcgataagattctcctaaaaccaaaaaggaaaaaaaatttcaatcaatcttgagattgtgtcaagaaacctcaagagtgaaa

SEQ ID NO: 6507 - DNA, 3000 bp, Unknown
  misc_feature (1)..( 3000): cDNA_ID_1814696_gDNA_ID_1621096_Annot_ID_55661 3000 nt of promoter + ATG
gggtccagttgtaaagtcgaagccagggaaagcttttttctcaatggttccaggggaggttctattggcttcacttgatgctcttagtaagttaaatttatatttattagctccacattgacattagattagattatctttgtaatgatgaactaaaaatagtttgatttgatctttgaaattagataaattactagacgctgctgaagccgcagagagacaaactctttctgctacgtccaaagctctacaagaatggttagtgagaggtaagtttcacagacaaagtcctcaattttgcctcacgtttagtgtaaatgtctcacataagtgaggttacattaacaggttaggtgagagcgcgggagaagctacgaaagatgtactaggcacggttgggcacgcagccggcactgcgtggaacgtcttcaatatccgcaaagctttctctccttcctcttcagtcacatcggggatcctcaaaaacgcttcacgaaagtgatatttggtgtttgtatttatttgtgggcagagaccataaggttaaaattaagtcagaatatgcaaatgtgtaatcttgaatctcaaacaaaggaaacctctcttccttaccaaatttatccctcatgtgtctaaggaatacacagactccaaacatatcaaacaacttaaccttaaaccaaaagctttgacccaaaatgaaaaaaaaactaccaaaatcaaatcatgaaatttaaatatatcaaagaaaattgagctttagttaaataaaaaaaatatgatcatgaaaacagttgtagatccatcgacaaagggaatagttagtgtagagcctccgttcctcgtcgctggtcgatgaaccataccaccacctcttccgatcccatgcccaccttcttcttctccatgtccgccaccgcctccaccagcatggcctcctccttcaacagcatgaccacctcctccactagcatggcctcctcctacactagcatgaccacctcctccactagcatggcctcctcctacactagcatgagcacctccgacactaacatggactccacctccaccgtgagcgcctccaccaccgcctttggcaaccacggtggtacaattgactaaaagtaaagtgataattagaaggacggcgagtttcgctgcataattggtaacaaagtgtgctcgagtcttcgtgattttcatgctggtaatatcaaacatacacctttatcaaaacaaacaagttctatatcaaaattcaaaacataaacatatatgcgtagttgcgtacactatctttgattcttaaattgctgtttgctaccttaaaacggaaaagaggaatttgttatcgtggggtgagatgctttagaaaagcctctattgtatatatgtgtaggcaatattcaagatttttttgattcttttactttttgttgtgtttaggataagttgtgagtaattctaaaaaatactctttgtatttatttttcctcaaaatatggatttagatattgtgtataattatcattaccctaattaatggaaaagtaagtttcacaaaacctttgtaggttatcattaccctaattaattatcattatatttttgtaggttataaaatccataacaattattgtagcatgtagcaaaaatgaaaacgaaaagcatgatatatcattagaaaaaaaatataattaccatatgctggaattggtatatttagagtttgatgggaaagtttaacctaatcaattcgtcaattcaaaattcaatatagattacattggtgctaaagttttaacacgtgttgcttcatatataacttactatgtttaagatggtaaaaatttataatgtttacaaacacatgctttctcaattattctatacttcatagacgagactagcattttgagattagacaaaagtatcttattatataaaatttggtttcttaaagttacgattagacgtgttttcctatttttatttgaattggatttgattatttttttcattatttaatatatttctattttcacaaaaattccatgaaatgattattctgtttctctttgaaattagtttttttttcaccaaaaaagaaaaatttgaaattagtttactttttaatattaatcatattttcaaaatttatttatttatttcttaagtatgttaacaatttaacgataaagtcatatcatatctacgacataattaaataaaaattggaactgcaactaatacaaaacttaccaaaataataagaaaatgtgcatgcatgattgcatgtgatgtgtgtatataaaacactatttactggtgcgttattgtgaatccatgtcctaacttttatattttgtttgtataaattttttaaatttaatttgtaaatttttggaaatcttattatttgggtttcaataaaattttaacttactttttaaatttgactttcatatatctcattgctttccaatcaaaatttgtcacatgtttttagttatttgacgaagaaagaattgatcgagtataaccctaacccaaattgttattcatttaatttattctaactggtttaaatgttaaataaattatgggatgaattgtttggaataatccatgttcatcaaatttaaattaattgaccaatttatacataaatttctacttcacaaataaaaaagagttaaatatgtctacccatgaacacagaaatatgtttcctcaaaataattaacagactttttctctattggtctttcatataaagctaacactaacagcgttttagacatgaataatacaacgcgttatcgtaacaaatcatgtccgttcatgttgccacgtgtacatcatattgttagattagagggaaatgactcgtcgccttcgtcaacacagaatatataaatctcaaaattctataattcgatattttttcccagaatcaaccagatctgctttcgaagacgaatctagctattagcc

SEQ ID NO: 6508 - DNA, 3000 bp, Unknown
  misc_feature (1)..( 3000): cDNA_ID_1814690_gDNA_ID_1621096_Annot_ID_55667 3000 nt of promoter + ATG
aatcttgaagaaaagagaagacttggctgtaggcaaacttctcgacctgcatattcaacaacaagtaagtttcatattctttaaaacttagcaagagtcatagttgcttcgagaagatcaagtaccttccaaagataagtgaaagtagaagaaggacaagtgtagcaccaacataagcgtaaaacacaaagacataaaagctaaatcctctcaaggtagcagctttatacagtatgctggatccaaccgttgtacactctatagcgatcatcgcagtgaacggaacaacatctcttttaaagtacttccaagaaactgtctcttctctcatgatagattatttgatatcttagaaactctctcacaagttaaagtgagtttagaagcaatcaactccaatacatgattagtgaccacaaaatgtaaaaaatatctctcaacttgactaatactttacaccaaaaggatcatagattcgaatattctagggaccccatgacaatgaactttgccccattctagctttggtttcttcagctaaatcattcattcaactgaagaaaagtttccaattttccatttgaactttcttatccaaagattgagactttatatcttcagagaacaaatcttgggaaggggatagtggattttctcgtcaccttgcagagagattagccccaaattatgaaacctttaatcaatagtaactaacctgaagcaattggagtacaaaaattagactaaagcttcgattttcagtatcatccaatatattagcattaaccttcactaatctccgatatagcagatatgttcagccgtgcgcgacggcgaaacgaaaccagaagctgggtgggtctgagactcttgactctcgagtgtttgaaatctgtgttttttttttccattaaaataataaaaatggttcaaaaaaatatacacaaaacgtctacattatccccaaaaatctaaaagttcctcaattttaatatgagattttctacttgaaagcacaacatttaagaattacatagttatatatatttcattaagaaaatcatttatatcaactagaaataattcaaccaataagaaaaaataatgcagaatattaggaatcataaaacatcaaattgaattaaataaagcatagaaacttggaaacaaaaaaatctaatgaatgagaaaaaattacttcttaatcatgttacataatggagaacagatggactaataatttattttaattagaaaaaaccttttctgtataaacattaaacagtgataaaaaaaacactcgtttaactttctaagataattgaattgagtgggtcaaaaatatcctgaaatattaatctctaaaaatgtcaaaaaaacatatgcaaatataaatatttatatatgttttaaataatttgtaagaaaattgaaccattggttgtaaaaatttgaaaaaacaaatactttgaagatataccaatttttagaaaaacactgaaaaagacttaattattaaaaatatattttcttccattaaatttaatagtcattcacttcattttatcatatatttgatcaaatgatggttatctcacctaattatcatttatcaattatcatcacctaaatgatggtattgcaaaacattggaccggcagtctggcacgcaagcgttggctcacatcttccacgtaattgccacaatttatgagtctttggagttatctaatagttatactctaaccaaaaacatcaccagaaagttcaacagagcatggcacatagccacacactcccataacatttgggtcccttagttaactcgagcatcaatgtatatgacacttccagattcttcggaagttctaagccctctcttttcattctttgaatgcttttttttttactgccatgcgtgcatttccataaatgttacaaatttttgaaaaaatggtctcaagttatataatattcatgcttgcttcgtgaattcctttgtccgattagtaatcaaatgagcgattgaattttttaaaccattttaaactaattaagccccaattaaactttagtatgatttaccccccccccccaaaagtcttaacagtttagatgtaattgtataaattattataagcatgtatcgctaagttaatattataaacttaatcaatagattaagaaaaaatgcattcattatcttcttcttttttctcttcaacattcttttaataacttaacaaaatgatatataaaaatgtatgcaacagtatacaaacaaatttttgtaaatatatagttaaattgtataccacatccctctcctggaacctggctagtcatattcacaccgagcagaaccacaaatacttttaggttcctactccatcaatctcctttatttccttaatatcttaacatgtggaaaacaaaccaagcaacatcattttaccaataagatggagttgaacttaagaaaaagttttttactatttgaaaataaaactatatacatatgacctcataattttggaaactgattcttattcaaaacctaacaacttctagagatcaattttaatggtagccacttatatggtcgttcaaaggaaaaagaacaaccgtggaatggacacattagccaatcataaccacatctatctttcatccactcacgtcactcgtcaaaccaaaatctataaacctccaaaaatacataaaatataaataaaaaaatagatcacataaagtctacgtaactaataagaaccaacaaaaatcaaataaattaggatcagagaagaaatttatagaaccgccatttctactctcgcaaatagctaaccatcaaacaccaatttccatatcacgtaagctatatatatttttattttatacactcctttctctcaacttctttatttttatatacaactcttaaaagtaagtatattatatttatttaagtggtttatgctttatataagaaagaaaatg

SEQ ID NO: 6509 - DNA, 3000 bp, Unknown
  misc_feature (1)..( 3000): cDNA_ID_1814682_gDNA_ID_1621096_Annot_ID_55669 3000 nt of promoter + ATG
caaaacgaatagagaagatctcgagagattggatagttgtgcgaatgcactctgataaaccattctaacaacatacaatcaaacatgttactaacaacatttaggaggaaacaggttcattgatcactcgaatgtcacctctttatcatttccttgtattatcagtgatcaacttcactttttggagaggttcaaccctattccaaaaggtaactgttttcccttcatctcaccatgtatatcatcatctacttcatatgacttctctactgattctagaacactaccataaaaaaacattctcattaacctaccattatatccgttcacattgacatcttccaacacaacaaatttgtatcttcacaatggaaagaataatgaaaattacgagtagaagttgtgttctggaaagaggttcggctcaaatattggcaagacccggtgctagagcggacccaaaaaaattaagggttattggaaaaaaaatattggcctatgattattattaaagaagtgtggtttctaattatagaaatgttacttttaagaaacttggatatttccatatttattttttaaaccaaatttagaattttaaggtatatttcttgattagtggttctgtttttttagataactaagaatatttttaattttttaaatataagtagttttttttttttttttcaacacaactttgctttattaacttgtaccagaataatcagcatgttgtgcttctgctatacaacgagggatgtaaaaatgagaaacatataatcataattagtagctatttgtttttcaaaaaagtagaactttttgtatgaattaaataaagatttttttttggaccatatcgtctagcactcctaacacatgtgttaagtcgggcctgtaggacctatggagctcaattgatcacaaatttctctaaactcacgaagataattaggcaagaattcattttatctcgaatcatttgcaatttacatcaaagttcaagataaagaaactaattattttgtaaagatatcatgtatactcatgtgtgtgttgatagtgatgactgaactttccgaaaaaacgtgagaaattactgtctttctcaaaggttctactttttattttgtaaaccttgaacctttttgtctagaactcacaagactcttataacatgaatgtctttagtttcttataatttgttatcaagctttctgtctaagacagaaaatcttattgtgttctaactttgtgtaaacatatctgtatatttgtgttagaatgagattaaaaaggaaataatggaaccataattatatatgaacccaaattcacttgttttatcgaactaattaataaaatgttgctatcacagtttatttgcaagcatgttttgaaatgtttaactcataacatttttttagggccgactgtgcagtcctcttattgattaattacataatggatctgatgatgcacaaaatggctagatacgtgacgatcaggttttcttgtcatagtcgatatctttcttttttaagaattttttttatccgatcttgtttggacaaaaatcgaaagtttatctttcaagttttgggataattctttaatctttttgcatgacatgtcgtcactatcaaaagatattatttttttttaattgagatatcaattacttcatccatatgaaatcaaattaattctccatgagtaaatattgaagtcaaacttcttgaatattataaaacataaaaacttcacctttaatcattaatctaataacttagtgtcgtgccaatgattaagaggcctacggcaaaaatttaacaaacatagcctctttttaaattaactaaaaactcatatgtataaaatatttaattttgattattattttattgttgttttttaaaacttccattggacaactagaaattactaaatacttttcaaacattagtagagaataagtaaaatactaccatagaaacataaatatacacaaaaatatttccgatttatgtcaaaagcccatgtgattaaaaaaaaaaatgaataaagttttagtggaattgtagctggatatctttggaaaaatgactgttagtgaggtaattttgccaacaacactaacattttcttaaaaatgtggcatcctaaaattaggctataagatgtggcttagggcatttgcccttttcattacagagtaagcacggctctataccattcgtatcttatctttatactaggtagagtttgtactgatattatcgatatagctcaatttcaaacccaaaatatacataagtgatagtttttttgataaaacatatatagcaaagaaagttgtttgacatggtgcaatccctacaagctagctacaattcagcatatttttctaagactttggatttgactagacaaatataaaccagtagactttggtgaatgaataacacgatgaacgccgcttttaagactgtctcagtcaattcggtctttatcttttgcattaatgcgttcaaattaatgtcaaacaattctactttttcacgtacgttgaaagttctttttcttttctttttactgataaaaggctttatagttgaatgttctcgttcgttatttatcacttacacatatattcgttaaatatcactatcacttatatacacatctgataaacttgtgtatatcatgcatcgatttcttcaaaaaaaacaaaaaaagtatggtaggccaaatggtcgtgtgctcgtatccactgaatccatatagatttttcgtcatcactaacgtcacaaaattgcgttgttcaatgtttagttagtggggtttgctctgtttctgtctttgtttaatattattactttcctattttcactgagatcagattttgtctgtcagtataaactctctataaaaccaaacttttgtgttattgtctttcattagtaacaacaacaccaaccaataattaaacaaatg

SEQ ID NO: 6510 - DNA, 3000 bp, Unknown
  misc_feature (1)..( 3000): cDNA_ID_2999793_gDNA_ID_1621096_Annot_ID_55670 3000 nt of promoter + ATG
aaagttcagtcatcactatcaacacacacatgagtatacatgatatctttacaaaataattagtttctttatcttgaactttgatgtaaattgcaaatgattcgagataaaatgaattcttgcctaattatcttcgtgagtttagagaaatttgtgatcaattgagctccataggtcctacaggcccgacttaacacatgtgttaggagtgctagacgatatggtccaaaaaaaaatctttatttaattcatacaaaaagttctacttttttgaaaaacaaatagctactaattatgattatatgtttctcatttttacatccctcgttgtatagcagaagcacaacatgctgattattctggtacaagttaataaagcaaagttgtgttgaaaaaaaaaaaaaaaactacttatatttaaaaaattaaaaatattcttagttatctaaaaaaacagaaccactaatcaagaaatataccttaaaattctaaatttggtttaaaaaataaatatggaaatatccaagtttcttaaaagtaacatttctataattagaaaccacacttctttaataataatcataggccaatattttttttccaataacccttaatttttttgggtccgctctagcaccgggtcttgccaatatttgagccgaacctctttccagaacacaacttctactcgtaattttcattattctttccattgtgaagatacaaatttgttgtgttggaagatgtcaatgtgaacggatataatggtaggttaatgagaatgtttttttatggtagtgttctagaatcagtagagaagtcatatgaagtagatgatgatatacatggtgagatgaagggaaaacagttaccttttggaatagggttgaacctctccaaaaagtgaagttgatcactgataatacaaggaaatgataaagaggtgacattcgagtgatcaatgaacctgtttcctcctaaatgttgttagtaacatgtttgattgtatgttgttagaatggtttatcagagtgcattcgcacaactatccaatctctcgagatcttctctattcgttttgatattttgaactttttgaaaacctctcaatctattgataagacaacttttttatgaaaaaatcaagtttgagaactaggttttgtgtttattgatctagtttacttagtcatattcactaagtcgtcaatatggtatgctttcaacaataacatagtaatttgaatgcctcgtacattttaggcgattttctattacaatgttttggtagagaatacgtatttgtatatttatgatgtatacgtgcatatacattaattgttttgtcggtttattatgatcaaacaatagtttgtctgtcagaagattcaagaaatatctttgaatctgagagtttccaaaaaacgttatgatgaaaatttggcatatacgtatttctgacaagctgataatattgtcatcttgcatttcaagcagtttcgacaaaattttatccaactgttatattcaaactaattgaaaatcgaaaaaccaccattaaaaattagttaaaaataacatatcattttgaaaatgcaatatttaaaaatttaacatatcaatttaacatgcttgttttcttaataagttttgatatattataaaatgaaccgcgtgattacaatttttctttttgtgatggaactgtcgttagttaaacacttaaacttaaactttcatgtaagttttgtttattcatatttgactcaattgaaacccaataatcaagaatgtcaaatattatatgttttgtcggatttgtaacgtgattctcgctcatttaataatgtgataatatcataaaatttaatctatgtagttgtttaatatgatattaaactttattaatgtaataagatcgataatactaagttactaacccaaatcatacacttacgagttacgacactaccgcactatcttggttatattaaatactccttttgtttctaatagtttgatgtttatatcaacattattatttactttcatttgttaccgatagaaagaggagaaaattgttgacaaaaacaaagaaaaaagtaaaattaatattattaaattaataaaaataacaaactgtaaaagctatttttaaaaatttttcttgtaaaacatctaaaaattattcttgtagaaacagaggaatatcattgaagataatagtgtgaaattatatatatatatagaaatatataaagtaggatttttttctgtatacaaatatacgtttccaattttatcaaaaactgtaaagatttttttctttgtcagtacctgctaaacttgttaatttttttattaaaaaaaaatcaaattacaattcttctataatcattttaaattccatttctttataccacaaaagattatattgcctttatcgtctttggtatgtatgcgtgaatatatttatttattttcttttctttcattttctttttaaagaactttataaatgaaataaggaacaaacaatatacacatgtactaacgtatataaataatatcatcaatatctatccaaaacttggatttcatggttgacgtggcccaaccaaaatctcaagttctctgcggatgacgaaccatctcaccatctctttttttctctctcttttttttttttaatatcatcagcacggttacataaaattcgtgatccatgaagttggctttcttgtcgttttacttcatcaccccatttttttaaagtctccatctttatacttcttcaactctccaccaccaccattgtcaccaccacatttaaacacacactttcacttgtagtgggattcgaaagtgcgttttattcatttgttttactgtttttgataacctcaaaatttgcctaaattttattctctataaatccttatatgttttacttacattcctaaagttttcaactttcttgagcttcaaaaagtacctcca

SEQ ID NO: 6511 - DNA, 3000 bp, Unknown
  misc_feature (1)..( 3000): cDNA_ID_3090439_gDNA_ID_1621096_Annot_ID_55673 3000 nt of promoter + ATG
acttttatgcatgaatgaaaaatgataactaaagatacgtgaaagatttgtctaaacagattgttgctctatttgtaaattaacaacaagaaaaaagtaagatacgtatggccattggccattactatttaaaattcgcctaaaaaggaagttcacaaaaaagtattaaaaataaaataaggcagctgtcctgaataaacgaagatcgttgccttgaatattgaaagtgtatatgataaggcaatgatcacgacagcgatgatgattgattttgtcttgcattcattttgtcaaagtcttttgtcctccaaaagttcaagcagatgtgcttctttttctataactatacgtgtttataattttatatacacattgtcaatatgtgtattaatgcgtatttagagttttctacgggtgaatcttgaaattttttattactttcatattgtgcaagttgcgacatctgaaagcagcagctgaataatgaaaatatagttcagaaaccataaaatatggtgattttgatatttgccttcaatatcaaagcttttactaattaaaaaatatatagtgatcgaaaattcacttaataaaatacagttttattttatacctcataattttattttctggtactatagtgatcatctatgaaatacaaaatcataaatcttaataatttaataaaatactattattataaacttacgtacacaattaagcataaaattacatctcttaagtcttaattaacataattaaatataaactacttaacataaaattatagaaataaattaattttaaaatctgtatttttaaaataatatatcaatgtattaactaaattaaagcagggaaatcaatgtgttaatgggaagccctagccgccacgggggattgcgatctgagattcgagatgaggagatagaggaggatggtcagccgccaggattgcagagggtggatatcaaatcctttgtggagactgttcggggtagtggtggtgggggagttccggtgccggagagtgtgttagatgatgattttgtgaggtcacggatgcgattggaatttccagatggggttgacggcgaacctgtaatcacaatcgagaaagaagttttggatgctatgaacgggttgtacaagcagtgtatgttggtgaaaatcctgggtcgtcacaccacaattgaagtgttgtctcggaagcttcgggatctatggagaccaacgggagggatgtcagtgttggatctcccgcgacagttcttcatggttagattcgaggtggaggaagactacatgatggcattgacgggtggtccgtggagagttttgggcagcattctaatggtccaagcttggtcaccggagtttaatccattgagagatgtgatagagacgactccggtttgggtgcgagtagcgaatttgccagttactttctatcataatgaaattctgctgggaattgcagcaggattggggaagcctattaaagtggacttgacgactttgcggaaggaacgaggcaggtttgctcgtgtgtgtgttgaagtgaatctcaagaatccacttaaaggaacactagtagttaacggagaaaggtactttgtgtcttatgaggggttgcagactatttgttcgttatgtggtatctatggtcacacagtgaacaactgcccaatggggagaacaactcaagggtcgcagaggagtgaacagggaatggaaatagtgagtagtgcgtctacacagaaccaagatgggtttacagaggttagaagggcacgcaacagaacgcagggtccaaagcttgttttttctgctggaggatcgttagataaaccgaatgtggagaggttgcagaatgaagggtcaacaccactggcggtagcgaatagttttggtgggcttgcggagttgactgatagggtggaggttgatcgtcaggtaggtgtgggggaggtggataaggagaatgtgaggccacagaatgggggtaatcagaatcgcagtggggagcagagcttggtaatacagaaaaataggaagggggctcctgcaacaggtggtgtgcggacagtggagttggataagagagttggaggaagtaaattagggaagcactatgttgcaagaggtaggatctctaagtctttggctccgggacgtggtttggtgtatggtccaacgcgaggggatttaggtggagtatcccctggcaaacgcttgagagtggaacatgttagtgtgggaagagacggtggtgtcttcacgaatggtagcgagcccagtgtaggggctagcttactgcaggtgaatgatcctccgagttctttgggggacggggtctcagcagaaggtaccacattgatggaggtcgctcttccggagttgactgggactcctattgatggggatggggctaaataatatttttccccggcagtttttcgtgttattcatatctttatgatgaattgtctattgtggaattgccgggggccgaataaacccatttttagaagatccataagatacgtgttgaagaaatttgatacagatgtgctggctttatttgaaacgcatgctggtggagacagagcgggaaggatctgtcaacggttggggttcgagaatcagtttagagttgatgcagttgggcagagtagtggtttgtggttgttgtggaggtcttcagttgggaatgtggagattgtgtcctcaacgtctcaatttatccatgcgaagattttgactgggttggagagtgtgcatttggtggtagtttatgctgctccatcagttagtcgccgcagtggtttgtggaatgaattacgggaagctgtgagtgggttagatgggccattgatcattggtggtgactttaatactatcttacgggtggatgagagaacatgaggtaatgggcagttgtcttctgactctttggcatttggagagtggataaatgatctctctctgatagacatg

SEQ ID NO: 6512 - DNA, 3000 bp, Unknown
  misc_feature (1)..( 3000): cDNA_ID_1842138_gDNA_ID_1621096_Annot_ID_55676 3000 nt of promoter + ATG
aaataattgggattaataaattttagtgaaaatgattcgttagccatttgaccgttgacagctggtatctgttacgtcacaatttttgtaatcatatctttgtttattagatttaagattatatcttagtgtagccgtagcctcaagagaacccataatttaagattatccaataaaattatcaatttacttacgtattacgtatctttgagtctaggtgtcctgcatgacgggctattattttagcttatgattgcgtgtaagaaactctaatagctaaattcagaatcttagatattataatcgcaatgatatgtgttatccaacgaccttattagtatcccatttgtttggaacagttttgacaactcattaaagtaacaaaatcaatgaaaaaaacaaaacaatgatattttcttgtgaacaaatatgggtaatgcaaaagattgacttttattgaaactcctaaaaaaagaaataaaagatgtgatggaaaacaagtatacggtctcgtagccccatgcatgcctgtcccaagacattataagactttatacggcctctatctaccgttatacgtctgtctcaactaattattaggagaagcaataattcataaagatattaaagctttactaaattgaaagttctactgatatattacactgaaagtgtaatgttggcaaacaaataaatggggtgcttgttagattttactgttttagatgtatatattggtagtctatctccatttacaaatcaaaattacaacttttgttttacacaatacaatttgttgttgttattgtttgccttgggttatatgaacccatgcattagtttggaagagatcacatattcacatgacgaaaaacatttttccgaattaccttcaaattgttcataatttattttggttttcgatcgtctttacaaacaataaaaactttcataaattgtgttaaaagtaaagttgtacttaggtttaatattgtatttttcttaaccataaagtttaggccaaaacatcatgtctcgtggagggatcgaaacagatacaatttcaactaaatttgtgatctatcttttaaatcattttctttatccgtattatcatttatgtagagaaatatgttaagcatttataaaacattttactaattgagaataaaaatccttagaaataaatttggaaaaatgatttttgctcttattttttggagcgataatccggttatttaaaacatggtcaacttctgactttttgcttttgctctaccaaaagatttgccaaagtcgataaagaattatttattgctccggttactttttagtttttggtccattcattttgatcaagtcaagtttatgaacaaaagtaaatgactcgtaaaattcttcacaatttttctttttcaacagttactatatcgtaacgtatttgtttataatgtgaatatatcaatattattattacatacaactcttgtataaattagtatgtgtcgccatttgtaatagacacgagttcgagttggtgtatacataatcgtatggtatgtgaagatgactgccgtaaaattatttctcttaaattgagtatttccaaaacactgctgtcagtacccacacttgccaacggccattgttgcattaagtatcgcaatgcactgatttatgaccttcaatgatctccctactacacaaactaccaatttttactctaggttgcatgctttggcattcgtcaagttttgctctctatttcgtaatcgagataagtaaatttgatgtttgttttttatatttcttattgacatttctataactaatttagtaatttaacatttatgtacacgagtttttttaatactaaaaatattgtttacaaatatagtttggtcatatgtgagatcctcaactggttgattaggtgctccaagatattgattaatcgtatgagattagtttttggaggcttgagtttgaaagtatttctctccacaaccgggagtttgagataattagtttggttgaactgagaaaataaggttaaaatgatgatctaaaattggatttgaacaataggataattatgtttagttgagttatttaaattgatgtattagattgttgttggttcataactcttactattatgtgatgtttaatatttcaattcatactcatcacatccgtttttttttggttaattgtaaaatattttgcatttccgattttatgcaacttagttttattttctgttctctatttagtttaagttgttatgtatatttttatgaaaacaatgttttaaacttaatctagccatttgtttaaacgaaatcgaattatacgtaagattagactcgcgtagatctggttactttttctaatggttgatgcctatagttaaagagattattattttgattagaattcaatattagtagtttagcactcatttcgttatggatcttatataatgacaaaagtattattattattattattattttttttttttttgaaaacaacaatattattattaccaccgatcgtttttacacaatatgctaaaaaacaagacactttgccaaatttggaaccattttttgtattcgagtcaaatcactctaaaatgacaatgaagatgtggcctccgaaatttctacttttagagactattctttcttattgtgctttataccagtcaatgaaatgttttcacactttgcgatccgtatgtatccataatagcgttttgtttcataagctaatatctctttagtgtgccacataaactaaaagccacgtagacatcatttagtgacgtattctctttttgtcttattatccgagtaagcgtattcaatatatatacatgtctcttctcacatctagagcatgagaagcttaggggaaaacgatcaatctttgttatctctcactcttcctcttcttattttgatcttcctcacttctgtttgattcctaata

SEQ ID NO: 6513 - DNA, 3000 bp, Unknown
  misc_feature (1)..( 3000): cDNA_ID_2993904_gDNA_ID_1621096_Annot_ID_55678 3000 nt of promoter + ATG
gccgtgatatcatcattgtccgtggctgcgatatcgtcattttccgtggctgcgatatcgtcattttccgtggctgcgatatcgtcattttccgtggctgcgatttcgtcagtttccgtggtcggaatttcttgtgcttctaattccgttgttactggagtatgtacctccggtattggttcttcaacctcagaagatgcaatttcggtatcaacatcaccatctttttcatcctctacacttttctcttctaccaccgtatcaatatcaattttttctgctaccaaacccaaaaatttacgtcaatatttctatacaacgtgcctcacaagaaaaagttcgagaagttatataacacgtaaattgggtgtatagttttgaatttgtaacaaagatcatataaaaagtccacaattccaacgtatgattgttattgaaaaaaaaaaaatcaacatcaaatatgaagaaatcatcacaaatatataaacatgtaaaatttaccatttaattaaattaaatttaatatttgcatacccttttgttcttcaaccggcgaaacactctcatttacgtcgttgacggtctcctccgtcacaatattctccggcactatcgcctccaccgccgtgaccggaggaaaactggctgccgtctctttttcctccggttgtttgtcaccattcgcattgtctaccgccatctcctcactacaatctcctccatcttccttttcctccggtttcttgctattgttttctacggttgtctccggctggtcgccgggaactacggcggaaacgtcgtttgtttcctggcaccggcagctttcttgtcttttaattgcttcgctatcttttcccttcactgattcagcttccgaaggtttcttgatcctcgtggtgtttcccgtaacaacatcgtgttttgattttccacaacccatcttttaatttctctaataaaactcaattctttttctacaataacctcgtttttgcttgctttaaattgatttttttttgtgaaaataaaaaatcaaagtgttaatggaaaaaagatgaatcttttgatggatttttattgaaggagattcaataaaacgataaaccaattccagttcttatttatttttgcgttgtgattcacttttgttagaaaaaggttctttttcgttattgttattgtttggtgttccaacttccaaatttaagggtgacaccattattttcaataaacaaattaaaattaaaccatttagtttttattaatagaatagaaaggttatacgtttagttactaaaattatttaggaaaaaatagaaaaaaatagaaatgttctaaattaatgaactgtttgttaatacaaagaaaattgaaacaaaaattggtccaaatggtgagtgaactcacatcatttgaatgcagttactggaagagaatttaatcggaacaaaaaaaagaagcagaaaaaaatatggatataccattatcaaattaaaagtaacggtgtaaattagttaattaataatatatatagggacttctatttgcaaatagtgcattgttaaaggtctaaattctaaaaacataaaccctaaatctttgattccggcgtctagccatcgtccttctcctctcaatcgcgcgactctactctactctactctactcaaaaccaatcaaaaacccaactttgaatcacaaccagtagaatcacgagtcatgcaattcctccagaactctcgtagaatcgctacggtcttaaaacccattgttaccaccgagactaatctgagattcttctcctctgcttctcaaatctcaagatccttccaatggcggagtcaagcatcttcgtcttcctctgtattaaaaggttcttttttttgccatttcacagttcctattgcgaaattaatcatccccatctttggaaatggagattttttttgtcctacgcgagataacttaacttgtgtaacgttaggaaatgtagctagtgaaggtgatgatcctgaaaaattcgaactttagtgttccaattttagcttgtgtcgagatacgtacttatctttcaatgcctagcttaggatcaatgtaagtgtgtaaatgaattagctttatgtcattggtgtgagttattaatataatgatgtgttgcagggattgatagtagtagtcacttgtcctctatgagcttgttgatccccagatcgagctttacgtctgaagcggaaaagcttgcgggaaatcctacaggttgcttataccttgctttgattttgaattacattttgagatcaccaaagcggtttctcattgtgtttcctctgtgtagtgactgtgaaggatttgcatgataaaatgcttaattctgtaaatgtcaagagatcaatgcctccaaatgcgtggttgtggctgttgattgagaactgtcagaatcaggatgatattcatcttctctttgacgttcttcagaatctacggagatttgtgagtactatattgccctctctatttacatgctctgttctgtttcagttgagatttcttatgatcaatcaattcttacaaatttttgtttctggattgcagagattatctaatcttcgtattcatgacaacttcaattgcaatctatgccaacaagttgctaagacttgtgtacgtgttggggctattgactctggtactcccaattttgattttgtgtagttttttttttcttaatccaatcgaacaagctgttaaatatcctttctatagctgttacatggatctgagggtactaatgcagttctttgtggttgtaggaaagaaggctttgtggaaacataatgttcacggtttgactcccagtgttgcatctgcacaccatcttatggtattggatatctatatgttttttcggttgtttctttgttaaacatagacgtttaagtcatgttctggattgtcatgtagtcatatgcactagagcacaagaattctgaactcatg

SEQ ID NO: 6514 - DNA, 3000 bp, Unknown
  misc_feature (1)..( 3000): cDNA_ID_1814775_gDNA_ID_1621096_Annot_ID_55685 3000 nt of promoter + ATG
tctcgtagaaaaaggcaacgtaataagaaaggttacgtactttagaaagctatatataaaggaccttacccacttcactccatcaaacacaaaaacacagagtcacttctcattttcacccaaatatatcaataatctctctataagttatctagttttcccatattcatctctaatctagcattttgaccaaacacacctatttttctcctttgcaagacagttttcaaatatctatcacgttatattactaatggagaatctacaaaagatgatctccgagaagtcggtagtgatctttagcaagaactcttgctgcatgtctcacacaatcaagactctcttcttagaccttggcgtgaacccgacgatctatgaactcgatgagattagcagaggaaaggagatagagcatgcattggctcagctcgggtgcagcccgacagtgccagtggtgttcataggagggcagcttgttggtggagccaatcaagtcatgagtctccatctcaaccgctcccttgttccaatgcttaagcgcgctggagctttatggctttgacttcaaaataaatggaattgcaaatgacttaggttctgagaaacttattaatgtgaacaaaaaaaggtaaaaaaaacatatacaaaaatgtatgtatgagtttattactatatatgtctatctatctaagttttcaaaagatagattatgcggttacctattttgtaaacatgcatctaagagatatttatattttataataaaaatcagcaacatttggatttctcctttttcccaattcatatttatataattttgtatacatatatgcatctagaaatgaatacacgtgcactgaatatagatgattttttatggtgtaaaggaaaaaagaaagaatatataactatttatgcagaacatgcgccaagacataataattaatttaaaaatttgaagaaggcatattttataggctaagaatattgtatttgtatctgccacaaattaaaaagcgatgacgagtctgaatcgtgtgtaatgtcaagccttaacttttcaaacgaaattcttacaatgatatgcaactgttaataaatgttaggcgtgattgtcaactgaattagctagttacaacttacaagtgtaaaaatacaggagattgcgtaaatttgagatatggatcttagaacaactctataatcaattaaagaaatttagaattaaggtaaatcaatcattaaattcttcactgtctatctacagaaacattgttgaacatcatgataaaaaatgacgtttctaaccattaaaataacaaagtgtgtaaggaattggattctgccatataaggaaaatctttgcattgttacatatattccaataataggacagtacgagccagttgcggaacttgatgcgaataggcatcttacatacatataatgtgtcggtacgtgaatcacgtaatgttcaaatgatgataaccttgtattgtgatataagaataacggctcttgagatcaaaattgggccaccaataatcttttaggaaggaaggaatgcaaaactatggctttaaaattttgttgagccccacgtggctgcttcactaatcaatcttcttggccacaagcttgagatttcagaatttcgtggaattgaggataaagctctctttgattcttgattcttaacattgtaagattcgatttcattcatgacgataaggctagaacggaaccacatagttttcctttccctctcaagtggtcatacaagaatattataattcttgagatgcattatatcttgcgatttcgagttttcgcaaattaaagaatgagaggagctagaaactttttatggcatatctaaaactatgtcaaagggacatgacatacatatgaaattctatttctttatagtatatacatatgaaataaaaagttttcatgatattacgtatcccatttatgagatatggaagttaatcaagaattggttacttctcatctcaggttttcttgttaagtcttttctttttgttctcgattccttgtcttatctcatgtaaccttaatccttcactcaagttataaggtgacttagatgaccaaagacatgtgatttacataactgaattgtcttttgttaatgttctatagtaactagttttattacaaatagcacattgtttgtcaacacatggaatttaccaccccgagtctttagaacaatatggaaactgcaaattcatgcggttcttattgtgggcttcgacgatgtggacaaattcaaaaactattattgtttgctcgatcattcatgtaaaccaggtgacaagctgacctaattctatcatttttagttatatggctaacatatataaacttggactttttaggacatgagttgggagatgtagaatcctggtatttactttaactcagtatttatgatgatggtttttctaatttcagtttgagttaaatttttatttcggttgatgcggcttcaagacacggagaagtctatgagagacaagacatatcttcaattttctttaatttaataaagtgttattttattattttgttttgaagtggtttaggatcagtttagatcgtaaaccgattaaattaattaatttatgtgtattttgaggtcttgattcgggggtatctaactttaggacatagtattattgactttattatgtgggcattatgtgatacttctatcatgtgaaaatagatcgtgtctttttgttttattttgtggattgttttggttttgttaaattgatcggataatttgggtttggtaggagtttctggttcgaaaaccaaacacgatccgaattctaatagaaccgaaccgatctattccgacggttcataataaaacggacccgtcgagttctactcgctacaaacacacaaaaagctccgcaagagaaaaagaaaaacaagaaaagggggatctagggtttgaga

SEQ ID NO: 6515 - DNA, 3000 bp, Unknown
  misc_feature (1)..( 3000): cDNA_ID_1814767_gDNA_ID_1621096_Annot_ID_55687 3000 nt of promoter + ATG
gtattaatagtataattgatacaactcagttatacgggacaaatggtacaaaatggtggaagtttaagcgatttgtatttctaaaccctaaagctatcatatttaatggcatcgtcgtcgccgtcgattttgtgaaccgtcttctccaagcgtcgtcgtcgccgccaattctgtgaacgtcttctccaagcgtcgttgctgccgattctgtgaaccgtcttctccaagcgtcgtcgccgccgattttgtgaaccgtcttctccaagcgtcgtcgtcgccgccaattctgtgaacgtcttctcttttccttcggttatgcataaactgattttgcagagatctagtttggagatatctagggttcgttgagaagaaagaagagatctaggttttgttagattgcagagaaagaagaagagatcgaagaaagagaatagaaatccatgaaaaagaagaagatagatagatccatggagaagaagaagaaagatttctggaaaattgattttgagagaaaagagacaaagtctaaaagaataaagaggagaaacgtgaaagagaaaaaaaagaggcagtgttttattttaagttggcaaagaaagaagtggcaggcatacgttatatatggattaggttaagggtttttggatttttcatataaattttgatttaaaataaactaaaattaaaataaaaaacgtggaagggtatgaatgaacaattttattgagttagtggcattagtgataaaattccgaccaattatattcaactgtatttatatatagactaaccaatctttaaactctgatgcttgtagcagaaacttcgcactcacatgcagccctgctatcacaagcgacaaccggacaaatcattattggggtttaattgtggtttcaaaaaagtaaggtgaaattggaagaaaataaaaaaagtttagtctatagaaaaaactatttaaagttcaaacttatgcattaaagtttaatcaattataataaaataaatttagcaaaagaaaaaaaaaagcaagatcaaaatcttagatgaagatagtaataaaatatcaaagaattaaattcgtagaaagaaaagagaatatgaaagttatattaactcgtagaagaaaaagagaatatgaaaattatattaaatttgtagaagaaaaagagtggtatcatgcaaccaatctgcacaatttgcaatccgaaaatggatttggtaacaacttacgactagcctttttgacatttgtaaacgtagttaatgcacttaactacaatacaaccattttaaactagaattttttttttatgattacacatatatagaactgtttatccaatttagacatggtctacaacgagctagagttttattagaaacaattgtatatgtgatattgactataagtatatgagttaaagatcggattagtgccctactactgtatatatagaactagattttgactcgcggtataccgcggggctaggtttttaataaaatttgttatataaaatgtatatgtaaatatttgttttattaatattgtttgctttgtttagtgtttaagataatgtatatatagattttagttgttatatctaggatttcatccgtagtatatcgtttcgtattattatcgatcaaaactcgtcataccatctaatcctgcacattgaaattaaacatatctaatagatttcacttgtggtataccgtctcgtaatactatcgaccaaacccgtcctaccactaaccccgttcagtaaaattagacattattttgttatttttgttttaataatactttagtttaaaaaatattaattcaaatcaatttaaaagttttttttcaaatggttatttaattattataaagtttatatattataatattataaacacgtcctaccatctattcctactatctaatcatgttcggtgaaattatttttctatttttttaataatatttttattaaaagatttataatttaaatcaatttaaagttttctttcaaatggttatttaatttttaaatattttaaccattttggcaaaaataattaggccatgaaataaaagcatattcttttgaataagatttgctttgatttggtagttaatttttgcatttaataagtcagtggcagccattgtaaataagttccaattgcaggatttatttcataaaatgactacaaaaatgtatatatagattagatagtgtttagagtaatacatataacaagttatattttattaaatacataaatatatacataataataaaagtgtggtatcatgcaacctatttagcgaacttaggaacaaaatccacaattcgttattgtcatgaattcgtatctctcatttctaaactgttaagcaatatccgataaaatctaagaaatataaggggcaaaatgtaaattatttctcaagcattaataaatgagagatacgaattatagaaaaattaaagttgtttataattaattaattaatgattaaaccataaacgaaaggaaccctccaaaactaaacactcttcaacacatagcgtcttgtctgcaaaaaaaatcggagacgcaaaaccaacttgccgccgaatcttccttaaaccctcaacgctgctcttcgccgccgttgagacgatcacagtgatcgaatcttccttttcaactttctcgtcttttgatcaaacgagtttggttgagtttttgataaacgtgattaagcgattaatttcgcgttttaacaacaatctagattgtcctttggagattgaacaaatttagggtttttggggataatctaagtgtttatgatttgaaactttgtgtgttttgagattgttttgggcaatgttggattttcgagacggtttggtggcggcagagttagtgagtgttggggtttaggaagtagtagtagttattagggtttggaattgggttatgtttagggttttactagtttagaagatg

SEQ ID NO: 6516 - DNA, 3000 bp, Unknown
  misc_feature (1)..( 3000): cDNA_ID_1030500_gDNA_ID_1621096_Annot_ID_55689 3000 nt of promoter + ATG
atgtcaagctctcatcacagttatggcgaatctaactctagagctaaacatcaactccgcaagaaaccttttaaatgtcaatctcatcactaaaatgaacgttttcactgccatcaccatcaacggcgagaatactcgaaagaaacaaaaggcgaaaaccacggttgatcgttatggtggatctaacccgacttggaatcaaaccatcaaattttccgtggacgagaggtcagcccgtggtggtcattcgtcacttgtcatgagagtaatctctcgtcgagtcctaggcaacaaagaaatcggaagagttaacatcccgttacttgagctcttgaatgcaaccacaccatcatttaacggtgatggtaacgatcatgagatgaaactgatgtcgtatcaggtgagaacttcgtcgggtaaacggtcaggttctttgtctttctcgtaccggtttaaaccaaatgttccagtgatcactaaccggagttgtgtagactccgcggcaccatctcaaatcgagcatgcaccttcggctccacccgaattgccaattgagtttcctaagctgcctcagccgccgtatcttttgagacatcctttcgccgccggttctagccgtggtcttcttccaatatcatatggcgctgggatgaccgagcaaaccggtcacgctaataactatgcgcaaaccggtcacgctaacaactatgcgccaccaccgagacaaggatatggaccgtacggttatgtgtcgtcgggatatggatacggaagtccctcgtatcaacaacgtaaggagatggggattgggcttggattgggagccggactttttggtggattaatggtgggagacattgtgtctgatgttgcaaattgttatgatctttgaattttatttcattttgttatctctaaacatttcctttcccatatttacatgaacttatcatagggatgttgttttctagatctataaaactttttgttgtatgaatcaaataaataatgggaaagagtttaggtaaaacatggtaaatggcaaacaaaataaaaaataaaaaatttggtgtcaactgtcaagtatcaaaatcaacaaaactcatcatcaagcaaggccaaaacatccatatctcaagttccatatataataaacaaactcaccgaacacatttctcacaatcccaaatcaaaacttgttgtgtaaatgatccttgtgtatataatctgaatttctcttgaaactaagtctatatatttccgtgtatataatccaatacatgcacttttgtatattgtacatgcatccaaatcttcaatttttaaatttatctataaattaatgcattggattttatgtttttttcattcatgaatgtcaaaaaatttctttctttttttgactcactaatattttcttcctttttttcaataatcagtcaaaatttcaataatcactaatatttttttcctttttttcaataatcagtcaaaatttatcgataatttcttttcagcattgtcattaatcagttagtgccttagtgaaatgaaaaatgttgttcatcaatgatggacaatttgaattttttgttatttgataatgaatctaattatagtaaatcaataactgatgcattttccatttgacattcagttattgaaaaagtgaatttaaaacttatataccacatcgtatcagagccttaatcaaaatttttatgggtctcctatgggttaacattatttttatgaaagtaaattataattcttccctaaaaacttatgtattttttagtttcatcaaacttatcatgatttcagatcacgtctctcttttgttttttggcggaaaataaaaaaatgttaacccataagaatttggatcaagactttgataccatgatacatttgatgagagtaaataacacaaaatatttatatgaagaaattataatagactctcataaaaatagtgttacaacttacattctcttatatagaaattaggataaacagaaatgtaaataatatatttcgaaataatgttaaatttcctaaattctaatattaatatttataaatggtcatttaactttttcgtaccggttcgatgggacatgtgttatattcagttaaggttaccaccatgcgccaacttggcctctaccaagtcaacatggatatggaccttatggttacatgccgcctccgcctccaccgctaccgggatatggatacagaggtccgccacctcagcaaccgacgaggaatgaaacaaggcaataatatattgatgctattgtggatttagttactgataattagtgccttagtgacagttcaaaaatgttgttcatcaataatctacaatttaaggtttgtgttgtggaatgtttcatgattttatgaagtcttgcttatcaaaaagtatgatgattaagaatttgacttcatggcatattcatttgagttagcaaaacttttttgtgttgcaccttcaaatttataaatttatgatttttaaccatcgaaattatatatttgaaaagactatctctacaagccaaacccactgggccaccaatatgggtttatctgcgaaatctgtgaaccttagaaaatcaaagcccatatccactttgctggaactttgctggaatgtaggttagacaaaaccttaagacgcagctacaagtctcttatgtggcagatgtcaaaattaatgagcacgtataatttacccaagaggagcaaaataagattagcagcttaaattaattgtgttggattaaatgaaacttgcactatgaatggcaaaaaagaggttacaatctagcaaccacctcataaaccctcattaatgagatactgactcgtgaaccaatcaaatctcaagtttcgtagtttaaataagtagtaaacacctcctgatcaaagcatcaccaccaccaaatatcaaacgcaaaaacctattatcaaaagaactagggagaaatg

SEQ ID NO: 6517 - DNA, 3000 bp, Unknown; identical to SEQ ID NO: 6516
  misc_feature (1)..( 3000): cDNA_ID_1030500_gDNA_ID_1621096_Annot_ID_171036 3000 nt of promoter + ATG

SEQ ID NO: 6518 - DNA, 3000 bp, Unknown; identical to SEQ ID NO: 6515
  misc_feature (1)..( 3000): cDNA_ID_2173556_gDNA_ID_1621096_Annot_ID_171031 3000 nt of promoter + ATG

SEQ ID NO: 6519 - DNA, 3000 bp, Unknown; identical to SEQ ID NO: 6512
  misc_feature (1)..( 3000): cDNA_ID_1842138_gDNA_ID_1621096_Annot_ID_171017 3000 nt of promoter + ATG

SEQ ID NO: 6520 - DNA, 3000 bp, Unknown
  misc_feature (1)..( 3000): cDNA_ID_3090439_gDNA_ID_1621096_Annot_ID_171014 3000 nt of promoter + ATG
aatggcaagatttagcaagagaaccgcagagcaggaatgcttcttgaaagcagatacggtgacaaatgtagatacaatgctgtaaaagcatgccacggataatgctaccacaaagtatctacacattagcaaacgaaaaaagtggatttagttaattaaatactacataaattaaaagatttatacgatatttaaatcatctgatacaaagatgttttttaaaataggttgacaaaaaagaaagaaagaagctgctttatcattatcactgaacatttactataattttgagtctttttcgttaactaaagttcgccaacttacttttgactttccacaacctttgtttcgaaattccaactactcccacacgtaaataaacaattcatataagatcggcgatttgtatgtataaattttacttgttaagtatatgtttaaacatttacgtgatactacatcctcttttccatatacatgaccaaaatcctcttggtttctcaaaattaaatatatatttttgtatacatgaaaaaatccacgctctgaccagattttcaatggtccatacatgtgaccgatcaagcgatcattgtattacactatcctaatttgacatgacttcttctaagttaggattaagatatggtttaagacccgtgtttgataaaacaacctctattacttctccaaacaacacaacaacccataattatattgtctacttagtttgactatatatgagatatacaaatcacatatgaactctggcccttagtcacatttactaaagatgatcaatcaaattcgagaaaataaaagaaaatattaattaatgaattattaggatgaacttacataagagccggtgagttggtgaactctgcagcaggaatacgaatgggagttccaggaaggaatatattcttggtctgtttacttgtaaccattaccactattgatgtcaaagtggctgcaaacagaacaaatcttaggacaacttgagtcatcgaacaactcttcgtcgtggtgccggttcctggcgcggtcgatctctcggtgtccaaagtcgatttggtttcataacccatagcttaatcttgaattgttataggaaaagtgaaatgaatttttcgttatggggaggtggtgaaatttttggtacgttgagagggggttttatattgtggctttgtgtgtgttagcaagaagtaattgagttttttttattgctataataatgtttattactattataatattaggtcgtgggactaatttggtgggtgttttggacacgccagagatatttgaaaattcataaagagtcaatatgttcatatatatccgtaagactcatcttctggcattctcatcttttattggtcttatggtggctgttaatgtgaaactacgctaaaatatcgtctgtgtgtgagtgtgtgtgcgtaaattcatgttgccgatattagacaaaataaaaaaggaacagtcgtaacctatctacgtgtatacgatagaccagagttgacattttaattaaaattatttccttcctttattatgagatatatcgttaattatatgccatttcataaaacgcctaatacatttaccgcaaaaaaaaagaagagttacattaagtatccacaatttgacatattttcgtgtatttcgtatcttcaccaccaaaggtaaatgtgacttagttgatattggtttatggtctagaataacaaaacaccacaaattactaaaaatcaaaacaatttttttatctgacctaattaattaagccgatatttttttttatgaaaggcagtttaattgagatcagactagatttttgatgttttgttttcaaatgtaagaaaaattacgaataatatatacaggacaccagattaaataatattacaaactaatgaactaatgataaaaatgagtagaaaataaaataaaaacttgaaatggaccaattccaacctcggagtctctcggtaagtcggtttcacgtaattaataaacaaaattataatgttgatgattcggttacatatatcagattataggtcgtttaatccacttaaataaagataagtgagcttgcaataattgaggaacacttttatgcatgaatgaaaaatgataactaaagatacgtgaaagatttgtctaaacagattgttgctctatttgtaaattaacaacaagaaaaaagtaagatacgtatggccattggccattactatttaaaattcgcctaaaaaggaagttcacaaaaaagtattaaaaataaaataaggcagctgtcctgaataaacgaagatcgttgccttgaatattgaaagtgtatatgataaggcaatgatcacgacagcgatgatgattgattttgtcttgcattcattttgtcaaagtcttttgtcctccaaaagttcaagcagatgtgcttctttttctataactatacgtgtttataattttatatacacattgtcaatatgtgtattaatgcgtatttagagttttctacgggtgaatcttgaaattttttattactttcatattgtgcaagttgcgacatctgaaagcagcagctgaataatgaaaatatagttcagaaaccataaaatatggtgattttgatatttgccttcaatatcaaagcttttactaattaaaaaatatatagtgatcgaaaattcacttaataaaatacagttttattttatacctcataattttattttctggtactatagtgatcatctatgaaatacaaaatcataaatcttaataatttaataaaatactattattataaacttacgtacacaattaagcataaaattacatctcttaagtcttaattaacataattaaatataaactacttaacataaaattatagaaataaattaattttaaaatctgtatttttaaaataatatatcaatgtattaactaaattaaagcagggaaatcaatgtgttaatg

SEQ ID NO: 6521 - DNA, 3000 bp, Unknown
  misc_feature (1)..( 3000): cDNA_ID_3090447_gDNA_ID_1621096_Annot_ID_171012 3000 nt of promoter + ATG
ggcacacaaaaagttcatgtatgtttacgaaaaccaagaggttgttagtatatttttttttatggaatttctctaagatcttaatattctttgttagtttctttaacaaaaaaatatatattctttgttagtgtgagtctataagtattaagtagtcttggaataactcttttgtaaagctcttcatatatgttttgtaaagaaatatttctatgcttttaagcactcttcaaggtatagaactagaagttttgacagttttataaaaagtcaatggcttaataagttaatattgacagtattatcaaaagtcaatgctatatgtaattagcttatttgttagttctaaacgcgttatgtcataatttattattaaaaagtgatcaacgttgggcatttggtctagtgatcaaaattttgcagatgctgcaattaacaagtctcaataactgagttttctaagtgattatctttctctcaggcatatcatcgaacaacttacaggcatccaccaaagtctaccaaagaagagctttttcttggttatcctctggagaagatgagttcttatgagattgggcatataaatctgatctgggcacaagccgtcttcgaagttcatggcctacagagaaagaagaaataaccaaaaattgacgtttttgtctgttcggttaattttgtctctttttgttgtttgagtcaacatcaacaaggtatattttttatgtggtgagtcattgtcattgtcatcatcatcatcatcagcagcagcagcagctccttcacattgtaaatagtcatacggtaacgtgttctctctagaaaccaaagacatcaaaggaaaatttagaattgataaaaaaaaaatatggatacaattcgatttttttcttgtagctctctccctcaagacataatcctgaagatcggctcttctcttcaggtttttgcttgtattttttttactaattcttcagttttttttttattgtgatgctacttcttggtaaattgtgtgctatttgatgaataggtgattgatctttgtgcattaagtagctgttctacgttttggagagagttatgtggttctgatatcttatgggaacctctgtttaggcaaagatggcctttattgtcctcatttgaatctgatggagacaatactctgtttctttaaacccaaaccaatgaaaattctcaggtagaaatgagacagttccatggattcttgtttctttcaaattcaagtttctgagttgttttagattttggccatttttgtaggatagtgagtttgtttgttgttgaattgaattctatttatgatgaattggttctcattagatggatgatgtttgattgacatggtagagaacaattgtttagttgagatatttaacaattgttctgtcttggagaaacaaattactgaggcatattgaaggtgatgtgattcttgatattatctgctttaattgtggatagttggattatagaaagcttgagacttttttcttgaagaggtgatagttggaattggacatggtcatcataatcgtttatatatctcaacttgcagttagactttgcttgtttataatttgttgttgtggcagagactaaaattctttgttgttgcgttagcattactttgaggtctattacaggtttcatgaatagtctattttaaagcttttgtaggaatggagaagattttatgtgatgcaacacaaggaaatggcatcaagagcttccgaggtgattaaatatgtgactaagtctcctgctacgttgtctttagaggcaggtatatatctgcacgcggttgaaaccatgagctcgatgcggtttggatttcaagatgtggagttatttttcttcaaaccaaacttaagtgtgctgctcaacctcattggactcatttactgcatacaacacttgaaaccgcgggttagttactcccagagaaagtcgaccggcctttcggaacattttctaacttctttaacattttctttctgcagcgagagcaagtcgtggatgtgctaaggcaatgtggaatctcagagcagctagtttgggtgaaatggttaacgttaggtcgatggtcaggtgggagtcgaatgagagacgacatcgtgtcgcgtcaggtctctctagtcgatgttgtaacagggaaagaagaaacggttctacgagtgcttcaacgaggagttgttcacgaagttctacgtgtttgtatctcaaccgttgatcttgcctgtgcaccttgcagcagtagcaccatcagaaactactaaactgtttcaaggattcgaggattacaagttgaattggattcaatgaatgtgattaaacatgtgatattgaaacagtattgaagttcgagtaaataataacaacgcgcaattcaaatgcaaacgattgtatggagaattaactgtaagaaattcgcggtaaaaaaactgaaattataggattcatatattgggccttagtatattttcggcccattaccaaaattatcttaaacaagtttgagtcctaaacccttttctccggttacagctacaccgccgttttctctctccgccgtcttttctcttcttctccgactggtaaaaatcctctctccagaactctggtctcccgttatatatatatgctcgtctacattctccaattgcttctcgagttcttagctcatatcagtcacatgttgttctctgtaaattcaattccctaatttcaatttgaaattttctctgttggtgaaaaggctctgctatttgattaggttgatgcatagtaattcgatttcgaaactctgcttttaattccatagactatataatggaaaagatgatgataacaagttacttgactgatgattatacaatcacattatgcttatgctaaagtttttttttttgtatgttcatgtagaatctgtgaaggtgaatttcggagttgagaaagagagattagcgtgta

SEQ ID NO: 6522 - DNA, 3000 bp, Unknown; identical to SEQ ID NO: 6508
  misc_feature (1)..( 3000): cDNA_ID_3090314_gDNA_ID_1621096_Annot_ID_171003 3000 nt of promoter + ATG

SEQ ID NO: 6523 - DNA, 3000 bp, Unknown; identical to SEQ ID NO: 6507
  misc_feature (1)..( 3000): cDNA_ID_3048467_gDNA_ID_1621096_Annot_ID_170996 3000 nt of promoter + ATG

SEQ ID NO: 6524 - DNA, 3000 bp, Unknown; identical to SEQ ID NO: 6506
  misc_feature (1)..( 3000): cDNA_ID_2173491_gDNA_ID_1621096_Annot_ID_170994 3000 nt of promoter + ATG

SEQ ID NO: 6525 - DNA, 3000 bp, Unknown
  misc_feature (1)..( 3000): cDNA_ID_2108258_gDNA_ID_1621096_Annot_ID_171059 3000 nt of promoter + ATG
tattggagaaagagtttctgagagagagagaaagagaaagagacagagagacaaagagagaaaggaaagaggaggaggcttcttaattgggggaaacgtgacttgaagtcttaataatgtttttattttatttgttcacactataatgattcaagtatgcaagtgtgtgtctattggtgtgaatggatagtatcggatgaatgaatgacaagaaaacaaaattaatgatttggttaaagtataatagaggaatgaagtgaaatagataatggacttttcttatctttctaaactggagattgtttttcatgttatgaaaaaagtttactggaatatagatttacctcactctgtagcaaattgtacccttttagtggaatataaaaatataattttctacttctttttacccatcatttttatttatataaactagtataagctacatactagttgattttggtctataatatccagatttgagactaattttggcaatcaatatgagaaaataaatttcatgcaattagttgcaccatatgaataggattggtaaaagtgatatagttttcttcttaaatcacccataaatcttaacctaaggatgggcattgaagatatgtaagtagttaagtcaatttgattacccttttctgaccggagtttgattctactaaatcgcgttatcttgcgtagtatggattgactatacatcgagtcttgtggatccaaaaatgtatataaaataaaagatgggcacaaatacttggtaattttcctttatccaccttgaaaacataaacactcatcattattaagataactaatactcattctatttcatattagttgtagtttaaggtttttacacacatattaagaaagtttttaaaaattcatttaatatatctcttttatataaaaacatcatttattataaccaattcaaccaataaaaaatatataattaagtatagttggttaaaaagtattgaatatatttattatttatacacaaagttgaaaacaacagttattgtgaaaaaatataaaaacctttaaattacatttatattgaaacaaagggaataataagtaacataactttgatacttacaattaatttgcaaatagttttacaaaaaacacgtaatagaacaaagcaagtaaagtaaaatatttttagcaaatatttgaaattgaagatactcgtttctcacaagtcaaatacgaatactaattttacccttacaaaatgggtcaagtagcaaatacttgtcctgtgcccatccctaatttttgcaagcaagatgcactaagtatgagagagttttgtagaacctagtgttttatagcaaatctgtaactaatcctaaaatatggaattacataagtagtaaagtagcaaccaccggtttactttctgaggaattagcaaactattaatggaatgaagaccctttctggggaattagcatacaaaactaatatgagaatttcatgtggtgattattggccaaggcaaaagtcttgactacataaattctaccttttattcagactgaacaacagctcttttaatttttacttcctgcgctagttttttgttcctattaaaagagtcattcaagatttcttaggtaaattcttaaatgaactaaaaataaattttgttaagtaatcagaatcaaaggaaaacgatggtataacagtctggtatcatatcccacttggttgctactcgctagtaaacttcaaccacaaccctctgtccctctatgacgttgatgccacttttaagactaacaacaataatattgtcttttttttcttctttcgaatccacatctcttgaaattttgttaaataatttaaaatatgtaatctatatgtctgtgtgtacatatgcataaatcatactccctctgtttctaaatatttgtagtttaaaatttttgcacacaaattaaaaaaccatacaaatctcatttaatttatctctttcctataaaaacatcattaattacaactaatccaaccaataaaaaatatgatgtaaaatacaattggttaaaactattaaatacatttaatgtttgcatagaaaagtaaaaacaacacttatattgaaaaaaataaaaaacctttaaactacacttaattagaaacagagggagtaatacggatctacgagaaaaatttagtgaagtcgcggtcgaaggaccttaggttggtggctagaccatttcgttcaaatcaatcccactttctttcatcaagataacaaagattcacaaacatccttaccaaatgatacaaccaaatgaccaaccaaatgataaaaactacctaaggtctatcatcaagtttttataagttctatttatcacttaatatcacaatggtgcattcgagaggatacaaccaaatgaccaatacacatgtatttttaactgcttgtaagtatcacatatctcatgattttaaaacaaaaatattgatttacttgtttattattattattattttttctatacttatttggtttgatagtagatgtttttatatatatttaagatatcattttatatatcttgagactgtatttatacctctcttctttattctacaaactacctgtcaaaatagttggttttgaaatgtaacattggtgatgatttttcttttgtctttaaatgtaactttggatgacaaaattcagtaataataatgggcctgaggttatgaatatagaattccactttatcacattggacccaaatttgccatgatataatataaaacgacgtggtatcaagtgttcagtgagtgtgagtcctccgacacgaataatctagaaaattttactaagactagtgtcagtatttttctaccacactcgtcgccttgctttacgctttattctctcttctttagctttttatttcttcagcaaatctgatttcaaaaaaatttcatcgaggaaactgaaaaaaaaaa

SEQ ID NO: 6526 - DNA, 3000 bp, Unknown; identical to SEQ ID NO: 2905
  misc_feature (1)..( 3000): cDNA_ID_3070480_gDNA_ID_1621096_Annot_ID_171056 3000 nt of promoter + ATG

SEQ ID NO: 6527 - DNA, 3000 bp, Unknown; identical to SEQ ID NO: 2906
  misc_feature (1)..( 3000): cDNA_ID_1814718_gDNA_ID_1621096_Annot_ID_171055 3000 nt of promoter + ATG

SEQ ID NO: 6528 - DNA, 3000 bp, Unknown
  misc_feature (1)..( 3000): cDNA_ID_1814730_gDNA_ID_1621096_Annot_ID_171050 3000 nt of promoter + ATG
agttgggtttcccttgtaaagccgtgaatgatggcctctggttgcaggttcgttgtccttaaacttgctttgctttctcattcagccagttgtagaaatgttgggatggttgatgtgcttagcgttgatacatttgacttaaggcatttacatgagcaattctagtctagtgtttcatgttagattacaaatgcaataatattgttaataaatgcaataatgtttatgtgtttgactacatttcagatgcttctcagtcaaagggtgcaggaagttgctgccaacacatgcaaaaggtgttgccttatcagtattgcatgtgcgtgtaaacaaggatttggggtttcacatggtgcaaccttcaacaattattattgccaagaaaacgtgcagaacaatatgatgggagacatggataacgtatatgtgccggaatcttctcaaggcgatgggataggcatctttaagcctgtcaggatcagtgtcagaggacaacatattgatggacttaccggcattggatgcgaagctacatttgtaccaccacctgcttggcctcctactccttttgtgtactctcgtgtccctattaacagaaatggtcagcaatctattgctagtgatggttctgaaggtagaattgatcagagtggagaaatttcaaaagatgggctgacagctcttgttgggttgagccaagggacaagcggtgttggtaacaatcctcgtggagaacaaactgagggagggcgtggcagtggagctactgttggaatgtcagaaccaaaggaaccttcagtaggtactgagtgggagaacgcaagttgtaccatatcacttgatacaaagacacctttgtgtcactttcctccctttcgttttgggtaacgtttccagccttatttacttgtaaacaacactcttggtttattccaattgcggtgactccttgatttgtcctgtttggcaaaatagttcctctcagatgtgtctttttcattgctgcagagttgaatttgaagatgtccacagactcgctaacggtcatgtagagcattctcctgaattcttctatgctggttctctgtggaaggtatcagaaactcacaactaagtcgtcaagcttttctcttcgagctgttcttgctttctaagaatgaaatatgggttttgataagatgttttaataccatatccagattagcatacaggctttcaatgatgaagatcctcaaggacgccgaactatcggtaacccgagttaacacaatgacaagatcacatgttttcctcacgttagattggtctgtcatagtatacataactttgataatcaatatctacaggattatttcttcaccgccgcgaagcagagatagtggattcagtaaggaaggttagttttctgtggtctattgttataaaagagctgtttagagctacttaaattgtcatgtcttgtgaaataacaatctcttctgccacattcaggtccatgtttacatagatcctcgtgacaaagtgactgcacgttaccaggtatgttacaaatatctatttgcaagttctcgttgaaattcatataagattccatttctaaccccttgttttgatgcatctagtcatggtttcctcataagttatatcattttcattgttcttgtagcttatctgcccgtcgaaaagagaagtgatgttgtttgggagctttaaacagagaggaactcttctgcctaaagctcccaaagggtggggatggcgcaccgcactgctctttgatgagctctcggaacttctccagaacggtgctctgagagtggctgctgttgttcagctcgtttagaggtgtcttaaacccgagagttgtatgtaaaaaaactcaacaaaatccacattttgaagttaaccctcttaataaatagtatatattctacttccttaaactgtggatgtgtttgtataaatgagtcacagaaactatttgagagaaatatcaagttttcagaataagaatgtctttttatataacagtcaactgcatcatccaacaattggagaatccaaggaggagagccaagatcagggtacgacaacatctacaaagtaccaaacataagtaacatacaacacattctaacactaaagaacagcgacaaaatggtaacttggtaatagcaaaaacataacaactctcaataagaccaaacacaaacggcgtagtttaatcaataataatgaaccggaacctaccggttcaagcaatcggttcatggttaacaattaacaagtaaatgtaaaaccctattggtacacccttgccggagagaagcttttgtctcaccactcaccgtcacaacttgtgcttcctctcgtcctcgtcgccgtcgtcagagagaaaacgattaaagctggtggtatggggagagataaagaagattaagacagagatggattcggttgttccatggatgagagctccggttgacgtcagcaatgtcgaaaactgcgctctcgataccctcccttgccttaatcccaagtaaacatcgtttatctgtttaaaagtttttcgttttgattgaattatctttctgtttacgacttttgactgaaacttgggcttcgggaaatctaggcaacacaacagcgttttgaccttactatgtcaaagttgttcgtttctaaaggttaaattttgatttggttgcagttagagatttctcgagttattatttgctctttcgaattggagtattagatactcaaatagtatacacttctgttaatactgaagtaaaacacctccaaatttgcttagtgttaaactgatgttctgtctcttgctcttcttcttcttagatcaatttcttgtttgaaaattttaccatatacttacaatattcatacgagtaagaagaactgttttggatcacttggtgcgtgatgaatgcctcatttttcaagttttgatgtgataggttgaagaaggcattggagaac

SEQ ID NO: 6529 - DNA, 3000 bp, Unknown
  misc_feature (1)..( 3000): cDNA_ID_3090413_gDNA_ID_1621096_Annot_ID_171049 3000 nt of promoter + ATG
ggatgtaccgaatagatattggattgtctagcgatgaatatgagatttagtagactggaaagaacgtgtagctatttttgacttgaagtgcatgcaaagttgagcttgtgtagtataactatatggaatatgctaactagtcttgaagaggaaatattttgcaatcttcagcttatcttaaaattttaggtgctgctcaggattctgagcaaagacgaccatcaaacgaagttaagaagtcaagaatatctggaaatcgagtgggcggaacaccaaatatgaaagctggttctggatttggtagcacttcattgtcagagaaacatggagacgtcaggaaaggaacaccattgagaagagcaaaggagaaacaatctgagaaagagaataaattgtggtggctcaagcttccctatgtgctggtaggtaaataatattggatttttggttaaaaagctttctttgccagatccaattattaattcacaatcaagaacgaactatcacaaaatattatgagccagacacttaccgttttctcttttcttcagagaattctcatgcggagtaatatcgatcaagacatatctgagggatattttaccttgaggaccgaatctatggaacaaaatgagggtcaagtttcacatatgattgcatttgaagatcaaagtgatgctagaaacttctcttatctgcttgaatcagtttttgaagacttggatgatttcagtgccgatatagctcccgtaacaaccaaggtagatagttcatttctttaccaacttgattcttctttattaatgtctgtatctgtgaagtttacttgtttaggagaattttgttccttaaacccttaatttctcttcatgatctgagagtatactgaattctaagagcagtgagatcgtatttttatttataggatctttatgaggaagttagttctggtggcaagaatgtgatagttgtgaggaagaggcagcttacgttgtatgctggacaaccatttgaagacgttgaaagagctttgcgaactctgattcaagaacgaagatgaaaaaagtaacaacattacttcggactgaaaaaactagagagcccagagatgatcaatgtggagatgacaggggcagtaagaacaatggttccacaacaacaatttttcatgaagcttaaagaaccactgagcttctgttgtattatggtagtagcattggaattgagaggacagatccactagaaataaaaaagattgtttatatcatgtaaaaacgtattttacatgaatcagagagaacaacattttcatcttcagaattttattgagatgcaacgatcttgatcatggcttgtgcattaagccctgttacattcttctcacaaaacttcttccaagcttcttgcttgcttccttcttcgtcttcttcttcattccatgtaaatttctcgaaaagcgagttcaccatactccttgcagcttcccttgcctctggcaacttgtcactcaactgatccgcagccatttgtgcgagcagaatcatcccaaattcttccatttcatttacctcctgataacaaacatagagacaaatatatcaatcacacaattcaagaaaataataactttgctctgagcattttaatcattgttgaagaattcaaaataccattttagaaacgcagttggaagtagacacagcagctttggccctgacacgagggttactgtgacggacataactctgaagcttacgcagaagcggcaagcgagccaccgagttaaccatcgtgttcagcgctttctctgcttcttcacacacaaacttcttgtcttgtgaagctttcatcagcaactgcaacagctgttattttcaccatcaagataccaaaatcaaactttattattaaatcaacaatccatagccaatcaaaaagctaaactaaccggaaaaaacaaaaaacaaaaatcaattttaccagatcgtccatagatttcaaatgaggtccttccagcaacttttctccataagcagtgaagatatcagaacaagtcataatcgaagtcttgcacaatgcacttctaggattcttcatcgccttcaccatcacaactataagcttttctctacaaattgacaaaaacaaaatcatcaccaagaaactccataagatttcagattctggtcaaaaaataaaaaatactcacagaattggtagcaacagagaagagtgatgaattgcaaatctccttgtgttgttcaatgagtcacatactttaatccaatcctttgatgctaattcttcaagtaatctctgtgatagattgaatcaataatcatcaaaaacaaattactacacataaattcagaatcaattgagaaatttaattacctggacagaagattcaggatctgaaaatggtttgagattctcagaagcaacgtattcgacggtcgattcagccacagcgacagggttgttttcgtcatttagaccaatctccggttgctttgagagtttggccagcttcttaggtcgttcctgtgagatcggaagagcgttttcaatgttcctcaacgccattagagataagagaaagagagagattttgatttgaaattcgttaggggaataataatcaatggtggggttgaaaagcttaatataaagagaaatttttgttacctttttcgcattttatattcaaaaattcaagaggaaaaaaagcaaaagaccgttggtaaggttttggctccaacggtcacaagcatcggttcggtttacatgaattagattcggttatctggtttattgttcaattcacacgacgtcgtttcataacttttaagaaacgacagcgtctaagttatcacttttgcgccacacgcgagtgagagctaagctaattctccgtcttcaatggcttttctcttttccccaattgaaattgaatctattccctagaacaaattgattgtgaatccggcgtcatttttg

SEQ ID NO: 6530 - DNA, 3000 bp, Unknown
  misc_feature (1)..( 3000): cDNA_ID_3090424_gDNA_ID_1621096_Annot_ID_171042 3000 nt of promoter + ATG
ggataagagatgaatgacaatattatatgtgacgcattttacttgaatatgctaccaactaaatgaaagaaattttatataaggctcgaatttgaaattagtggaattgataaattttgaatgaatgaaaagaattttgccccccaaaaaaaaaggaatgaaaagaaataagatgaatatatatatatataaaaaaagcttggttgttggttcattgattgatcgatttattaaaattaaaagcttctatgttctttgaatttggagaatgcaaattatgatcaacgaattattcgaaataggttggttttgtattctagaccaaaccggtttgttcattggtttatggaaatttctgaatatctgatttgggagcttcatttcacaatttcactctatcatggtgtcaagaacagaggaggaagctcggttttgagatctgtacacgagttggttctgtatcaacttgttgacatatcaatctgcagcaaaccattgtgtcatggtgcatcattagaatcaactaaaccgcggaactacatattaagcatactagtacaatctcaaggtagtggtaacagtagtggcgagaatatcataagaacaaacaattttcatattatctaatgttctgcttctttggcattatcatcagtcgatagagcttccactttctcttctgtcacctcacttctcttatcaatttgctcttttgaatcttgtagctgcaaagcacaaaacagataatcgtggaggagaaccatagattagtttctgcaagtctaaaaaccggtcttttctttgggttataatattgaaaatacttttaggaagaagagtgtatcacgagagactcacgcctaagcttttcaggctagcggaaacatcatcttgctgttgattcaaggtagttttcagatctttgaattcctagtttttatggagacaaaacgaatcaaacatgtatcatgaatagaaaccgtttaaatattcatgtggctgctggctcaatatacatacatacctcacgaagctgctcaacttcaagattcagagtcttctttagcccagagagctcctgtaaaaaaccaaggaagagtatacatcgaatgtcaaaacagttcaaactgatcccggctaaaacagcaattctcttgcttgataccacaaaatggataaagaggactagatatggaactcacctcacggtagactttaacttgagtgtccaatttacctctccaactttgcaagtcctgcgacgataagatataaagattggtttgttttaaaaagacaacagatgttctaaaacaacatgacaatgtcagagatgagaatgaaagtgttaaaacctgtttcagattctggatcctgtttagtaactcagcccttgattcattcaattcctacataaaacgaaatcaagacttgagaaaaaccgcttgatcagaagatttgactaaaaacactaatagtatctaacaacacagcgacgtaccgtgagcttcgaatcaacaggattggtattatctttcttctgcagcagaaagaacaaccaagatcaacatcaatttcaatttaaccacttaaaaacaattccacagggaaacagatattataactcttaagctgtacaaaccaaaatcataagcctgttatatatatatatataaacaagaaaagtatgctttaagaccaatgtgagattgttgttaattgcacagaactaaagatatactacacagtaatggctcacgatccaaatctgacttcaaatctaaagagatactacacagtgatagcccaagatccaccaaaggtaaaaagctttgcatgtgaatcaactcaacatcaatgtaatcagaatctgaaattgttaaatccgtggaacgataaattcagacaattccaacaaaaacataaaaatacacagtaataagagtaaaatttcaggcaaaaatcggaagaaacgaaaccttcttctatactataccacttgaattcgaatcgagaatacagaacacaatgatatgttcgaagttgcagacaaaacacagatctaggtccgaaatgccatatctaaactcgaaaccctagataaattagatcaaaaaccaaattatattaatctcattttgaacctaaaattcagaaacctagagctccgagactacgtccgcgtccatgaagcgtaaaattaaagcgattaaagagaaattgagagagtttacagtagcagtaggagaagatacggagagaggagccacgggagatgttgaatcggaggtttggtccgccattatcgatgtaaactcggaatcaaatttgtcaatagagtagaagcttgtagggtttaaggaagaaggaagaggaagaggaagaagaaggaagatctgtaagtgagattggtaaagtgagaaacaaacaaacatgagaataaattagtgatgtcgttgcgagccacactcaaaatttcaaaaaacaaaaaattaataaaatatgacaacatttcaaaatttattttatgtgatagggttgttttccccagaatttattttattctgtatattcatttctttttcatttattcactatgcataagttttacatttttttgtgttttaaaaagcatcaaaatactattgttttcatagattgatattgactttgtgagtatttcacacttatttcctgccgaaatttaagatgcatcttcgcttttttgaattgtattagatttataaataataacacaaatttaatatgaagaaaaaaaatatttaattttcctaccaaaaaaagaaaaaattatttaatttagtatacaaaaaggaaaattaaaaataaaaactaagaaatgtagttgagttgagtcacgggcaaagtacttggtttctttgcagcaaaggtaaagaaagaataaaaagactctctttctctttctctttctctctgtctgagccaactcggttccatactcggtggcgactcaaaatg

SEQ ID NO: 6531 - DNA, 3000 bp, Unknown
  misc_feature (1)..( 3000): cDNA_ID_2173579_gDNA_ID_1621096_Annot_ID_171041 3000 nt of promoter + ATG
tctgtttatgttataatgcagactttaagtcttttatcaactagggtggggtttttgtaacacaaatgatatggacttctcttccttcatcaaaatatacgaaaaatgtatttgaataattattgattatttttggtccaaaaaacttgaatccagaattattaattggattaaaatgtttttgagaatatttttttgcagatgataccgcccataattttcttaaataagtttttgattggacttcttttgtctttcacaactcacaagtgagaaagactaatatcatagttcttttaataatcgaacaaaaattatcagaagcgaacaaacaggaaacattcgcaagaacaatgagtaaccaacctcatgatacaatcatctcacgaagcacacaactctcgcaatttagacagttcgtacataagataaatttatagactgccacaatcatatcgagtatgaccaatttgatcacgaaacagaatcatcaacataactacaagcaatagcttcctaaccggcgaagaagctgctattaaactaccggtaagataagtttgtgtcgaaagccccacgagtctacctcttctttccctaatgtactcatcaattgcttcttctatttgcatccttgaagagaaggaagatacattaattataccgtcttgacctaaatttaacttcctccacaagcatctagccaaaacaacaccgtcctcaagcgcagccgaacatccttgtcctaagaatgggcccattaggtgcatactgtctccggccaactgtcacgggtgccacgtcggaatttttccagacagaacatcccaaggagcacggtaccttaaacggttgatatacaaagagtccatatcacaattcttcaccatctctttccactcttctgagaattcgcggactgatgctagtgccaatcttgcgatatcctcttgattttttaagaagtttgagtctatttataaaacaaattataaatacgttagtgcgttatatgaaaacaatagaagtctatgtatagtatgaaatgtagcatgaccgggttattaattaccttggggacaatttcgcaaaacaacaaaccaaaagacgagtttgtgagttataggaagtcgtccgcttacgacgttgtccatcttgattcttataaactcttgtcggaatccatggtcgttccgggtaatttgtgaaccctctgatggcccgcgaaccgaggtctttagtcgggtttaatcctagaaatctagagactacagaatttgacccatcgcagccaatcaaaacctaaattaaaagaaaagtatattatcaaaatatataagacccatgcatttcatgctaaacatgttgctttcagtgaaaaacaaacaaaacacaaaccattaaaaccgatcacgacccataaatgtcactgtcggctaatataaggtatatactaaaaaaattccactacggcatcacctcaataattgatcaataaatatatctactgttgttaaaacgtgcctttgctttgatagcttctcccgtttttaacgtgcacaatcggaaacgattttgtttcgtcgagcttaaccgacaaaatatggcaaccaagccggagagtgccaagaggaagagcatgagccaaagctcgaaccaagtcgttccttagtacacctcttacttctccataggatgctggtccaaccgattctcttcgtttaatacctttctcgatcaaaacatctcttatcctgttttagtaccataccggaaatcattataactagataaggttagttaaaatataaatatttatatacttactgatgaattgggagagacttaagacgaagctagcttatcggcgacaccaagttgttgaagagcaagccagccgttagtctgaataccaaaatgctgctccttccgatcttacagactctgatctctccaacacaacgctctttatgcccttcctttataatcatatttgtatgtttagttagtcaatagttcatgtatatgttttctaatttaaattaccttataattgagaaaatgaggagattatagtgaacctgtgaagagcaagggaagttgcaagaccagcaatgcctcctcccacgattactatgtccaattcttccattcttctatatttgtatttcctccaaattttatgatcgttatgtcctgcaatgtcgtggacttatatgtgggggttgaagccacatggcaatatggcatgtcgtggttgtaccttgacccgcgtatttttcgttatctatacatattcattcacagcgatttttattggtatttgtcgattcatatatcaattaaactgtgtatcacacagatcgttatatgaaaccaattctgaagagagaaaaaaaagaaaagaaaaatttaagccttcttgtgttagaattactaattttaataatttatttaatatttttactgtattagtgattaaatgtataatttacttaatcttagaagtatatatatatatttaaaacaattattttcttacacgttatacaatatttgtaattaattgtatttatttatattagaaatatatatacctttttctaaaataatatatttttgttttgtcaattgcccttataatattagtaattcattgtatgatttccttataatatttttacacatgaaaaaatctctaactaaacatcttttcaataaactacatgaactatcaaatttgttataactttcagttatcctccaaagtccaaatattcaaagtgaattattcatgggttggatttaacaaaaataataatttcgaggttgaaatgacaatagatatttttaaaacaaaggaccaaagtcgaaataacaaaactcatcggccgcattaggtttggtcctaaatccctaaaaccctaaaaaaacacaatccctcttagaaacagagagcttctcttctttctccattattcatcactttcttccccgaag

SEQ ID NO: 6532 - DNA, 3000 bp, Unknown
  misc_feature (1)..( 3000): cDNA_ID_3090427_gDNA_ID_1621096_Annot_ID_171039 3000 nt of promoter + ATG
tcttttcttttttttctctcttcagaattggtttcatataacgatctgtgtgatacacagtttaattgatatatgaatcgacaaataccaataaaaatcgctgtgaatgaatatgtatagataacgaaaaatacgcgggtcaaggtacaaccacgacatgccatattgccatgtggcttcaacccccacatataagtccacgacattgcaggacataacgatcataaaatttggaggaaatacaaatatagaagaatggaagaattggacatagtaatcgtgggaggaggcattgctggtcttgcaacttcccttgctcttcacaggttcactataatctcctcattttctcaattataaggtaatttaaattagaaaacatatacatgaactattgactaactaaacatacaaatatgattataaaggaagggcataaagagcgttgtgttggagagatcagagtctgtaagatcggaaggagcagcattttggtattcagactaacggctggcttgctcttcaacaacttggtgtcgccgataagctagcttcgtcttaagtctctcccaattcatcagtaagtatataaatatttatattttaactaaccttatctagttataatgatttccggtatggtactaaaacaggataagagatgttttgatcgagaaaggtattaaacgaagagaatcggttggaccagcatcctatggagaagtaagaggtgtactaaggaacgacttggttcgagctttggctcatgctcttcctcttggcactctccggcttggttgccatattttgtcggttaagctcgacgaaacaaaatcgtttccgattgtgcacgttaaaaacgggagaagctatcaaagcaaaggcacgttttaacaacagtagatatatttattgatcaattattgaggtgatgccgtagtggaatttttttagtatataccttatattagccgacagtgacatttatgggtcgtgatcggttttaatggtttgtgttttgtttgtttttcactgaaagcaacatgtttagcatgaaatgcatgggtcttatatattttgataatatacttttcttttaatttaggttttgattggctgcgatgggtcaaattctgtagtctctagatttctaggattaaacccgactaaagacctcggttcgcgggccatcagagggttcacaaattacccggaacgaccatggattccgacaagagtttataagaatcaagatggacaacgtcgtaagcggacgacttcctataactcacaaactcgtcttttggtttgttgttttgcgaaattgtccccaaggtaattaataacccggtcatgctacatttcatactatacatagacttctattgttttcatataacgcactaacgtatttataatttgttttataaatagactcaaacttcttaaaaaatcaagaggatatcgcaagattggcactagcatcagtccgcgaattctcagaagagtggaaagagatggtgaagaattgtgatatggactctttgtatatcaaccgtttaaggtaccgtgctccttgggatgttctgtctggaaaaattccgacgtggcacccgtgacagttggccggagacagtatgcacctaatgggcccattcttaggacaaggatgttcggctgcgcttgaggacggtgttgttttggctagatgcttgtggaggaagttaaatttaggtcaagacggtataattaatgtatcttccttctcttcaaggatgcaaatagaagaagcaattgatgagtacattagggaaagaagaggtagactcgtggggctttcgacacaaacttatcttaccggtagtttaatagcagcttcttcgccggttaggaagctattgcttgtagttatgttgatgattctgtttcgtgatcaaattggtcatactcgatatgattgtggcagtctataaatttatcttatgtacgaactgtctaaattgcgagagttgtgtgcttcgtgagatgattgtatcatgaggttggttactcattgttcttgcgaatgtttcctgtttgttcgcttctgataatttttgttcgattattaaaagaactatgatattagtctttctcacttgtgagttgtgaaagacaaaagaagtccaatcaaaaacttatttaagaaaattatgggcggtatcatctgcaaaaaaatattctcaaaaacattttaatccaattaataattctggattcaagttttttggaccaaaaataatcaataattattcaaatacatttttcgtatattttgatgaaggaagagaagtccatatcatttgtgttacaaaaaccccaccctagttgataaaagacttaaagtctgcattataacataaacagaaccaagaaaatgtagagagaaatgtcaaattatccagtagcccactcaaaatgtagaagctgaatcaatggaggtgatagaaaacttatctagagaaaaccagaattgcaaaggctcaattcgaagatgttttttttgatgatcccatctttattcttatatatatcaaaagtttaatagtatagaagatcgattttttttttgtcagtttagatttttgatatactaggaaaagccaaaaagataagtattgtgtcacactcattacaacaagtacacaaaattgatattggatggaactagttgttttatccaaaagccgagttaatgtaagtggcgtcataggcttgcgtcaacaggtcaagttacttcataaacaaagagcgcttgtttgactcgcaaagacccaccacactcacgtaaattgattgtctcccaagtaatttaattgtcttaatgaaaagtcttcgctgttcctctactctatataaataaattaaaaacactatactacatgttccctataggactacagattattaaaacaactccccaaacaaaactttagatctgaaaatctcagctttgaaatg

SEQ ID NO: 6533 - DNA, 3000 bp, Unknown
  misc_feature (1)..( 3000): cDNA_ID_3090318_gDNA_ID_1621096_Annot_ID_170993 3000 nt of promoter + ATG
catgcatatctagccttacttataagcttttcagtttttattgaagtatactaaatgttttgattgttagaagagatagaacatgtacatattggacaatttactatccaccgttagaacattgcgtgaacgactcagtcatagtactagtcaggtttgtagttatagacatatcaagatttctgtctagttcatgtctatatcaaaggttgtggtatctctgcattcgaagacttatgtttctttttttgtccgtaaatttttaagatttatcttttcttgatagatatatatgtatcacaatgcatagcaatatcgacgtgattggcccagaatcaagtcttatctttggttgtgttcaataatgtaaagtccctttataagctggtacaatatgatggtgcagtgtttggaactatattataaaaggaatgatgactcagggaccatgtaaagcgttagtacaaatgtgtcgttgagacttgaaacttacttgggaccataattatgtttcttgggtttctttttttcagtgctagtaaactttctcatcagtttctctctcgttgattacattctaaaaatttctccatatatgctcatagtgaaaacgtaaatcatgtcttctgagtcgtgaaagctgaagtcgaaagtgttttagtttagggtaatttctgaaatgggctttgcttcaggttgctggaggtggaatcctaggatatttacatatttggagagaagcaaaagttatagcttataagatttttgtcattgttatgatttatcaattcttaagttgtacgtataatttatatttgtcttcggttaataagttattctcattgtttagaactacaactctttctcacattgctctgaactgaatcgcctagaatttgcttcttcttgtttcttaaacgctaagtggtaactaaacattattcatagtgtctgagtattatcagttaaacaaaaacataaataatcgtttcatttttaccaaaaaaagaccattaatggttcttaattccaaattgtaaatacaaaatttacacaagtaatgtcatgcttctaaagtctaggactactgcatgctaaactattcgttttaaaatttaaaatacatcaaatgaaagaaattagattgaataaaaaaatcaaatataaccgagcttccagagtttctctaagtaaattgagaacgcaagccatgaccaatctggtgaatatgaaaaaaactcaaatatttatcatttacatacaatgcacactagatacatatgaagattttaactagtttagtataagataaaaaacacaattttccatgattatttcattaaaaatcttaaaatttgctaaaaacaatcctgatactttgcattattatcattcatattacgttgttttacttttcaaggaactgttttatctaaacatgtataaggttatcaaatgattaacgtcaaatctgaaacaataatgtaaccaatatggaatttcgccataacgtggatacttggcagtggttacttggcttttcctttattttcttttggacggaagcggtggttactttgtcacacatttaaaaaaacacgtgtttctcacttttttctattcccgtcacaaacaattttaagaaagatcgatctatcgtgatctttctatcaaacaaaagaaaaaaggtcttcatagtaacgctacaacatcaaatatgtggttgctctgacatcagtcgggaaaataaggatatggcgccattggccacatctattggggtcccaacttcctttcacaaaaaaattaaattgggtgtcccaacttttatctttgatatagtgacatgagtatcgggagcattggacaatggataaaatgagaactaaaaaaattctggttaatttttgatcattgttatttaaaaggttattttatctataatctacccatattgatcagttttatttaaatttgtttagctaccgctcctcgagagagatcctcatcttaaaaatggaatatggaaattacacacgaccccaaaagtatattttttctctggagaatgctatttagagctttgactatatggtctgaattagaaagacgggaaataaaatctgctaagtgatataagctctaagtaggcgatgtgtgatggagaacaccttttctttaacagtcttcatgttttacagattcgcgaacttcgaatatccctatacggtctgtctaaccctcgtgtgtcttttgagtccaagataaaggccattattgagtaacatagacatgctggaatccaaccattgaagtcacaactgtccatgtagattctttggagaatctgaaaagtcttaataaaggtggtgtttcaaagaaaacaaaacaattgagttaagaaaaaaaaatatcatgtagtggtcgagtattatgttatttattgtgtagctaccaatctttattctttaaatctgacataaaatgctacaaactttttacctcgtctatagccccaaaaaacctaaccacggttctaaaaccacacacagtgattttggttgacgacaatgcctctccttcctcaaaacgatttatttacattttttaaatcaaatgttacattttataccataattaagtctttttacagaatacttagatggaagagatgtataaaaaaggaggaaattgtaaaaaacatatttcgatcaattaaaccaggattcataaaaatataagtatatatataaatgatgtttcgtttagcgatgaacttcactcatatgataatacttaacaatataagtacataaaaaataaaataaaattaattgtttacgaaaagtctacaaatactgcatgtataattaatgttctctttatttatttatttataccttaccaagatatatctataaccgcatagaaatagaaggcgaagagataatttccaaaaacaagaaaaacctctaagctcaaaagatgttgttgagaacg

SEQ ID NO: 6534 - DNA, 3000 bp, Unknown; identical to SEQ ID NO: 6532
  misc_feature (1)..( 3000): cDNA_ID_1814759_gDNA_ID_1621096_Annot_ID_55690 3000 nt of promoter + ATG

SEQ ID NO: 6535 - DNA, 3000 bp, Unknown
  misc_feature (1)..( 3000): cDNA_ID_1814754_gDNA_ID_1621096_Annot_ID_55693 3000 nt of promoter + ATG
attgcataactttttgggaaagatattgagggtgttctttgaataaatatgttgtacactgaaaatttcccacattaagagtaggggattgatattcatcatcttttcaaacgtaatcttgtaaagttcaacttcaacccaaagtcttggcctttgtacgtttgttcctcacttgggaattgggatgcaaagctgtgttgcaaaatgtttagaaataatatttactgttatatagtttttctggtatcattagtcacaaagcccgtctagctcagttggtagagcgcaaggctcttaaccttgtggtcgtgggttcgagccccacggtgggcgctttgtttttgtttttttaatccaaatttgatcatattctgattttagttttgagtaccttgactagtgactcttgagcatgtgttttatgcaagttttaagatatcctcgcctttaattacgctacgtagaatatgtgaattagtatggtacacccaaagaaagaacacaaatactttatataataatacaacatccaaagtcaaaaccttacaatacatatggtaccattttgttcccctctctctctctttactaatctctctactgaagacttttgtctctgtttgtcgcctgtctccgccaaaagctctaagtctctaaccatcacgtagagtaatttgttgtgtcttcaatccgtgcaattaaatccatgacaaaccgatatccagattatgagaacaagtagtagcaagatcccaagaacccaccagttttatcttcatgttctggtaaccacaaatttcctcctccacctgtgtcccttggttttcttgtattcccgcgccttaaagtatacaaattaacccttacattaaaatggctatcacggaaggtctatgaatttaatgtttggagtcaagtttgcctttacctgagagcgtagattctcggtcttgtcagtaagaactgttagattttcccctctgtcgattgcctgaaaatggatcaacaatattggaggtgtataaagcacagtgatttttgcagacttatcattgtaaaaggtaaagcaaaggagaatgatttgttgcttgtcttaagtgtggagaaagacataagagagtcaaatgatgagcattaccttgtcaatattctccaacattatacttttaacttctgaaacctgagccttgacttttattagtttttcaatctcctctgcatggtcaacaatataattcatgtgttccttcatcaccggcctgcaatattttaattttaccattaccttgtattcaatatattatagaacattttcctcaaatattgaaatgttttctaagtacccgaactccttgttgagacttttggcgatagctgtacttgcttttccacctccatatctcttcttgaaatcagctttcacacgctccagaaatgcgatcgagatttgcttgctaagagaatctttcgccacaacacaatatgctgaataagaaatttcaaagagccaccatatataagtgaaatgcaatccaaaccataacaaattattttgaaacacatgtgtgtagtttcatctccaaaccataacaaatacaactacatacagaaagaaagacacaaacatctccaatccgcatcacgtaaaggtatcaccaataataagacgcgtaatgtattcatcataaaaactaaactaccaaacactgaaagaattttgagactgcttagttactaattgaatctcccaagagaacaaactccacaaaaacatatcaagattcatgattagataacactttacttaatttgttgatggaaaaaattcttttttgattagatatatgtgcttaattggtatttacaaagtggaaaccaaacaaaatcagtaaaaaagttaaatcaatctaagctcaaatctcaatggaactaatacacaaaacactgttgtatcgccaagtaatgcgaatccaatctatgaagatcctgaaaatgccttaagtttcagatgatgcatatcagctaaccctgagctagatccatcaaaaccttaatggcttcaaactaaaaacattgttcgtttccagagaagaagatagagagagtgaccaaccgtaggcatcttcgacaaggaaattgaaggtatggtgatcgcagttgtaagtgaacttgctgttgctggaggacggaagcttctggagacactgagcagcaatagacgggaaattgcctgtgaattcggtatactcggcgaggatcatagttcctctggcgacgaagctatagataaacgattcttgacccattttgagtcgccaccgagtatggaaccgagttggctcagacagagagaaagagaaagagaaagagagtctttttattctttctttacctttgctgcaaagaaaccaagtactttgcccgtgactcaactcaactacatttcttagtttttatttttaattttcctttttgtatactaaattaaataattttttctttttttggtaggaaaattaaatattttttttcttcatattaaatttgtgttattatttataaatctaatacaattcaaaaaagcgaagatgcatcttaaatttcggcaggaaataagtgtgaaatactcacaaagtcaatatcaatctatgaaaacaatagtattttgatgctttttaaaacacaaaaaaatgtaaaacttatgcatagtgaataaatgaaaaagaaatgaatatacagaataaaataaattctggggaaaacaaccctatcacataaaataaattttgaaatgttgtcatattttattaattttttgttttttgaaattttgagtgtggctcgcaacgacatcactaatttattctcatgtttgtttgtttctcactttaccaatctcacttacagatcttccttcttcttcctcttcctcttccttcttccttaaaccctacaagcttctactctattgacaaatttgattccgagtttacatcgata

SEQ ID NO: 6536 - DNA, 3000 bp, Unknown
  misc_feature (1)..( 3000): cDNA_ID_1814734_gDNA_ID_1621096_Annot_ID_55698 3000 nt of promoter + ATG
tgtagctatttttgacttgaagtgcatgcaaagttgagcttgtgtagtataactatatggaatatgctaactagtcttgaagaggaaatattttgcaatcttcagcttatcttaaaattttaggtgctgctcaggattctgagcaaagacgaccatcaaacgaagttaagaagtcaagaatatctggaaatcgagtgggcggaacaccaaatatgaaagctggttctggatttggtagcacttcattgtcagagaaacatggagacgtcaggaaaggaacaccattgagaagagcaaaggagaaacaatctgagaaagagaataaattgtggtggctcaagcttccctatgtgctggtaggtaaataatattggatttttggttaaaaagctttctttgccagatccaattattaattcacaatcaagaacgaactatcacaaaatattatgagccagacacttaccgttttctcttttcttcagagaattctcatgcggagtaatatcgatcaagacatatctgagggatattttaccttgaggaccgaatctatggaacaaaatgagggtcaagtttcacatatgattgcatttgaagatcaaagtgatgctagaaacttctcttatctgcttgaatcagtttttgaagacttggatgatttcagtgccgatatagctcccgtaacaaccaaggtagatagttcatttctttaccaacttgattcttctttattaatgtctgtatctgtgaagtttacttgtttaggagaattttgttccttaaacccttaatttctcttcatgatctgagagtatactgaattctaagagcagtgagatcgtatttttatttataggatctttatgaggaagttagttctggtggcaagaatgtgatagttgtgaggaagaggcagcttacgttgtatgctggacaaccatttgaagacgttgaaagagctttgcgaactctgattcaagaacgaagatgaaaaaagtaacaacattacttcggactgaaaaaactagagagcccagagatgatcaatgtggagatgacaggggcagtaagaacaatggttccacaacaacaatttttcatgaagcttaaagaaccactgagcttctgttgtattatggtagtagcattggaattgagaggacagatccactagaaataaaaaagattgtttatatcatgtaaaaacgtattttacatgaatcagagagaacaacattttcatcttcagaattttattgagatgcaacgatcttgatcatggcttgtgcattaagccctgttacattcttctcacaaaacttcttccaagcttcttgcttgcttccttcttcgtcttcttcttcattccatgtaaatttctcgaaaagcgagttcaccatactccttgcagcttcccttgcctctggcaacttgtcactcaactgatccgcagccatttgtgcgagcagaatcatcccaaattcttccatttcatttacctcctgataacaaacatagagacaaatatatcaatcacacaattcaagaaaataataactttgctctgagcattttaatcattgttgaagaattcaaaataccattttagaaacgcagttggaagtagacacagcagctttggccctgacacgagggttactgtgacggacataactctgaagcttacgcagaagcggcaagcgagccaccgagttaaccatcgtgttcagcgctttctctgcttcttcacacacaaacttcttgtcttgtgaagctttcatcagcaactgcaacagctgttattttcaccatcaagataccaaaatcaaactttattattaaatcaacaatccatagccaatcaaaaagctaaactaaccggaaaaaacaaaaaacaaaaatcaattttaccagatcgtccatagatttcaaatgaggtccttccagcaacttttctccataagcagtgaagatatcagaacaagtcataatcgaagtcttgcacaatgcacttctaggattcttcatcgccttcaccatcacaactataagcttttctctacaaattgacaaaaacaaaatcatcaccaagaaactccataagatttcagattctggtcaaaaaataaaaaatactcacagaattggtagcaacagagaagagtgatgaattgcaaatctccttgtgttgttcaatgagtcacatactttaatccaatcctttgatgctaattcttcaagtaatctctgtgatagattgaatcaataatcatcaaaaacaaattactacacataaattcagaatcaattgagaaatttaattacctggacagaagattcaggatctgaaaatggtttgagattctcagaagcaacgtattcgacggtcgattcagccacagcgacagggttgttttcgtcatttagaccaatctccggttgctttgagagtttggccagcttcttaggtcgttcctgtgagatcggaagagcgttttcaatgttcctcaacgccattagagataagagaaagagagagattttgatttgaaattcgttaggggaataataatcaatggtggggttgaaaagcttaatataaagagaaatttttgttacctttttcgcattttatattcaaaaattcaagaggaaaaaaagcaaaagaccgttggtaaggttttggctccaacggtcacaagcatcggttcggtttacatgaattagattcggttatctggtttattgttcaattcacacgacgtcgtttcataacttttaagaaacgacagcgtctaagttatcacttttgcgccacacgcgagtgagagctaagctaattctccgtcttcaatggcttttctcttttccccaattgaaattgaatctattccctagaacaaattgattgtgaatccggcgtcatttttgatggaccaagagtatcgaaactctagaacgacggtgacgcaccaccaacatcatcatcaaatgaga

SEQ ID NO: 6537 - DNA, 3000 bp, Unknown; identical to SEQ ID NO: 6528
  misc_feature (1)..( 3000): cDNA_ID_1814730_gDNA_ID_1621096_Annot_ID_55699 3000 nt of promoter + ATG

SEQ ID NO: 6538 - DNA, 3000 bp, Unknown; identical to SEQ ID NO: 2906
  misc_feature (1)..( 3000): cDNA_ID_1814718_gDNA_ID_1621096_Annot_ID_55703 3000 nt of promoter + ATG

SEQ ID NO: 6539 - DNA, 3000 bp, Unknown; identical to SEQ ID NO: 2905
  misc_feature (1)..( 3000): cDNA_ID_3070480_gDNA_ID_1621096_Annot_ID_55704 3000 nt of promoter + ATG

SEQ ID NO: 6540 - DNA, 3000 bp, Unknown
  misc_feature (1)..( 3000): cDNA_ID_2108258_gDNA_ID_1621097_Annot_ID_55707 3000 nt of promoter + ATG
aaggaaagaggaggaggcttcttaattgggggaaacgtgacttgaagtcttaataatgtttttattttatttgttcacactataatgattcaagtatgcaagtgtgtgtctattggtgtgaatggatagtatcggatgaatgaatgacaagaaaacaaaattaatgatttggttaaagtataatagaggaatgaagtgaaatagataatggacttttcttatctttctaaactggagattgtttttcatgttatgaaaaaagtttactggaatatagatttacctcactctgtagcaaattgtacccttttagtggaatataaaaatataattttctacttctttttacccatcatttttatttatataaactagtataagctacatactagttgattttggtctataatatccagatttgagactaattttggcaatcaatatgagaaaataaatttcatgcaattagttgcaccatatgaataggattggtaaaagtgatatagttttcttcttaaatcacccataaatcttaacctaaggatgggcattgaagatatgtaagtagttaagtcaatttgattacccttttctgaccggagtttgattctactaaatcgcgttatcttgcgtagtatggattgactatacatcgagtcttgtggatccaaaaatgtatataaaataaaagatgggcacaaatacttggtaattttcctttatccaccttgaaaacataaacactcatcattattaagataactaatactcattctatttcatattagttgtagtttaaggtttttacacacatattaagaaagtttttaaaaattcatttaatatatctcttttatataaaaacatcatttattataaccaattcaaccaataaaaaatatataattaagtatagttggttaaaaagtattgaatatatttattatttatacacaaagttgaaaacaacagttattgtgaaaaaatataaaaacctttaaattacatttatattgaaacaaagggaataataagtaacataactttgatacttacaattaatttgcaaatagttttacaaaaaacacgtaatagaacaaagcaagtaaagtaaaatatttttagcaaatatttgaaattgaagatactcgtttctcacaagtcaaatacgaatactaattttacccttacaaaatgggtcaagtagcaaatacttgtcctgtgcccatccctaatttttgcaagcaagatgcactaagtatgagagagttttgtagaacctagtgttttatagcaaatctgtaactaatcctaaaatatggaattacataagtagtaaagtagcaaccaccggtttactttctgaggaattagcaaactattaatggaatgaagaccctttctggggaattagcatacaaaactaatatgagaatttcatgtggtgattattggccaaggcaaaagtcttgactacataaattctaccttttattcagactgaacaacagctcttttaatttttacttcctgcgctagttttttgttcctattaaaagagtcattcaagatttcttaggtaaattcttaaatgaactaaaaataaattttgttaagtaatcagaatcaaaggaaaacgatggtataacagtctggtatcatatcccacttggttgctactcgctagtaaacttcaaccacaaccctctgtccctctatgacgttgatgccacttttaagactaacaacaataatattgtcttttttttcttctttcgaatccacatctcttgaaattttgttaaataatttaaaatatgtaatctatatgtctgtgtgtacatatgcataaatcatactccctctgtttctaaatatttgtagtttaaaatttttgcacacaaattaaaaaaccatacaaatctcatttaatttatctctttcctataaaaacatcattaattacaactaatccaaccaataaaaaatatgatgtaaaatacaattggttaaaactattaaatacatttaatgtttgcatagaaaagtaaaaacaacacttatattgaaaaaaataaaaaacctttaaactacacttaattagaaacagagggagtaatacggatctacgagaaaaatttagtgaagtcgcggtcgaaggaccttaggttggtggctagaccatttcgttcaaatcaatcccactttctttcatcaagataacaaagattcacaaacatccttaccaaatgatacaaccaaatgaccaaccaaatgataaaaactacctaaggtctatcatcaagtttttataagttctatttatcacttaatatcacaatggtgcattcgagaggatacaaccaaatgaccaatacacatgtatttttaactgcttgtaagtatcacatatctcatgattttaaaacaaaaatattgatttacttgtttattattattattattttttctatacttatttggtttgatagtagatgtttttatatatatttaagatatcattttatatatcttgagactgtatttatacctctcttctttattctacaaactacctgtcaaaatagttggttttgaaatgtaacattggtgatgatttttcttttgtctttaaatgtaactttggatgacaaaattcagtaataataatgggcctgaggttatgaatatagaattccactttatcacattggacccaaatttgccatgatataatataaaacgacgtggtatcaagtgttcagtgagtgtgagtcctccgacacgaataatctagaaaattttactaagactagtgtcagtatttttctaccacactcgtcgccttgctttacgctttattctctcttctttagctttttatttcttcagcaaatctgatttcaaaaaaatttcatcgaggaaactgaaaaaaaaaaatgagtgacgggaggaggaagaagagcgtgaacggaggtgcaccggcgcaaacaatcttgg

SEQ ID NO: 6541 - DNA, 3000 bp, Unknown
  misc_feature (1)..( 3000): cDNA_ID_3048545_gDNA_ID_1621097_Annot_ID_171147 3000 nt of promoter + ATG
aagatacatgtactaaaaaattacccaaaagcaaaaatatggcttcaccatccaacttcccattttcttgacaatacatcttcaccgctcgctgaattccaaagataaaggccatcagtttttgcagtccaaatgcaattcttccaaccgcatctatggaacaagataacatcatcccaaaacacgtttacattcatatgaccattatctttgttcatatagcaccaaaaaaaagttgagtgaagcatattttctccgaagttccaagaaaatctatttctaaacttcagattaatttcacctagatcatcttctttagatttacaatggatgaaaagagtttcaccagttgtcaaaccgttaacaaccgtgacttgccactcagaaatcttcgggactataatgtctctcgtggtggtgccgccgactaagacatggtcttgacatgttagggccagagaaaagcaaattgccaagagaaattgtttgatgcaattcatacttttttcaggcaagcaaaatctttagggagaacttttttgttacttctttttataatggaagagtgaaacggtaattgacgtttaattaaattttgatgttattacattgcattaatgaagagtcatgctgcaaatcatttaagtgattgcatgttaattagaaatgaagctgaaaggttagtacatataataatccaagtacgtagatgattgtggcataatatattaagattaaaaaatactaatttatattgtggtgtaagctattagttttgaatttattatgtgaatcaattttaaaagttattagtttttagatttagattatgacccaagaattcgaagtatataatcgaaaaatttaatgtataaaaataataattcaacatggtcgatcgggtatttatttctagtaaaatagtatttcataaacctaattttagttaactatataaattataacactagtaaagtattctgccttttacgttactttattgggattaataaaaatatattggattcgttgaaatccaataacaaattgtaattttgatctttgattcatagaaacaaaaagttacgaaattaaagaaatttttaaacaaaagagtactcgaccagaaaaatatgtttttttttctattttctcactcatatttttcagatagagaaagcaattttcagtacaccgaaattaaaatccgacgactaaaaatagtttcttctctctctcaaatccttctgagaggagaggtttcttgtcgatggagtttgatttcggttttgtctggaattttatatatttccgtgtatatacaaacaaaataactgccgaccttttatcggatttccgttattagctttgttcgatttatcaaaattttatatacttttgtgtatatacgctctagcgaaattgatctctcttccatctgtgtccgttgatgtctccgtttttcttctaaatcttatacgatctctccaattttttcgaggagtaacatctttgtcacttccttttgctaagttcatactacatcaagttaggtgtatatagtggtggagtttcctcggagtttggtgttgttcgaagaatttcgaacaatctctttcaatagatctagagattaattgacggttggtttggaactgagatcgttagaaaggaggaagtttctcaaaatgacttcattaagcaaatgctttttctttgcattcttgtgtttcattgctctcttgactccatgaatggcaaaattaaattacctaggtgattatttacgctatcctacagatattttcgattttttttgttttgttttgttttattaaatattatgttttgataaatttagtttctaatttactaagcactcactcatccattcaacaaattcaacaagtattcttatttcttagtgtcaaagtacttttcttatcaaccttatcaacaatgtatcacactcacactcttcagaaataaatttctatcctaaaccaagtttaaagatgataatgttgagattatataaaccagtaagtatatggttaaagtgaaaatagtgctatatattatttccttcaacataataccgtagtttctaatttgattttctaagtaaatctaaattgaataaaaaatttacttttatcactaattttaattttaactttttataaactagatatcttttttggtaatatatttttaattgtaaatcattgactcatattttcatttacctaaatactaaaccaaaacaatcttttcaactatatattttccccatgtacttaactaaaatatcataaacaaataccatacgcagcgttttgaagcatacgtcgcatttctctttaatcgttaatttcctgatttaggcttcaccaattttttttttttccctgataaaaattttagcttcaccaccaccattgttcgtttgggtgttttgaacattgatgaatcgttgcttctgagatctcgacgaagataaaaagctcttcggctacttcaggtaaatttcaatttcgatttctgtatcaccaatctccttgcgaatgaggttttgtaaaccctaaatccagttttgaacctctttctctcttccctagtagctctctttctctatccactaattctagcattttgcatcagtattcctctctgcgttcatttctgttttgatgtatgtgattgccctaatcgtcttggccgttactcatttcgttttccttttactctggttctaggtttcgagctcactctgctagaaaccctaaaaatttgattttgtgaacttcccgtggtaaatttgaaagggagatatctcagaacccctaccaaggacgaatcttgatcagagcagacttgatttttgaggtgagaagcttagggaaagttttgttaattgtgcgttcgaatttgagagttttgatagacagtgtttacattggaggttttagattgggtgtaaggaataagtagataggt

SEQ ID NO: 6542 - DNA, 3000 bp, Unknown
  misc_feature (1)..( 3000): cDNA_ID_3090457_gDNA_ID_1621097_Annot_ID_171141 3000 nt of promoter + ATG
atacgaatctcttcgttttttttattttgggggtcaaaacgaatctgttctctgctcttttatactagtcttctgaaattgaaatttgggttttcatttcttagctcatattgaattatatattgtacccagttctcttaagtctctaattgtcggaattttagttttggatggtttgcttatgttttctattggattaaagctccaacttttctccacttttgcagcttatgaacctttgattttgtttttttttgaaatgttcagtaataacattctatatcccaaggaagacaaggagcaatcaatcctcctctatgcgtgccgtaattgtgatcaccaggtaaactttgtttactatgctttcttttataaaattaggtttccttagtgttaatggaacaatgtggtgttgaaacaaagctagggctgaaaccaatagactttagttgttcacttgtatatgatttgtgttgatatttatttaagctctgatgttttactctttgtaatcgcttatacggttaaaggtcgaatgtctgaacttgaagtaaaccaaggaatgataatttaatgagtttagatcattttccttgtctctcatatcatgaatctgattggttaagatagtagtgcttatcagtataaagagttctttgagaacttctgaacaaacgcaagaccttttaaaaaccgtttagagggtttctgcaacttaacttctaaaaccatttgagtttcaacaatatccattggtgttaccgaatctgagtttttttttgtttctactgtttgtgttatgttttgttattacaaagcattatgcctttgttagctactgaaaaccattctagatgaatctctgtatgggatctttagcttaatgcccggacttgctaaccgaattagttataaacttactgagttactgttagctatttatcgtcctgttgatagaaggtcttgaaatttatattcttttatttggctttgcaggaagcagcagataacaattgtgtttacagaaacgaggttcatcactctgtaagtgaacaaactcagatcctatctgacgttgcttccgacccaactcttccacgtaccaaggctgtgcgatgcgccaagtgtcaacacggtgaagctgtcttcttccaggtgaatcattatcttatatcttaatctttaattcgtcatcaatcaaggagtaaagaaacattctttcgtttttctctgatctaacttaaagatcaaaagagatttctttctcttgctttttaatgtgcttatggctatttcggtttgatatagctcgtgtgtgtcatcgaattttcaggccacggctagaggcgaagaaggaatgactctgtttttcgtttgctgcaacccgaactgtagtcaccgttggagagaatagattgatagaagactacatttttcaaatgtaacgtgtatttgtgttccgctttatgagttttatacaattcaatttggagttttctgtgtaaaaatatgaatactatgagactgttctcgggtttcttgaattgtttcagggtcttttatgatcattttggtttttatgtgggtctaattataaatttgtcgttttatgcggggccgatctgaaaattcgtccataaaccatgatagtgttgaaaatttgtatacgtggagtctagccgccggctgctataactttgctataacgtgtgatattataaaaagttgataaatctaatcttctaaaccaaattgttttaataatgctgtgtttacttcgtcatcgtatcgaattatacggctgctcttgttaagtgatgacaatatcttcaaataaagttttttcttttgtaagcaaatatgataaaactacgttagctaatagccaacttggtccatcatagttcataaagtcaaaaaatcagtaaccaattcatgagtggaattatacttgattcaatgacactgtttaggagcttatctaaattgcacaagttttgttacacgtaaaacacaaatatgccaaattagacatgtttctcgtcattctaaaacattaacaaatatttacatagacgcagtcaaataaatcaaatttcgtatgataaaaaaaaaacaaaaaaaatagcaaggttgatttgtcaatgctggcaaaaataagcaatgtcctaatttctcaagttggaaagtgacatttctctacccattttttgaaaagatattctcttttgcatataagatttgataaattgaacgcatatttgcactcaagctaacgttatgtacttgattacttgacccgactaatgacttattgactttgattaataaacaaagatattagccactccattctacattatatacaatctatacgcatctatatatatctactaaaaaaattgtaagtacatacatatcaatgttaatttgtatataaggagctaagaacaaacccaattaggcaactagcaattgctaaaacacgtaagatctcaaatatgaccacgttattcctccttattgctctattcatcacaaccatcctcaacccaacaagtctctctctctctctctttaatctcacatgatttattctcattttcaatttttatagatatataaacttaatcataattaaccttaattatgttatatgataaactaggtggagaatcagtaggtgtatgctatggaatgatggggaacaaccttccttctcaatcagacacaatcgctctctttagacaaaacaacatccgacgtgttagactctacgatccaaaccaagccgctttaaacgctcttagaaacacgggtatcgaagtcatcatcggcgttccaaacaccgatcttcgttcactcactaacccttcttccgctagatcatggctccaaaacaacgtcctcaactattaccccgccgttagcttcaagtacatcgccgtaggtaacgaagtatctccgtcgaacggcggtgatgttgtgctccctgccatg

SEQ ID NO: 6543 - DNA, 3000 bp, Unknown
  misc_feature (1)..( 3000): cDNA_ID_1814892_gDNA_ID_1621097_Annot_ID_55710 3000 nt of promoter + ATG
aaatcaattcctggcgttttcatgaaataacagcgatggggatggacctctgagcaccgagaataggcctcctcgtcgaggcacgccaccacaaggtggcggagtaatggcttagtcccttttccgacatgaaaactgtggagaaacaaatcaaacgtggagttcggctcagaccaagccttgtttaaggtggttattatcaccgtcttatcctccgtcgctgcttccgtcaaaattttccccaattttttcagatcttcttgatgatgctgtccaataattaaaaacaagattcaagaacagataattgtttattttcgtttcgttcctttttaagctactcatacagtggtaaaaggaagagtacttgccaaaatgaaaaaccaattaataacaagaaaatttgagcaaataaaactgatttaaagttaaagttaattgtacagcagcacatacaaattagttggaatcataagcgaatggtatgtaagaaaaaaaaaacctatgattccgttaaattcaaagattttataaaagagattagaaagagaaaaaaataagcaaaagtttttttttttggtaggaaaaaataagcaaaagttgaaaaagaggatttgtaaaagtatagaaaaaatagatattcaaaaacaaatatacacatacatacatgatagatcaaagatgataaggtgaatcggagaagaatactaacgacatcatcggagaagtggagaaacagttgtagtggataaacaccaatttggtagatcaccaaactcagatcggcaacgaccagcaacacgactcatagatcctcgtagcaacatttgcgccatcttcctcacagcctttgacgctggtcgtggtcgttttgaatggctcatgaactgaatctcaagtcaatgtacttatgggtatacatatacagtacatgtaaaattctagattacaacaaaatagataagtttaattgtataagaaaggtataattcggggaaaacagggaaacaaatgtttaaatcctttaacgctagtcgttttgaatggatcatgagagtcagtatacttataggagaagataattttaattgtgtaagaaaggtaaagtatgaaacaagtattaaatgagaaagcctattgaaggaaataaatccgcctccggaaaatatagagcctttagacttgaacttccacatactaaaaaaaactaaataagtaaataaatctgtgctaataaataaaataaaataaaattagtactatgtagttaagaaattatgataaagattaattattaagaaaaataaaggaaaatactttgatagttttaattatttagataatataatttttaaatattgtagttattattatttaattatttttaaaatgattttttaagaaaaatatattattaggcaattaaaaatccaattggtactaaatttttattgtcaatttgttttcttaacaatcttcaaatattaattgtaataattgttgtttgtgcagattactcataatatccgactgtggagattatcaaacttgtacgtactcattgaggctcagtaagaatgccctacttacttatatttccttgttttcttaacttttttttcccaaggatctatctcttttggtaatcaaaatgtaatcccaaattctctttcatttatatgatattaaccttttagcgaaaaaaaaaaacttgtacgcaagagacggtcaatgtcacttgggacattatgtggactcttccaaaaaccctttagaatgttgtcattagagcttgaggttctaacggttaagagcttttttgagctttatatatattattttggatgttatccgggatgatataattttccatgtaatatctataagattttactttcgttgtatttcgaccccaaatctttggatgcatggctcgaccacttattatcgatcttccatcgtggtagcacgtatgagttggtccatcgggcattggcttcctgctatgtggtatggagtacgttgctccagtgcacgttggttggagtatgtcgcttctggcctcttcatcttttttcaatggttttttgctttggactagtcgattaattcaattgattggttcgcatttagtttttagtgggtttttgcaactctcttaggatgtgcttttgatgaaacaatccgatctattcattaaagaaaatcttacatctaaatttatattcttaaccaaacaaacatgtgttatattattaaccatataaacgtaacaaatttttgttttatcaacacaggtaacatatttattgtttatcttaaacataaaaaaaataattatttctacatgggttttaacttttaactcaattaattgaactgccggtctgattttccctgacttcaccaaacctatatacacaattcgttagattgactgatatcattagttttcgacataaattttctattatttccactctcacgttgtttaatcggtccgtgtttcaagagtttttgaaacgaatgaaaaaaaaaaagaataattagacacatagattttccgggtgacacgcaaatgccggtttagctagcattcgaaggtaagtgatgaaatgactaaagaagaaacgatgataccaaacctaaccatcaagcaaaaaggttgatatacctactatttagatgtatcctcctagaccttacattattgtatccactttaagaatttggctttcgtttcaaaagaaatacaaaagaaatcctaacattattgtatccactctaagaatttggctttcttttcgaaagaaatacaaaaaaaaatctgaaacactttcgaataatttgttgattaccttcttcttttatattccttgtgatctgctttacagttttatacatacacatttgattggaccattggttcggtattcttaaacgaccggagatttatccacacaacgtcttctcgcagccaaacacatcaaactacacatg

SEQ ID NO: 6544 - DNA, 3000 bp, Unknown
  misc_feature (1)..( 3000): cDNA_ID_1814888_gDNA_ID_1621097_Annot_ID_55711 3000 nt of promoter + ATG
ttatataaaaaattaaaaacgtaatcaaattcacttgtcattcaactgtataatatttatttaaatttcttactttaaaatcatattattcgttttctcctcttttatatgattccattgatctttctttccatcgaactaaccaaacttattgatttggtatacggtcctaattttaaagattagggcagcaaattaattacctgaaatctgcagacataataatcatcaccgaacacgtgtctcagtgtcggaaccggaactcgaacagggttcctcggagagaagagtacgctcatgttgaccagagccttgactttctcaggtcggtattgacacaactgccacgcaatcatcgctccccagtcatgaccaacaacagaaaccgccttgtctccgccggtcacggcgacgattagtgcgaccacgctccgtccacgtttaagtaaggtgtagtcttcaactttctctggcgcttctgtgtctccgtacccacgaagatccggcgcgatcgtacggtatcccaaggaagagagcgcaaccatctggtgtcgccacgtgtaccaaagctccggaaatccgtggaggaagagtatgatcggatcttctccggatccggatccgggtttctccgccacgtgcatgtttatgccatttacctttagggttttgtgttctacgccgtcgagtctcgacttctctggtcgttttgtttgattgtcgggtaatgtagagaaatgggtagttggatttgggttttccccaagaaaacgacggagtctgagaggaaaatggtgtcggaatcgtgaaagtgagagttttctacacaagaagaacatgtgtagtttgatgtgtttggctgcgagaagacgttgtgtggataaatctccggtcgtttaagaataccgaaccaatggtccaatcaaatgtgtatgtataaaactgtaaagcagatcacaaggaatataaaagaagaaggtaatcaacaaattattcgaaagtgtttcagatttttttttgtatttctttcgaaaagaaagccaaattcttagagtggatacaataatgttaggatttcttttgtatttcttttgaaacgaaagccaaattcttaaagtggatacaataatgtaaggtctaggaggatacatctaaatagtaggtatatcaacctttttgcttgatggttaggtttggtatcatcgtttcttctttagtcatttcatcacttaccttcgaatgctagctaaaccggcatttgcgtgtcacccggaaaatctatgtgtctaattattctttttttttttcattcgtttcaaaaactcttgaaacacggaccgattaaacaacgtgagagtggaaataatagaaaatttatgtcgaaaactaatgatatcagtcaatctaacgaattgtgtatataggtttggtgaagtcagggaaaatcagaccggcagttcaattaattgagttaaaagttaaaacccatgtagaaataattattttttttatgtttaagataaacaataaatatgttacctgtgttgataaaacaaaaatttgttacgtttatatggttaataatataacacatgtttgtttggttaagaatataaatttagatgtaagattttctttaatgaatagatcggattgtttcatcaaaagcacatcctaagagagttgcaaaaacccactaaaaactaaatgcgaaccaatcaattgaattaatcgactagtccaaagcaaaaaaccattgaaaaaagatgaagaggccagaagcgacatactccaaccaacgtgcactggagcaacgtactccataccacatagcaggaagccaatgcccgatggaccaactcatacgtgctaccacgatggaagatcgataataagtggtcgagccatgcatccaaagatttggggtcgaaatacaacgaaagtaaaatcttatagatattacatggaaaattatatcatcccggataacatccaaaataatatatataaagctcaaaaaagctcttaaccgttagaacctcaagctctaatgacaacattctaaagggtttttggaagagtccacataatgtcccaagtgacattgaccgtctcttgcgtacaagtttttttttttcgctaaaaggttaatatcatataaatgaaagagaatttgggattacattttgattaccaaaagagatagatccttgggaaaaaaaagttaagaaaacaaggaaatataagtaagtagggcattcttactgagcctcaatgagtacgtacaagtttgataatctccacagtcggatattatgagtaatctgcacaaacaacaattattacaattaatatttgaagattgttaagaaaacaaattgacaataaaaatttagtaccaattggatttttaattgcctaataatatatttttcttaaaaaatcattttaaaaataattaaataataataactacaatatttaaaaattatattatctaaataattaaaactatcaaagtattttcctttatttttcttaataattaatctttatcataatttcttaactacatagtactaattttattttattttatttattagcacagatttatttacttatttagttttttttagtatgtggaagttcaagtctaaaggctctatattttccggaggcggatttatttccttcaataggctttctcatttaatacttgtttcatactttacctttcttacacaattaaaattatcttctcctataagtatactgactctcatgatccattcaaaacgactagcgttaaaggatttaaacatttgtttccctgttttccccgaattatacctttcttatacaattaaacttatctattttgttgtaatctagaattttacatgtactgtatatgtatacccataagtacattgacttgagattcagttcatgagccattcaaaacgaccacgaccagcgtcaaaggctgtgaggaag

SEQ ID NO: 6545 - DNA, 3000 bp, Unknown
  misc_feature (1)..( 3000): cDNA_ID_1814884_gDNA_ID_1621097_Annot_ID_55712 3000 nt of promoter + ATG
tagtagagtcaggatccgccttgaagtatccaaaccgacaatccaaacgtttttatacccgattgaatggagccatgtccagccgcatcagagaaagaaaaccaacaacggacaaagccttgatcgccgtgtcctgcaagcatccgtctatggccaaaaacctcatcgccgcacctccacgtcgcggccggtgccactgccaagctccaatattccctcattgaagtaaaacgaagtgttttgttttgacttttaagtaccctaaaggcctaaacctaataccgacgcccgaagccaatatatacacgttttaaacgaactttctaagggagaacgaatccagcaaacagaagagatagaaagcagcaaccaaagagcctccttagggacgtctccaaacaaagcaactcgcctccaagctttagatttctttttcactttgcttttactttcaagggataagatcttacatctgtgtatctgttatcgagaagtaatctctaaacctgcttgtttactttcttcatacttttttccatatatatttctacaattcgtttcttttacgttgatgtttttttagccatgattgagtagttttcttgtttctgtttctgttggcgtctcttatgaaatacacggaatatagtttatgattttttctttcttattgatatagttttttgaaatttttcccttcaggtagaaccatgagtaagttcatatagaagaacagtatgaaacaaaactattaattatagagcgaatgatggtcatcttaaattgagttcaaatagtcaatttgcagctaagtaatatatatatgagataaatttaacatgtgatatgttaaatctgtaaaatataagcaatcataatatatcatatatgggaatgaaaggaaaggatagggcagaccgtcaaaccgtccatggctttggaaggagatatacattattgagggaatagtgattatttaaattctttgatacgaatgattattaaaatttgattccatctttgtgatgattacacgtatcgatatttttcataattaggaatatatcagaagttacaacttcatattaaatatttgatatagtaaaagaaaacgagtgttcataagaaaatgcaagtggatagaaaagtaacgaaatgctcttgttaaaagaatatgttggtttctttagaagatttttctatataaacggcattggcttccttttcaaatcaaactaaaaccaaagaaacaaagataatacactaaaccaaaagacctttcttctcttctttgtgcttcaccaatggctcaaaaggataggaatacaaggatagctcaaaaggcttttgaaatggtcgataaggtgtatggtaagtccccaaacctaaccactaaaccatatgatcctaaagacgagtccccttctcgctttacccaaagtgcttacaaatatggtggtccaaaaatctataccgtaagagaggcgactagtacttatagttatggtcgagctatttatatgtacgcacctgagtcaactataaaagaacctgttgtttctcaccccacagaacatattcaatactatggtggtacccgtccttttgttgccaatcccaacaggtttgagaggccgaaaggacgggttattaactgcgatgaggcggtccaactctatggaggggtgcttataaaggaatttcgtaaataagcggtgaaaacctcaagttatgttgaagatccatggtgagtttgtaaataagtgtgatagtttttgtttctgcttgcgaaaaaagttcagaccaacacatatgcgaaagcttgttgcaacggttttgacgtagaataagctttagagcacaactaagtgtgcgtgtctgttatctatctagaagtactttatgttgaagcttatgcaatgtaaaatgttacggtactatgtaaacatgtgtgtcttgactttttgtaacataatttaataagcgtatgttaaaaaaaacataaataagcacgtcatattttagaaacgctaagcagaccaataatagactcccttcaaggcggctgtgcatatggatcatgtgtacagaaattctaatcttatcggaattatgaaatgatttgtatatactacaaacaaaaaaaatcataaaaacatattaccagatataagttaatcatgttttttcatctcacattaaatttagtttgctttaacataattataagatgatgttttcgcggatgaatcgggagccatcacagtcacatgcaccatgaataccctaatatcttgtgtgaattccaacatcaagtcgtggatgatggtcgaaggaattttccaaagtaaatggtagttttgaaaatgaggtgacaatagatttgggcgacgacaagaaagttgaaaggaaaaatatgtggtcaccgaactcttaaatatcttatactattaaataagaactagttattagcgaatatgaatatgaatataaatgattagaaaagaagacatgtgctaatttttttatttatttggtatggttaattttaaaaaatgttgttcaatcctatctctttttttttttgtgtgtgcccctgttctctcaatgtttccatttttgtcattatatcttaagtttacagagaaaaaagggtcccatgtgatagagaattagcaaacacaattttttaaagatgagttttatacattcaattttgtgaccaatcacctccaatggtataaaaagaatatgaatttccccgcaagtatagcaaaatccactggaaacaaattttaaatattttgggatttttgagaaactaatgactgcctcaagttttttaacggtaaaaacctaactttccctcccttcttccacatataagtattgacttcgaaaccaacttacttttagcaattgatattctaaaaaatcccaaaacattccccgaaaaaaaaaaaaagaatgtggaatggatggaattattcaagcaagatg

SEQ ID NO: 6546 - DNA, 3000 bp, Unknown
  misc_feature (1)..( 3000): cDNA_ID_1814877_gDNA_ID_1621097_Annot_ID_55715 3000 nt of promoter + ATG
aaatcaaaaatgtaatcttataatctcatgatacaatatattttaggaatgttagttcatggtccataaaattaatatatagaaaaatattttactcactttcaaaaattttttataaatattttactctttcggtggggtttcagtcttaattagtacttgtaagaaagaagagaaggtttaaataatttaatactgtactcagacgccagccatttgtaaacagaaaaacttcacgagaccaaaagaatcaaaattttcgtttcaatattatgtacctaaaacattatgtgtagttgaatatgaaggaaaatagtggaaactagagaaaccaattgactagagaaacaaattgtttattcaaaccaattagtgaccacatattttactgtcatgaatgaaatataattcgataataagtaaaccaaatatcttttggtaaaattggtagacaacgaatgctatgttctcttacaaacaccggttcatgaataccattagaaaaaggggcatacttggatatatgttatattctgagaacaaaagactgaaagaagtctttaaaaatcagatagagaggaatatataattgtagagttgaaatataccaaatcttaaccgacctttctcttttttctcccattgttgctttaaccttccgaaagcaggattccatatcccttctctcccaagatttctgaagatttttttcttagtcatgtacattattaccacataaatatacttacttccattacacgatgcatatatatatgatatatttagatatatattccctataaagaagatcatgttaaaagtctatgaaaatattgctaccagagtttcaacttgcatatttgaaagcttggttgtcttgtcgtagaagagtcttcttgtatctatttttctaggcttattaatgacaaatcaagatcattttcatcccaacttatatatatgccaaaatgttcagccgaatccatcaaagcccttagtttatttatgtattgggcgttaatcacaggttggatacactcgcaggtttcactaacgttagtgaaaagaactgggctctaagaaatcatatcttcaccagccacatgatctgtcaaaaccttacggaccaaactagtatattgcaaccattcttataagaaaaccaccaatctaacactctagtcataacatataacacatacacaaaactaacaaaatctggcagatttcattttgtttttacttaattttaagtttaatctctaaaaagttcgtctatatatattgattagattttcaatatcctccaccaatacgttaatagataaaatgcatcaaatacattcaagaaaagaactaaagtagaattttatgaatatcgtatattaatataatggtaataatgtcctgcccttatgacaattacaccctcagtctctgtctatataaaaggcactaactctgttctatctcctaaccaccctaatcagcaaactctcaatacattcttaatatctctcctccactcgctctttctactaccatggaactttctcgaaaggaccaccgtcatgtgatgattgcagaagatgggtcacaaaacctcaacagaaacacttccaagtcaaatcctaatcttccttatccttataaccccaacccctcttctctctatacacataatagtttctacatctaccacggtccacaagttcgtaccgtcaaagagtccataatatcttccaccaatgcttcttttttggtctatcaatccaactagttagttcaatccatttaaaacagccggtcattttggtcaatcactctaaaaagaaataaaaaatagaaagcaataagcatcaacgttccagttatgctgattttcgtagctaagggatgaagtatggtgtgtctcttttgcagtttttttatttatttagatatgttgtgagtacagatcggttcaaactttactctcttcagagacttgttgtaagattgccacaacttgaatttgtagcatgtaaaaggtacatatatgaaacccttatctttatgtatatgagtacaactttatatgtactttatatatgtagcatgtaaaaagtacatatatgtaacccttatctttatgtatatgatgagtatgtatgtttctatatcactccgatttaataagaatctaacaaaaaaatacgtacgccaaatttttaaggaaaaattccaataacaaaagtcagaaattacttgtactgtacaatttccaaaactatatataacataaggaaatataccataacatattttccagttaaataaagggaactatttaccggagtatatagtataacaacttgcaacataatcagcttatattaattctgtgtgatatgacatttcaaaaaaaaaaatccttataaaactatttttagtacagaaagtttatattgtagttatatattgatttaaatataaaaatacaaaattctcctgcgtatgttcttttttcttctttctccaaaatttttgagtcgaatttaaatttgggtggatctgaatgaggtgatcctaatcactagttgaagttactagaccactgctccaaaacgacatcactcctgcaagtggacctgcaacagaaacaaaagtgttgggccaaaacacacttaagcccaaaccatttaagttcaagacggaaacgacgacgtccagctctcaacgttcgtcttcaatgttcctgcaaaaagacaaaggaaacagagaaacagagatgacgaaagcaaaagcttgtacggagacgaccaagctttcaaaccaattctcagcccttgatgggttagagacaacaggatgaagacacctgtaagggtttagctagggtttcagttctcaagtgttcttgtataaaagctaaagcttgagccgcttgtaaaactcttaagaatgaatgaaatctgaaagttaagttacaaagcttctcatagattcataaatctcttc

SEQ ID NO: 6547 - DNA, 3000 bp, Unknown
  misc_feature (1)..( 3000): cDNA_ID_2173891_gDNA_ID_1621097_Annot_ID_55717 3000 nt of promoter + ATG
gtttgcacatttcccgaaggcagaaataaatactatatcatacataattagcttcttataattaattgcattttcaacataaattgcattttatcccccttaattacgaaattcctttataagaacccctccatagagctgaaccgccttatcgcagttaatagcccgttcttgtggcctctcaaagcggtcaacatggccaataaaaggacgagcaccactgaagtattgaatacgatccgtgggatgataaaccaccggttttacaatagttgactcatatgaaaactgagaaatgactcggcgagcagtaatatctagttgcctcttttacagtataagattttggaccaccatattcgtatgaattttggttaaaatacgaaggaaactcgtttctaggaacatatggtttaggggtaagtttatgagacttaccatacatgttatcgactatttcaaaagccttttgggcaattcttgtattcctatcattttgagccattgccaaggaagaacaaaaaagagaagaaaggtgtttttgtcttagtgttatctttgtttcttcggttttagtttgctttgggaaacaaagccaatgagcttccttatataagaaaaggataatgaacctacgtactcatctgttgacttatcttttaggaattatcccttcactttacatgtagtctttttttttgtctaaatatttaattcattaatcaaaagaggatgtacaaagatttttttttttatatgtacaaagttacatagtcatttttattagattatccctttttttagtggttaattgaacataaacttaaatttgacattacaaaggggtccttttttcccaaacaaatactgtttcggtaaaggaagacaagaatagacagtatatgtagtagatataaatctgacattaaattccttttgacccaaaaaaatgaacattgtattactttataaagaattaagacagtagtaggcggtagtggcgacaccaatttgcttctcatggtacgacatatatatcttgtccgcatttgacttatcgatatcagagagtcatcacggaaccatgttcactcttaaaaatagggggttaaataagcggatccttcacaataaattagttcagttctatagaggcctaatttagtttgtttttattggtggttgaatcatctaccttatgcaaattatttcaaagcaaatggtgtttccccactacaagcaaattcaaccattcataggttcttgaaaatttgatccgaagagtaaccatgcgatgaatgtatttttttagaattaacaaaagactaataaatcaaatttaaatgaaagaaattgctcaaatattataaatttcatgtttgacaattgattattcatattcttaaaaaaaaataataggatagtatagtataaaattataaattatttgagttgttaattataaattatttcgaaacgttagttgttctgaaaatgatctcttaaatctacgtaactatcaatattgactctatttttaatagagtcataagattagtttaaaacgaattatttcagcaagaaaaacattttccacaaatatgtaataaaactatgaaaggccctaatcgtattaagaaaacagatttgaaattatttaacaagaaaaaacgtttatgatttctgttcctaaaatattctcttcaattttggagagaaatgtttttgttttataatcatcaaatggtaagcttttaagaataatgtagggtcctaatatctgtctaaaaattgaaatatatatggtgaaaatttggaggaataaagagaaatatcattctttcttatattttttgaaacggcatgggatgctaaatgaagtctatactctatacatcaaggataagcaatgttgaggaataatagaagaaattaacgggatgctaaatgggaagaaataatagagaatataacaatgagaccactggtcttttttgcctagtgcaattaactttcgcaaaatagattccctatcaccaaatttgcatatatacttccattacacgtttcatgcctatgtagactgttaggattacaaagtccaacaaagtatctttttaattaaaagtgcagagtcgaagtagcagagagaggagatacggctccactctatcttctcattcctctaataatatttacgccacattaggccacaaatatttccacgcatctcaatacataaaattaaggaaaataaaattacgtacaaccttcattttgtaagaatttacatctcactaatcatttatactataaatcatatcataaaattcccttataagtatcaattcctctatttttttgccatgatttattatatattatattctatttatacgatttaattagtaataataaatatatacttctagaatttttttatataattcgagaaccaaaaagagtacacatttgtaatttattgttcttacattattatgaaaactttttttttagattaatttaaagagacgagttagagtagggcttataaacaaatataaaacaaaacaggtcgtttaggcccatttatttgttaaggaaacgggtaccgcgagaaactagggggaaagtgatagaccaaaaaccctaaatctattataatcactcttttataagtagtccatttatttcaccgccgaatatgacaaagaggtggagctaggtcaaggagataagaaatggtgtcgatccatttccactcacgctctcgtgcaaggagaaagtgtcgtcacactggttacggtaagtccgaatgaaaatgagtatccaataatctttgataggtctcttcattttggtactttaataaacagtttgtcttcggtactactctagttttttggactgcaacgtactctggtttggtggtactgtaatattatttatgatcgatgaaaattatttagaaagtttttctggttttcaggtaaggataca

SEQ ID NO: 6548 - DNA, 3000 bp, Unknown
  misc_feature (1)..( 3000): cDNA_ID_1814861_gDNA_ID_1621097_Annot_ID_55719 3000 nt of promoter + ATG
tcatatctacataaatctgcgaaactggctttcccgtcttcactggatccttcttcttcactattggatcctgcgaaactggctttcccgtcactgccttgtcgtcgatcatgattggcccaccgggtgtgacactcatctttgctatgagcataattgatgaaaacaaaatttacatcacttaaataaatggggagacaaaaatagcaaaaaaaaagtcttccaaaaatagcaaaacaatccacaaatagcactcaaaacataagttgctttagatgttgagatcaaccatgagagagaaacacaaattttttcagttaaaaattaaccgtcggatttcgccattggatggatgccacatcatggtttcttaagagccctcgattaaaaaatttgtcaatgttttcatttatttttgcttgatgattgcttttaaggttttttttaattttttaactcccctcaaatttttcagagacaccattggagacaaagccactagataaaagggatcgaaattaaggatattgcaatagtcagtctcgtagaccaaataaatttagttacttgcttacattcatggtttcatatttacaaaatataagctttattaaaaataataatactataaactcccttatatatatatatatgcttatatatatatatgcttggagttcttattatatactattaataactatcacttcactgtattcttgattttccaatcatgtcttcttcagagcatctataaccaccggtgaatctaacggccccgtcaccggctttccgtcgatcattatgggtccaccattggtgacgcttatgtttggcggcgtcatcttagttcccgtctgcatgcagaaccggtccgccatgtaagaatgctttatgcaaataaaacatttaggccttctagttcttttgtataatcacaaataataataatatataaaagtcatactaaaatttctagaacattttttaattatttttaagcattttgtaaagaaaaaagaggaaaaaaaaacaaaattaaaatttttaaatatagctttattcagatttttgtctgtaaaactattcatcaaattcatgtaatcgagcttttcaaccattaacttaatggatagcaaagtcaactcattatttgacccaaaaaaaaaagccaactcatttatttgattaattaaacaaagtttatattttgtaatcaaagttcaaccaccttacattagaaagtctttgattttttattttgtaatcaaagttgtaaagtttaagattttatttttcttaaatttaaaattttactaatctaaattcattaacacgatattttataaaaaaattcccacaaatagcacaatttcaagtttttaagacaaaaatagcacacaaatattttgaaaaaaaaatagctgtcaaataattattttattttcatttattaaaattaacaattaagaaaagtacaaaaatacacaaattcatcaccagaaattcccaacaatatttttccgccaaaacaatttccatcaaaaaatttccgctaaaatatttttcgacaaaaaatccttcaaaattttaacaaaaaaagttggagagaaatatttacttttatttatttattttgattagttaattacttatatttaatatattaagtttgagtgctatttgtggaattttttgttatttttggaagaaaaaactttttgggtgctatttttgtcaatccccttttatttttagtgtgtttatcattgtttcttttgttttatttgctttggaaactaagtttttgttctaaaaataccattactacaaactttttatgctacaaaccctagaatgatttttaagactttctaatttaatagttggggtttaggtttagtattttggatttatcttttagggtttatatttagttacttaaaatttagttttagttttgtggtattttcagaaaaaaaaatagttttatttttgaaaaagaaacatagtgatggtatttttggaacaaaaactcattttactagtattttaaaattaaccatatttatatatgtctagagaaagaaatttaaatttgacgacgaaataggattacaaaatggaagatttctttttcgaaaaagatttgtagatcatgtttatcatataatagtataatgttatatttaatagatctttctgtaactgattgaagaatattactctgttatgctagtaacttttctttcccttaatttgttacttcgtatatcttttttttttataagatacttcgtatatatcttacactactgcgattaagctttttctctctgctctgctcttcgtgtaagtgttcttttctaaattttaaagattgacttttagggttacagtttactggtaaggtgatgtgagatttttggtgttacgatttaatctataggtttgtctaataatattatggttttatattatctttgtttgataatttgacctgtgtcatgtctatacgattatttgtgtcatccttaagatccgatatacttgcttaatctttaatttccgtagtttgaaggagatagatatgtccgagatcactaataatgaaacttctggagaagggactttaactaacaacgtgaatgattgtggttagtattttgattgttttattctcaaatgactctagtattttagttgatgtaccacaagtatgtgttttcgtggtgtttaaattacttgatatcgttacattacataggatcaaatccttctgaactatatgggacatttacatggaagattcataaattttcacaaatcaatgagcgatccgtagcaatgtttttgagattggtggccaccgatggtaaatgacatcattttcataataataaagttgaaactttctgaatatatatgttttttgtttgctttattataatcttacctatgactatgataggtatttgttaatttatccacgaggggttg

SEQ ID NO: 6549 - DNA, 3000 bp, Unknown
  misc_feature (1)..( 3000): cDNA_ID_1814853_gDNA_ID_1621097_Annot_ID_55721 3000 nt of promoter + ATG
acaagtcattgcggcgttagtgatagcttgttgttggatagctataggtttaccaaggggatgcaaaggaatgcttttgacagatttggagccacatggattgtagtagtcagtaacatatatggctttatattcattataatcacacacggccttgaaaactccccaaccatgggacattccgaccagacaccctttacgcaactccattggtaataccttgtctcggacaataacttcatcttccttcaccgggtcaaaatagtggatattacttgttacatgaatatcatccatagaacttccatagtttatgacacgatacaacaagtaagggttggtggtagaggaggaaaacatccgaagagtgtggcatctctggtgaaaagtaagaaatagacatcagaagaagaagacgaaggaaacagagattatatacaaaaactagaagagatttaccagaggaagtttacggagagaggccttggaagagaggcttagaagcagagacgacatagcttttgctttgatatgtgaaaaaatcaaaaagaaacaaaagggttttcacataggtcatcaaaggaaaagtaaagaaaaaataattggtgcaaagtaaagaatcttgtgcacaaatttgataacaaagatatttcgtttccattttcataagattatataataagggaaaaaggaaatgtggagaaacgtggaaacaaagataaaaacgagagagacattattcttgtggccaggcactttggtcttagatcgagtcaagaagggactttcttggttgactaactcgaaaaccctttctttatttctttttgattcttcactatcaacgcaaagctatgtcgtctctgcttctcagattctcttccaagtcctctctccacaaacttgctctcgtaaatctcttcaatctctctctgtttctagtttttatataatctctgttttattcttcctcttcttctaatgtctacttctttactcatcccacagagatgtaacacctttaggatgttctcctcctcaacaaccaacccttttttgctgcatcatgccatcccttgtggtgaagaagcccaaagaacagagtccctcatgttggacccggccaaagaggattatttcaccaccgttgataagccacttcccaaaaatttgattaagtctaagctagtgggaagttcccatggatggggtgtttatctcagctcccctgattacatactaatcagcaactatccctcgaggtctaaatcaaatcccaagatcattgatctgcctcctcgtcctagtctaaatggttctcaaactgaattggtaagtggtgtggcaatgtcctcttctcctgaagaggaagaatgcattattgctgtcaaatacatgggacgtccggtgagtatatatacgcctggtcaagacagtcaggggttcctccttgctatgtccactagattattcgattattttgagcaatctaagttgatgtattccaagagagatcaaaggttctacatgccaagttctggtggccaccacttgtggtcttgggttggtctcccatccaccacgcctcagtaccatgagttaaagtttcataaccttcctcagttttcgcattccgagttgcagcttttcgattcttgttacagggcacacgagcttgtggagtctccttcaggacaacgtttcttactcaaatggtacgaggtttcatgttagggttgtctgtttgcttttgcggtttcatgttataacatgttctttctttttggctctgcttggtaggtacgttgaaagccctgcgaacaagtcgttagtattcaattgtggcggcacaaagcggttcatggtgtttagagaagaggaagacatgaacatgtgttacacagaagacattggtgatctctgcatattcctcggcaacaacgagcctttttgtgtcaaggccagctcattcccgggactaaaccctaattccatctatttcctcggtgaaggctacggtgtttatgatatcgccactagatccccacgttccttcacacccaagtctacaccaagttcctcctcggaacaaatagtcctcccttactggatccccccaatgtctctctagactctagttacatgtccttcactagttatgcaagattatgctgtgtgtactcaaatttattattcgtcgttaaactatatgttatcttacatggaaaagaaaattatgaggttctatttttgtttaacaacgcactggtcgtggtcgtggactcaagaacatatagatacattaatagatttaagttcttcattttgttgttattggctagttgttttatataaatgtgaagtaaagtcgtgaaagcaatggatatttttgttaatacattaaacaagaaacaccgttgcgtactcaaaagccatcgtgtttgatcgtgtttatcttccaccataaattcgattatattattggctcgtggagctaactatttaggttatatgaataaaatgattagtgtactaatcctgattagagtgttaatatcattggattgctttacgtatatattattcctaacgttcttctttcctcttaacttaaccttaaatggttacctacttatctaaataatgacgataatacccttgattcacctgagtagatgccgacgagttcatgtccttattagtaattttaaaccttaaaaagtaaaaaaaaatcatgaaacattgatatcataacgattctcgctttccttctctcaacgttcccggggaattcccaaatcggcttgaaatttttggagaaattggagcttcgattcattcatttatgaggatctctgatgattagtttcgaaattcgtgaagacatcttcgtccttgctttcgaatcgctgaatcgtgttacgttttctagattcggctgaggagtgaaattggatttttgaatcgatttctgaataaagaggaagaggatcggagatg

SEQ ID NO: 6550 - DNA, 3000 bp, Unknown
  misc_feature (1)..( 3000): cDNA_ID_1814842_gDNA_ID_1621097_Annot_ID_55724 3000 nt of promoter + ATG
agtcccttcttgactcgatctaagaccaaagtgcctggccacaagaataatgtctctctcgtttttatctttgtttccacgtttctccacatttcctttttcccttattatataatcttatgaaaatggaaacgaaatatctttgttatcaaatttgtgcacaagattctttactttgcaccaattattttttctttacttttcctttgatgacctatgtgaaaacccttttgtttctttttgattttttcacatatcaaagcaaaagctatgtcgtctctgcttctaagcctctcttccaaggcctctctccgtaaacttcctctggtaaatctcttctagtttttgtatataatctctgtttccttcgtcttcttcttctgatgtctatttcttacttttcaccagagatgccacactcttcggatgttttcctcctctaccaccaacccttacttgttgtatcgtgtcataaactatggaagttctatggatgatattcatgtaacaagtaatatccactattttgacccggtgaaggaagatgaagttattgtccgagacaaggtattaccaatggagttgcgtaaagggtgtctggtcggaatgtcccatggttggggagttttcaaggccgtgtgtgattataatgaatataaagccatatatgttactgactactacaatccatgtggctccaaatctgtcaaaagcattcctttgcatccccttggtaaacctatagctatccaacaacaagctatcactaacgccgcaatgacttgttcacctgatcaaagcaaagattttgcagttgctgtcaagtgtttaggacctatgatcaatttcaataggcctggtggcacacacaaggactcgggttcggtcatctttaaaaccccttttcaatattttgatcaatcaaaggttatgtattcaaagagagatgaaaagttctacactcctagttttggagggcacttcttggttttttgggattctttcttcggagaggatatgaccggctctgagttggttgagttgcggttttgcaacgttcctaagttgacccagtccgagtgggagctcttgactcatgttccaagactgtataccttgtggagtctccctcaggccaacgtttcctaatcaagtagtacgctcagaaccaccaaccaggtgattcgatgacattcctgtgtcgcggaacaaagcgtttcatggtgtttagagagctggaagaagataaaaggaccatgtgttacacggaggacattggagatctctgcatattcttaggcaataatgagcccttttgtgtcaaggcaagctcattccctggtctaaaccctaactccatctattttgcaggcgatggcttcggtgtttacgatatcgccactagaaaaccacgttccttccgtcccaagtctccctcagccttctcgtcagcatcactcctcccttactggatccctccaatgtctctttagtttacttgttcttcactagtcatgttctgtaacttttgttttttatgcttataattgttcttttgcgagcccttggacgttggccgccatcttcatacgagttaataaattttggtgtgaggaaatatacgagtcaatttatgaaacgaaggtagtaactttcgtaattccttttttttttttttttttctctggttgtatgaatcattcatcatcgatatcttatacttttgtatcatgatcgtatggatcattcatcatggaccttgaggggttactcaatagagagcagtagtgtggaagaccttcttggtatgactaagctcagaactctcacggtccattcccttgatggttgtacgttagaaactctgtctgcatctctctgtgaatcgagagaactcgggcagctttcattgtacgaggtcatgcatgataggcataatgaaggaaaattagttcttgatttgattcaactcaaatttttaacggtgggcatgcatatgcctaggttgcctgatcaacatcgattccctccaaaccttacgaacatatgtcttcggtattgttgcatggaagatgatccaatgccgattctagagaagttgctccacttgaaattggttgaattatcatatggtgctttcactgggaagaagatggtgtgttcaaaaggtgggtttcctcaattgtatgagctaaatttatgatttggaagagtggatagtagaagaaggctccataccatgtctccatactttgactataaatgaatgcagaaagttgaaggagcttccggatgaggtcatatacataacatccttaaaacaactgacaattggaggaaggaatagtgaatgggtgtggaaattgtctgaaagaggacaagatcactacaaagttcaccacattccttgtgttcagtttatttactagacctttgtctaattttatgtataaaaattataacaatgtagaaaactacaacacaaatgagatcaaattctgatttttaaaatccggttgtgatgattattaatcgtggaaaaaaatcagggattataacttttgttaaattgtgaacgtacaatattgaactgaaaatgccaaatgaattggttattattactttgatgaaaatgaattgatcgtttaattttttttatatttataacaaaaatgcgatatgctctttttaattctttatttctatttttgcttcagaattttttttcattttatttttggtcaaaaaggttattaatttccttttcaatttgtacgaatttaaacggtgacgtttttgtttaaattatcaaacaaatcaaaacaaaatcaataaaatctaatctctcatcatgaggcatctttgactgctctttaattcactaaaaaagtctaaaaccctaaccattgccctttttcaaacgaagaagaagaagacgaaacgctaccatcatctacacacacacacccaactacttttttccatcgccggcctgtacaa

SEQ ID NO: 6551 - DNA, 3000 bp, Unknown; identical to SEQ ID NO: 6540
  misc_feature (1)..( 3000): cDNA_ID_2108258_gDNA_ID_1621097_Annot_ID_171083 3000 nt of promoter + ATG

SEQ ID NO: 6552 - DNA, 3000 bp, Unknown
  misc_feature (1)..( 3000): cDNA_ID_1814838_gDNA_ID_1621097_Annot_ID_55725 3000 nt of promoter + ATG
atgaaagaaaggtcgaaacccgtaaatcaaggttcgagtacggattaacaaacgagtggctcggatttacgaggagtgactcggatttaaggcgagtgatctaacccatggatcaagattcatataaagtatatatagacttgaaatgatcttagctgataaaccatattctatacttttaaatctaaatttgcttcataatcataactgcaagaattaaaaagtaattggtatattttaattatgggattttgttacaaaatatatggtcaaatcgctgatgcatatatatagttcaaaaaaaaaaatctaatgcataaattgtttagaaaaatgtataagtgcatggaaggaaggccacacatttgatcttttacatgctccaactagatcagtaacttctaaagcaaacaccactctattcagcttctagctatgcaagaatttgttgctattacctattgggggttatacctttctaatatttttgttaacgattaagtttacgagcgaatacacatgtgtacgtacatatatgatatatactgtcaacatataaatagttgtgtgtatacatgtagtgttgttagaaaatgcgttgccttaatcatatgctagaatgtgcgttgatgtattattctgttttatttaagatagcatatattataatgtattttgcccaataatttaatacttgtaggtcatagtctcataagatgtaggaggcatggtttatacttaatactttatagtctccaaataaaatcatggtatagacctaaatttttgggaggataatttgataatgtcatgcctttggggtttcgtaactaaaaaaaaacttacaagaaaattataagatgattaaagaaaataagtagaaagaaaatatattttatatcttttaacaaagtaaaaacatattgaagaacaaaattaacaatattttgttaaggttgagtttataaaatgagttaatttatgttttcatgtatgagctggatccacgtatcaagggtctctggtccaactttttctcaattgttatttagtttcgtatcctgtagtttaaaacaatataagatcaaccctgcaaagttaaaaatcttacagaaaaccccatgttttgagacattacattaattgttccaaaaaaggctgtactgtccgaaaatgttgcattattgcaaccaattgtgttatatatgtgttttacatatgatatactaggaaaattaaggatacacatgatttatcataacaatacttaaaaaataaataatattatattttcatctatttatatcgcattatttaaaactcatatactgtcaaattatatcgaataaataatagaaattttgttacataacattcaaagtagtactatgactaactaaatacacactacataataagagtcaaaacccaatatatcttggccaatgccttaggaaaatgcacaaacaaactcaaacacattgaagtcattaaaaaaaagtggtacagagaatattggatgaggaatattcaccagacaatgatcctgagtagaaagttgaagaactagagcatgatttggactagtagtatacataataactagattttaacctgcggtacaccgcgggaacaatttattttttaaattaatatatataaaagtttgtaaattgtatatagttataaaatgtttttattttatagtttacaattgttattaagtaacgtcctgccaaacccgtcccgccaacccgtcctcttaaaaaaactcatttattttattaatgttgatcttatttatgatatgtttatgaattattgtctaaatattttgtaattttgtagtaattaaatgctatcaaagatctctacggtttgatgattataatcatgtagaaaagcaatatcaaaaatgataattttgtagtaattaaataatattaaatattttggaagttttattttaataattaatcgtgtagttaaggtagagagattttgggaagattattaaatgtcaaatatttaattagaagattttctttctaattatcaaaaataattattaaatgccagtggcagccgctgtaaataaatcccaactccaggatttatttcacaaagtggctgcaaaaatgtatatatagataatttaaaaagttatctttatcaaattttaaaaatcaaaattttaaatttataatgtattatagaaattagtataaatttaatatacaatagaccaaaaccataaaaggatacgagaaaagaaactcaaaacaaaaaaaaaatcatgaaatttaatattttaacgattattattttagacaaaataaatcaaatctgaaatttattttatatcagattaaataatagtaattatataaagtatgcgacaaaaaaaaaatctacttaaagcatatgagttgtagacttgtagtgaaagaaaatgtgtaccaataatctattttaagttttcactaggtttgaatttaggtttggtaatttagcatttagaaaaatggatctaaaagtaaacttgataaagtacatggtctatatctggagaaaagaaaaatgtaaaggacatctctacaccaacgtatatacaacaaagtacaaacatagacagacatgtataaactatattaatactgtttaacattttcacatttaaacctttttcaaattattagttcaacttacttcaaaaaaagaaatgtaacagagaaatccgagctttcaagctgtgaaacaatagccatgcccctcataaatctttctactaattattttttttcacgtaagattctcaaaacaaatcaaaatctcatcttcttggtatcaaaaattttcttactttttttggttttgttatcccgaatttttagaatcaaaacccacgtcaattctttttcaaaggcatatattctctctgtttcaaactttgtgtctcttcttctccttctctgatcgttcgttttctggacgagagag

SEQ ID NO: 6553 - DNA, 3000 bp, Unknown
  misc_feature (1)..( 3000): cDNA_ID_1814830_gDNA_ID_1621097_Annot_ID_55727 3000 nt of promoter + ATG
atataattggatgaatatgatctgaccacatcgtacatgatagtgaggtctccatcttttcgtggaagaaactcattatcaatgatctctctgttatcatagtctgggtcaggaatgcaacatacttgcagaacatttgtacctgacaaaacagagaaaaaacacagaaaataagcaagcacggactccacctgtaaaaaccttcaaagttacttatgctttacacgccacaacacaacatagattcctaagatcaattagaaagaattaactctatcttgtcaagtcatttcttttatcaacagattcatatttagaaatgtgatgaaagtggatcgactcatatactagctattcgattacttctgcagaagatcttaaggctcttatgattgaatccagatcaatcacaaagaatgtgttgcaaagactctcacatttgactaattcaaacattaggtgtaaaaggaagctaacaagtaacatacataagacttttatcaacgagtgagcacatgggacttaaacaatgcaattgttgctagcatttgactatctctactaatctgaaattcctccttaattatagggatctacactagatacttcatccttaacataccaaaactcctaaatatagcaaaccaagatcagtcaaaagattattaagccataaatcaagtaaaccaaaatcaaatttaaacctttttgagtagctttgggacatttccatccatcagtagcgagagtgatgttcttaggaagcggcacattcggcggcgcaactccgaactgagtcccgacgagctcaacacgagcttgcatctgagtgacatcaccagcagtctgaatagctgatttcaaatccgacgaaggataaccagcgaaaacggtaccgttttcgacgctcaccggtaagctcgagccgtctgagagtacagcgtttgaagcagagacgaggatctctcggtgtgcgaatttgacgaagacacgccatgatttgagctcgtcgcggccgtggttgagcactgttatcacagattcgaaccggtagggttgatttgcggtgtcgttgggtgggatcttagatcctttagtgtgagtgtatgaaacgaatacaccgttgcatagatccgaatctgacggtggtgacggtgacggattagtagtgttggcgtcggattgtgatgatgttagaggaattgatacgatgagaagtgatagtagaagtaaccgagggatgaagttgggagctgaatccatggaaccctaaaatctcgctcttagtcaaaaagagaagttttttgaatttgaattttgtttgggaattgagagaagttagaaaaatggaagcttttgaagagatgatgactgataaagcgaccgcgatagtgcaagctgtaatgaaaaatgtttgtatttgcaattcaaattttcccctggagcattttttgttggctttttttgctttttcttttgttgaaaatctaagaaactttatggataccaatactcttacattattacataattattttcttaacaaaaataatgtatggatataatttcttaaaccctattttataagaaaaataaagattaaaaataaaataaaaaacacctaattgcaacaaaaacttcattttgtattcaatttttagatatatttaaaacgcactaaacaagtgagagcacatgagttctgtcgcaacataccaaattcttattttctgttcaacggtggtttgcttacttataaatggtatgagcatgagactatgagagcatcaatacatattccttaaaaccatccttgtacaactttccgagtcaatgagttcgtagactttctcctgaatagtgaagaaaatgttttgtatcatcgccaaattccactctttgcgatattaagctgtgttcagtgttctcgttcatagtcaggtgattaaaacaaaataacttcagaacatataagaaagcccaaaataataaaaagcccaaacccaaaataaaacgtatagcccgatacaatagacgatacatcactatcactagtactaagccaactagacataagacatctcccgtgaaatgtttgcttggtcttaactcttaagcttaattaagaagacaatgagataatcctcatgccaagttagatcactaatacactagtaacctccaatccattattaacagtatttctaatcatcggaccagacaagaatattaaacattcatgctactgtcttgagtgtctatgatctctttcccttaaactctcttgctgctgctgctcacaaatgattcgtccaacagaaaacggtgccgtcttttcagaaactttataaataatggataagaatactatgttttttactacttgggttttgtcacagatatcatctgcctcgtcagaaaggtaacagataaaaaaaataaataaaaaaaatgatgaccttatcttcaaccgctactcctacaacttggtaactgctgctctagatagataaatttgcatcttaaaaaattgtactatatttagaaagaattatacaaatactcagagattagttacaaagatggagaatgttgagagttaacttgcaattaattgaattgcaatcaactaaattacaatataccaaacgatgatcatatcgacatttgcggataagatcaattgtagttataagtccaaatcatatgatattggtctttcctttcttattgtcctagagagtttagataagaaaacatatatagtacttttaattatttctgcaatccattctttcccaatagtgcaattttcagtgtggaatttatatcccatatataaaattcatattcacgaaattcgttttatcttttttcttgaattgcggtgttacgtaaccatccttcgcatcataataaattattaataatttataacgattttaaggaagaaaaaaaagcttttaaaatcggagaattaatttcggttagttcagattt

SEQ ID NO: 6554 - DNA, 3000 bp, Unknown
  misc_feature (1)..( 3000): cDNA_ID_1814826_gDNA_ID_1621097_Annot_ID_55729 3000 nt of promoter + ATG
gaaataaaaaaaaaaccaaaaagccgattaaaccgatttaaccgaactcaaaaacctacataaaaagcgtttagtttcattgttcacctattatagaacaaagacaagaaagagaggttaacaataccttacaacagaagaatttcaaacagtttgggcattccaacgcataaatattatacaatcttgtatgctcaacatattcatcacagacaaaagccatttgggaatcaacggcagcaactgagtagaattgaagtaagaaaaggaaaggaaatgaaagtaataggtcaatagtattggtttttttttctactctttgtaaaatagatcacccatcgaaaaaattaatctttttacataacactaaactatttatttaagtctgtttaaaattacttataatttaaatatttttttcaataaaaagataagacaaaaaaagttaaatgcattgaaaaaaggaagttgaacgcaaatagaatcaagtcaccttattattattggtaaatctaaaaacatctagctactaattttataagacatgttgtgttttggttatcacagtaaaagtgatagcaaatacatattttgttacctaaattcttctacacagttttaatttttttgtacaactattgttctaagtgtgataatctaactcattatctattttttgagaagatttgatattagtagaatagattatttgattatgttttattaactaatccaatttgctggtaaatccactatatattaatagagaaacacttaaaagaataacatctagctacctatttatagaaatgtcatgctaacgagtcaaccaaaacaattttcaatcaatataatttattctttatttactagattgtttactaaatcaatagaattattttgcaatatttatttgacacatttactttatttgattctatatctaatttttacttttacgggtcaatatttttcaccaaacaataattaaatgacaattcaaattaaataattcaattatcttaattacggacaatttagttttaaattcaattttaatctgacccatttatgattcacacttgtcttctagtagtataggtatttttataatgccactttgtataatgatttatgattttattgcttcaattattctcgacaaaaagatattatttattgattatatatagttttttaagaaacacatcaaatataatctacatatatatttttgcagctattttgtgaaataaatcttggagttgagacttatttacaatggctgccactggtttttaattattatttttttttgtaataaattgattaacaaacgaaaaatattccaaatatatttcaatcccatatatcacacagatttctctaaaatttgaactagatttcgacaactatttaaaacaaaaaatgtttgacaaaccaaaatacaattgcaattccttaaaatgagcaaaacgcacctaaatacattctttatcgatccaataaatcttatttctccaaaatttgaattagattttggcaactatttaaaaaaaatatttgtttgacaaaccagaatacaattgcatcccgtaaaatatttattttaattatatatttaaataagcggtgtaccgcgggtttttttatgggacaagtttggcaggacgttacttaataacaattgtaaactataaaataaaaatattttatagatagatataatttgcaaacttttatatatattaattaaaaaaaaatttgttcatggagtgtaccgcggattaaaatctagtattgtaacaatcttggacatcgtaaaagtctgaagaaattaatagttaatcaacgaaaacatataaaacaaaacatgaaatgaaatagaagtcggcaaccaactttaattggttaaacattagcttaactcgtaactttaaatttggaaactaatgtacactattaatctaaattcgaaatcttaaactcgaaaatatgtattcttagttattaatgaaatttttactagttgacaaaaaaaaaaaaatttaaaagattttttttatatatttgtgtcttattagaaaaacttggaccgtccggttaaggtgtctttttctggttttttttaattaattaattaattattttggcttctttcggaccagtcctactgtacatcgtatctttcagtatttgtcaactagtttaaaggggcaagttcacaaatgggacctgcatcttgtcctagccaataatatcgttccacgtcgtactctatattgtttgtcacacgcggaaaattaactgtgcacatttgcaggatgctattttttactattagtgaaattgcttcattcactttggcccgcttctttattttgttgtaacatttaccctacagagttctcgaattatcaatttggtacttaatgaatcattttttcaattatcgtacctattttcattgaaataatattaaagcataaattcagtaccgaagtataattaggtcaaccgatgtaattttacaaaactatatttgaaaatacaaataattataaagagaagttttaatcgaattccaaaataaatccattaattttaaaccaaaaatcttataaaggttataaaatacgtataaaaattagttttgtgaaaacatatatcaaatgttttagggggtcagggtgtaaactgtgaataaaaataaatgttatggtaaaaaaagaatattttgtttttatgcgagttaacgcataatgtaccagttccgttgaatcgtcaacacaagagtcacaaacaaatttatcttttaacaaatttctctcttaaaaaattatttataaaaactctgagctcgaaatcggatttttttttcgtctctctcatcattttgctgatttctcaatttctgtgtttacactactccatcgacttgtaatttcactttcttagggttcttcttcatcggatcatcggccgtatctgaaaccggag

SEQ ID NO: 6555 - DNA, 3000 bp, Unknown
  misc_feature (1)..( 3000): cDNA_ID_1814815_gDNA_ID_1621097_Annot_ID_55732 3000 nt of promoter + ATG
ttcgatatatataaagaccatcgagatagcggcggtgataacaagtgcgagagcgacaggtgtgtgtggaagataagaagaaacggaccttgtaggtttaacgatgaaacgaagcagtttgatctttgttatccttggaataaatctttgtattgacaacaatatgctgatgttctgtcttttacgactcatggagtttcattgtttgaaacaataatataaaacatataaaatttctattattccaagttccaacttataataatttgataatcatatcatattatcatcttaagcattcaatgctacaaagataatacccccaagctattttacattaaaagctgaaacagagacacaatactaacgataaaagttcgtagtatctttatgcaaccatacatacatatacacaaagatagacaggtagtgtcctaataattctacttgggtgaggtatgaacagcagcaacagtagataccattgtatccataccacacatattatgaggccctctgcagattttgtagtaaccatgctctccccacatcgctccccacgagttcttgataatccaataaggcttctccttaagacggattggtgcataacccgatgaaccaaatccaaccaagagcactccatggtcttggctctttgaacatacatacgggcacgagactcctcctatgtatgtttgcatccacatcgcattgatagcaactgtaaaagagaccatgttgtgttaatatctaattcttaaattagtaacaaggtaaacagattttccaaacttactagctagaggtccatgctggactagattagcagcgatttggtcttcatccgaagagacaacgctgaagttagacacactcgcaacaatcttgctcttgtcgaacttacaagcggtatggtcacgtcctgtataaggatagtcctcttccttcattagaccaccagctttaagagcgtactcaaaagcgttgttcattagtcctccactgcaaccagaatcacatgaattggcttgtgctggatcacactgcaagaaacatatataaattagtcacaaccagttcttcaccaaaaacacatatcaaatgagaaacaaacctacctcatggtcacaatctacgagctgctgctcactgaggctaacaagctctttagtggctagaaaatgtgctccttcaagagctcctatcgcactaaatgaccagcatgaaccacacataccctattcacaatcaaaacacacaatcacttcactctctataagctccatgaacgattacaaagctaatccatacgaatttgaaatctctataaacctggtttttaacaggtgtgacggctccttgttcacgccaatcgaactccgtcggaagatcgctagtcggaagaataggcgccgtctgagtatcagtaggaagacgaaaccctcggcgtttcagtcctaaaaacttgcggcggaattctttcggagtaagatctgagaactgcgtgacgccgtggacggcagacggatctagaagctggttacgcctagctcgtcttaggttagctttgaagacacggaaccgatgatcgtgctctacctgagtcgcgtaagtcttctcgtacttggatttgaatagagtgaagtgatgttctgcgttgaggagttgttcatcgttctcctccgggacgacttgcctgatcgggttaacgaaaccgtcggtaacctcgccggagatgacggtagatccgagagaacctgctagtaacgtagctgcgatgaggaagaagaagaccacacgatccatgcttcttggtttccaagagataaggaagaggagactttggggacaagaagatgaaacagttacgagcttgtttaaaggagtgtgagtaaacacgtggcattaggtaattgggtgttagtttggatatttcttggggaaaacgacgacatgagaagtgacacgttgcttgttgtttctaatttcttcgtcagctgtgacgatatttttcagctaaaatatgagggtaaactagtagtttaccattcattctccattttcaatttggcgactaaagtttttatatacgtgagattctactaatttaaacattttgcaaaacttgcaacgtagacgtagtatagatgaaagatttccgaacgccacatggaaaaagtcaatgcatatcatgatttgaaatggaaaccatatctagaacgattgccgaattgcaacagcaaagaggagtggctcttagtcagcaataaacataatgattggtatattattgcctgtatacattctctaaagcattgaatttacatcagtaccaatcacatctttctattcattccagattcaaatcacaacattttaacttatctaccaatcaacttgttcatagccatccaaaccagagcttaatgtgagagactgctacagcatcaatggaaacattgcaagttgttgtgctcacacagtgcaagacaagatgacatacaccggtccattaaacaggacagctagcgtttaacatactcattgaaaggcatttcctacaacaaaacaaccatctgagcatgtatccgtttcccatttgtgaaatctttcctctgtttgcattcctgcaatggcacagcaataagtctcacgctcgacttgcgacccgctacaccaaaatggcccaacagcttcctttcaatctctcccatatagtgtcttattcagcttcaatttctttctctgattctccacctgaaatatccttgtgattataggtatcacatatagccatataggcaaagcaggtcacaatatcacatatagacagagcaggtcaggtcaccttaataataaaacttgagggtaaattagtaattagccttaattttcccatttctgctccctcgccgtaagcgacttgtagcgactctcgccagtccagtccaaaatcgggaggtgagcgaaatctccggttgttttttttcagtcatg

SEQ ID NO: 6556 - DNA, 3000 bp, Unknown
  misc_feature (1)..( 3000): cDNA_ID_2993916_gDNA_ID_1621097_Annot_ID_55733 3000 nt of promoter + ATG
gtaatttgtccatagtttcccgcagcaagaatagaaaaacaaagatgagtttacctgcctgatgcaagccaaacttgggatgctcctccaccattgtatctatatcgataaatataatctgcctcttgtttctccttgtctgcatcactaagctctggtagctttgcaaacatcaagctgtctagatcaatctctgtatttttaggatccattcttacctgaataatgagtaaagaaaagaagggggcaattaaagaatccagcaggatagaatcaattactgaacaaatgcaaatatgacaagaaaaaaatcaacttcaagaacagagaaatatgacggttataaagccaagaaggcataaaaaatctttcaatcaaaacaaagcaaaaaaaatacaagaacagataaagcatttggacaatctgcataccatatgcaagattcaagaagtaagaagagcactggaagccataccttatcaaaattcactacaaatatggcacttggtataggtttatctgccgttgcggctgatccagaacccacatcaatatcaaatatatacgagtaaagctggttaaatgcggactccacttttattgcctctacgtcataggcaggtaagtgtcttccaaaatcagcctaaatccaaaaatatttttgaagattagtatcataaacattaagatgtagtttttacagctatgaaatccacattttcatcgacatatttttatatgtaattaggttcgttatgagaaacagttaaatttgagatgataaaattacagcaacctctagtgcagttccagcaggcaccatggcttctttcactgccttctccagagctattaattcaggttgcccactctagagaaagaaaaacaaagatgaacatttaggtcaatgggggaaacaatgaaattattggcatcagaagtcagtaaaacttaatattgagtgcaaaaaacttcatgtacaataataatcagctcgagacgcaaatgcaaatcagctaaatcaaatacaagaatccagaacttgaatagaaatcttatcctacatatataatatcggatgttgaagcaggtaaatcataaacaacacaaaattcgtgaagactggttaaaggtttataaaattactcacaggaaagatattataaacaactcgatgctcaatatcaagtggctcgcccgtctcttggcatgaaggcctatgtgttgaaaaactggctcttaggaactcttctagtttttgaggatccactgaatacctgtaacctccatctccattcaaacccacaagcactatattcacttccaaaggaacctgaaatggtacctaaacaaaacaagcttcatagtgtgaaattcaattctcgatgtgtcactcaaactcagccaatctaacaaccatatgcacgaaaaaagctatgatcatagtcgtgaagcaacaagaacgcttttaatttcacttcggtgattctacagaaccaaattactcaacgatttcttctccttcttcttctagctaaattcagactaactgatgatgatgatgatgattcacataatttaagctggagattgtacctcggcacgggagtgaagcatacggcggacatcggatcgaacactctctcgtacgtcaaggaaagcactgtgatgccagtgaggatgacctggctcgcgacggaaaggttgctgagccgagtcggtacgagaaacgagtccgcatagaaacaagagaaacgcgacgaataggagagaagaaaacgaactcgatcgtgaatccgatctcaactccatgactgaaaaaaaacaaccggagatttcgctcacctcccgattttggactggactggcgagagtcgctacaagtcgcttacggcgagggagcagaaatgggaaaattaaggctaattactaatttaccctcaagttttattattaaggtgacctgacctgctctgtctatatgtgatattgtgacctgctttgcctatatggctatatgtgatacctataatcacaaggatatttcaggtggagaatcagagaaagaaattgaagctgaataagacactatatgggagagattgaaaggaagctgttgggccattttggtgtagcgggtcgcaagtcgagcgtgagacttattgctgtgccattgcaggaatgcaaacagaggaaagatttcacaaatgggaaacggatacatgctcagatggttgttttgttgtaggaaatgcctttcaatgagtatgttaaacgctagctgtcctgtttaatggaccggtgtatgtcatcttgtcttgcactgtgtgagcacaacaacttgcaatgtttccattgatgctgtagcagtctctcacattaagctctggtttggatggctatgaacaagttgattggtagataagttaaaatgttgtgatttgaatctggaatgaatagaaagatgtgattggtactgatgtaaattcaatgctttagagaatgtatacaggcaataatataccaatcattatgtttattgctgactaagagccactcctctttgctgttgcaattcggcaatcgttctagatatggtttccatttcaaatcatgatatgcattgactttttccatgtggcgttcggaaatctttcatctatactacgtctacgttgcaagttttgcaaaatgtttaaattagtagaatctcacgtatataaaaactttagtcgccaaattgaaaatggagaatgaatggtaaactactagtttaccctcatattttagctgaaaaatatcgtcacagctgacgaagaaattagaaacaacaagcaacgtgtcacttctcatgtcgtcgttttccccaagaaatatccaaactaacacccaattacctaatgccacgtgtttactcacactcctttaaacaagctcgtaactgtttcatcttcttgtccccaaagtctcctcttccttatctcttggaaaccaagaagc

SEQ ID NO: 6557 - DNA, 3000 bp, Unknown
  misc_feature (1)..( 3000): cDNA_ID_1814811_gDNA_ID_1621097_Annot_ID_55734 3000 nt of promoter + ATG
gtatgtatgttcaaagagccaagaccatggagtgctcttggttggatttggttcatcgggttatgcaccaatccgtcttaaggagaagccttattggattatcaagaactcgtggggagcgatgtggggagagcatggttactacaaaatctgcagagggcctcataatatgtgtggtatggatacaatggtatctactgttgctgctgttcatacctcacccaagtagaattattaggacactacctgtctatctttgtgtatatgtatgtatggttgcataaagatactacgaacttttatcgttagtattgtgtctctgtttcagcttttaatgtaaaatagcttgggggtattatctttgtagcattgaatgcttaagatgataatatgatatgattatcaaattattataagttggaacttggaataatagaaattttatatgttttatattattgtttcaaacaatgaaactccatgagtcgtaaaagacagaacatcagcatattgttgtcaatacaaagatttattccaaggataacaaagatcaaactgcttcgtttcatcgttaaacctacaaggtccgtttcttcttatcttccacacacacctgtcgctctcgcacttgttatcaccgccgctatctcgatggtctttatatatatcgaacgaatgcgattcatttggccaactaaaactacaaaaatacaacgtccttccaaagaattgacgcccgaaactaaaagaccacgactcacctggttgcagagtccggttacctaaatcatcgtcttttgatttacaatgatacagtaacgttagctgattaccgagatcattattgatttccacggttcttttcgaggtaggaaacacagaatttgttgatgatggatcgttgggaactggaatgtcgtttttatggtcggcttgtgataattttgtagttatgaagataatcaatatgaatagtgatagatattgctttggaatatccatttttttgaataggagagggagtttaagctagcacaatgttgtttgtaaatgtcgaatgagttatatactgtgtgttgtttgttacaagtcaagtagtcaatgatcctttccacttatttccattatattgtatccgaatctaccttttccttaaaattgatgtattgccagtatgtgccatgtggtcaaggcacgtgaattgctgtcaaacaaatgtagattgaattaggtatgtcaattttgagtatcttggtttcgaaaacattggcaattttaaatggaaaaaatgtcataataatctttaatttattaaaaacattgatgtaaatccttatgtctgtcgaaacgaaataagatatcaaatttatgttgacttttcaaataaatatcaaacttacgttgacttttcaaataaataccaaacttttattgacttgaccatttagttacgatgttaaatgggttagcaaatcccgttaatagagttaattttctattaacatacatgtcaactgaaaacgacattgtttcctataacaataatacgatgtcattttgttgtaacgattaaactaaatccccaaaattcaatcttaggtcccaaatcgagcaaaatctctaattccaaggggatgtattcaactggagatttgaaatcatttaaattttaatgagtttttaaatgattttggtgacttttggtaaattaggagatttgttattaaaattctcccaaattctacttgaaaccatgagatttggatgtttgaattcttaactaagaaattttctgcaatcccacccaaaatcactcaagtcattttaaatccactacttaaaatgtttccaataacagtgggtttggttgtacattttaaaatcactaatctaataacacttgattttaaaaaagtttttacaattcatgtttgaaataacatgggatttgtcattttaatacaaatcatttcaaatccttaattgaatacacccccctaaatctttatatgatttgaaactcagaaatttaatgagtagttatgataaaacaatatcgttttacattgttagagaagaatgctatcgttttcaattaacgggtttgttaacagaaaattgtctccattaacatagttttttaactcacttaacatcatgcctaccctcttttgttgaatattcatcttcacttcccccccctccccccctccccccccttctttcataaattcttccagattttttttgtaagaatctgacaagacctattaatttttgaggtacccaaacttttttaaaacaattgaggtgcccaactttacttgatttgttttacgcttatcaagcaaacaaagatatgattgaagacactaataaaaatgtcaactaagataattttattatataaagtatcgttaagtttgatttgttttacgcttatcaagcaaacaaaaatatgattgaaaacactaataaaaatgtcaactaagataattttattatataaagtatcgttttcaaattaataatttataagattgtgccatgtaccatataacaacttttttgattttatattttaacacatttaagaaaaaaagtttcattttattaattttaaactgtaaaaagataaatataaaaaattaaaaattttgaaagtaaaacaacaattatatggaaataagataattataagaacactatctgtctttattaaataaaaatagaaattaaaaaattattgattaattctaatttgaagctactaattgtaaaacaaaaaaaaaatacaataattatggaaattttacaattaattattagttacagaaggaaaaagttttttgtcgtggttaggggattgtcggttctgttgatttgagatagtgtggcgattttgttttctttaaaaaaccaaaatttaggtcaaattcgattctttcgtttctctcgatataatctgattttgatttgaatgtttcttgttgttgaaga

SEQ ID NO: 6558 - DNA, 3000 bp, Unknown
  misc_feature (1)..( 3000): cDNA_ID_1710920_gDNA_ID_1621097_Annot_ID_55735 3000 nt of promoter + ATG
ttcaaatgtagaggtaatggtagaacgattgcttttcgtgtctcttggattttatcttaaatatattagtagtgttatgcttgatattcgtgattgaaatatataaatattttcaaaatataatgtaacgtattattagccaatggatgttagacttttagtgaacgaaatgaaataaaacatttggtggaacgggatgtatgcaaaaataaatgttatcttccaaatggtagtgtaacaaaatatggatttgcgaggattcttttagttttgatgcatttgcatgattttccagttttggtgcattcgcatgatctttcaaacatttggcggaacatctttattctttttttctaaccaaaatttttcgagtgttttaattacaaagatttttttaaggaaacttcacgatggttataatatataataaactttactagctaacagattaacaaatctattaattgatgtctttgtagtaaaatttaaaactttacccaatcaaaaaaaaaaaaaaagagttcactaaccttacgtgtatatacacaaaacccatgttgttaatagtgaaagaaacgtggggattttttttgttcttgcgatagtagagaacttaatgttttactcgcaagactggaatgcaacttcccaccaaactcaaagtcaagccacataataaaaatagcaaaggaaaaaataaaagatgatcaatatacaagcttgtgaaaaattaaatgttgtgtctagactctagaaaatacaatactaaagttggatatcctacgaaagcttttttctgagaaaaaacttagatctgagccgtcgccgcctctccgccgcctgtgacttttgccggcggtgtgagagggcttccccccttttctttttcgttgtcttgtctattagtttagaaataaggtcgactctttgctcctttctccggaggctaaggtgaagctcaacgacgacggtgtgacgatgcggaggcagtaggtagaggagagagctctcggctcgatccttatccaggagactggtggggttcggagctgctccgagcagctgtttcgatccctgtatcccccaggagaaccaagccgacggatgaacagaggcagagtcagagtcttccaggcgtggggatggagctgtggtcgccggtggccgagataatccggagatctagtgaaccgtctcaatgtctggtccagtccggcgatggagcgaggcaacaaggcatgtgcggcgagatcgttccggcaatgcaccgtttaggtgaggtcttactaatccgggctccaatgtgttatccttaatcgattagtagcttacggttgattggttagctcgggaaaagctctagccttgctggtttgccttgtatcattggtcgggtcagtcggatatatggtccgcttttggtttaggaccggaacaacgaaagccggggatattgagtctttctgatgatgcgtctccgggtggtaatgctattgggacatggattacattctgatcaatagggactaatagtatggatttactttgtacttcagactaggttttggtctcttccgttttagtagttgttctcgtgtcgcttagagtctgtgtaggtggtcaaagagatgataatattctgatttgtggagtattatctatctcattgtggtttaaaaatgcaatggttcctcgatcaggtagcgctggatccgatagtgtttcagcgtgatactagatcaaaccattgcatttgggtccaatttgatagaggagaatgttatgtaccttcaattggatgtaatcatttgataaatgaaagttgatgttgagcaaaaaaaaaaaaaaaaaaaaagaaaaaaaatacaatactatatgtttgtttgtaacatgttaatagatagtagtattaaatagagtagtaaacaacaaaagaagcaagaggtggattttaaattaacaaaacaacttgttatcaagataagactatacacattaattgtttcatgatgataatagtaattaatagtcaataaaacgtgttattaaataatagaagctcccatgaaacatgcactatcggttacttgtagaagtaatacaaaccgttgacgtggtagacgattgtaattcgttatctttgacctaacgtataatggtgattaaaactaatgcttgataaattaacggatagtggtgttagctggtatcctccaaaggaggttgaacccaatgtctttagtttgaacttttgctatgaaaggtctcaacttttctgataatagaacaaacgggttaaaaagttgacatcggcaaagtaaattactgatcttggtccgaccttcttttaaaagattaaacaaataaatatttgcaattgtgaacatattaatggtgaaacgaattacttctataaaaataattgcatgatgaatgaagcatcttctctccttttcatggggcaatgtttcaaggagtttcagatcaaggttttgtaccaagtggatgtgtctttcactagttgagatcagatcattgacgtttttaacttactctaactatttttagtaattgtatagagctcaaacgttttgtggtgaaccttatactttaacagaagattgttttttaaaacacattaacgagtctgtgcacacaaaaaaaaaaataaaaaaaaattaacgagtctattatgcaaatggtgcataaaagttttttaacaaaaccatttattaacagatgaacagaaatcagaccggttcgatccggtttactcatggtttgtgtttgtactttctccacttgccgttttcatgtttgagaaacaaaatacgcagcgtctaaaatagaagcaaaaaacgggacgttgtttactaacaacgacaaaacaatggcacacttacccaagttcttcgtcatctcttcctgattgactctatttaaaaacccgatcggaaaattcgaaatccgttcaattgtaatcggaatcgtcgaaaaatg

SEQ ID NO: 6559 - DNA, 3000 bp, Unknown
  misc_feature (1)..( 3000): cDNA_ID_3048559_gDNA_ID_1621097_Annot_ID_171140 3000 nt of promoter + ATG
cgctttatgagttttatacaattcaatttggagttttctgtgtaaaaatatgaatactatgagactgttctcgggtttcttgaattgtttcagggtcttttatgatcattttggtttttatgtgggtctaattataaatttgtcgttttatgcggggccgatctgaaaattcgtccataaaccatgatagtgttgaaaatttgtatacgtggagtctagccgccggctgctataactttgctataacgtgtgatattataaaaagttgataaatctaatcttctaaaccaaattgttttaataatgctgtgtttacttcgtcatcgtatcgaattatacggctgctcttgttaagtgatgacaatatcttcaaataaagttttttcttttgtaagcaaatatgataaaactacgttagctaatagccaacttggtccatcatagttcataaagtcaaaaaatcagtaaccaattcatgagtggaattatacttgattcaatgacactgtttaggagcttatctaaattgcacaagttttgttacacgtaaaacacaaatatgccaaattagacatgtttctcgtcattctaaaacattaacaaatatttacatagacgcagtcaaataaatcaaatttcgtatgataaaaaaaaaacaaaaaaaatagcaaggttgatttgtcaatgctggcaaaaataagcaatgtcctaatttctcaagttggaaagtgacatttctctacccattttttgaaaagatattctcttttgcatataagatttgataaattgaacgcatatttgcactcaagctaacgttatgtacttgattacttgacccgactaatgacttattgactttgattaataaacaaagatattagccactccattctacattatatacaatctatacgcatctatatatatctactaaaaaaattgtaagtacatacatatcaatgttaatttgtatataaggagctaagaacaaacccaattaggcaactagcaattgctaaaacacgtaagatctcaaatatgaccacgttattcctccttattgctctattcatcacaaccatcctcaacccaacaagtctctctctctctctctttaatctcacatgatttattctcattttcaatttttatagatatataaacttaatcataattaaccttaattatgttatatgataaactaggtggagaatcagtaggtgtatgctatggaatgatggggaacaaccttccttctcaatcagacacaatcgctctctttagacaaaacaacatccgacgtgttagactctacgatccaaaccaagccgctttaaacgctcttagaaacacgggtatcgaagtcatcatcggcgttccaaacaccgatcttcgttcactcactaacccttcttccgctagatcatggctccaaaacaacgtcctcaactattaccccgccgttagcttcaagtacatcgccgtaggtaacgaagtatctccgtcgaacggcggtgatgttgtgctccctgccatgcgtaacgtttacgatgctctaagaggtgcaaatcttcaagatcgtattaaagtttctaccgccattgatatgactttgattggaaactctttccctccttcctccggagagtttcgtggtgacgttagatggtatatcgatcccgtcatcgggtaattttccaaccaaaccaaataaccaaaattcattagatttagttatttcccaatatttttcatttctggttacttgtggaatgattatttaatttcttcctatgtggctaattaggtttcttacgagtacgaactcagcgttactagccaacatctatccttacttcagctacgttgacaatccacgtgacatatctctctcttacgctctcttcacttctccttccgtcgtcgtatgggacggctctcgtggctaccaaaacctctttgacgctttacttgacgttgtttactctgccgttgaacgctcaggcggtggatctctcccagtggttgtttccgagagcggatggccttctaacggtggaaacgccgcgagtttcgataacgcgcgaagctttttacacgaatcttgcgtcgcgtgtgagagagaacagaggaacaccgaagagacctggaagaggagtggaaacgtatttgttcgctatgtttgatgagaatcaaaagagtcctgagatcgagaagaattttggtttgttttttcctaataaacaaccaaaatttccgatcacattctctgccgcgagagacggtacggcggttgagtgatgattttatatgctgagatttatgtgaataattgggagattatcccataaaaggttccaaataaagacaaatttcaaataaaacctgttagtccaagttaaattaaatactcggctttgttttggtccacgttagacttggtaaagtcatgcaatatttttatttgatatacaccagaccagaccagacctttgaggacacagacgcccacatgcccacatatatcgtccctcgtatgcccactagtcggaataatccacaacccacgtgatctcggtccttcataaaacatacaaggcaacgaaagtttaaaaatgtgggttaaattgatacctacacaagtttttggaacttttaacgaaattttaatagacgagggagtcaaatcataaagagaacaaggtcatcgtcttctttaatccttgagttcaccacctcttctgcttcattttaattggtttttgagagccttaagaaaaattcaaattggtttctgttttatcattttacaaacttcgccgttaagctagcgacggtgataattcaagcttcccaaaaatccttatgagtatcatttttgagctcttacagtgaagatttgtgaaagtgtggtttcgaatccaatgattgaagaagattttcttcgtctctcgcactaattctttgaaattccaaaaccattaactgagaaaaatg

SEQ ID NO: 6560 - DNA, 3000 bp, Unknown; identical to SEQ ID NO: 6558
  misc_feature (1)..( 3000): cDNA_ID_2990343_gDNA_ID_1621097_Annot_ID_171133 3000 nt of promoter + ATG

SEQ ID NO: 6561 - DNA, 3000 bp, Unknown; identical to SEQ ID NO: 6556
  misc_feature (1)..( 3000): cDNA_ID_3048571_gDNA_ID_1621097_Annot_ID_171131 3000 nt of promoter + ATG

SEQ ID NO: 6562 - DNA, 3000 bp, Unknown
  misc_feature (1)..( 3000): cDNA_ID_3048577_gDNA_ID_1621097_Annot_ID_171125 3000 nt of promoter + ATG
tatctggacctatacctttgtcaatcgctcatctcacaaagctgaaagatttgtaagtagtctatgtagtagtgttttatcatatatatttatctagagtgtttattgacttaggctcaatataattttcagaatgataagcgatatgactggacctgaatttttctttccaccactacagagcatgacacagatgaggcaattgtgagtctttaaatttgactgaattacaaaacaactttactggtgctgagatttaatgttcattgatgtttgtctttttgcagggttttgagaaatataaatctgaaaggagagctcccatcataccttggaacaaataccaccaacttaacactcttgtaagttatatactaacttattttctgatagaggaaatgatacaaaccaaaggaaccccaaaggatgcaagagtgaaacaaactaacaggagcaatacctagctcgtatgaggagcttagagatgtggaaaatatgtaagactatcatcatattatctatctttggtttgttagagatgttgtgttgttgaagtaattgttcatgaaactatcttactggaaataatttgttcttgcaggtatctcagtggaaatatgctaaacggatcaattccaagctggatgtcaaaagagaaagatagagatataatgtgagtttcctcctttgagttccaaacatctgccaaataaacatgtttcttaaacttttttgattttcctgatcttacgtacaacaaattctcagaagatctaaccaccaaaaaatgtgtggaacaacacatgtaagaagacatgcagtattttaatattcatatggttttttaactagaaatctcattgtttttggtaccatttatctcttgtaaggatatgtttgcaggttcgtaagtcgtatttcctcattatttgttgttaaagtctcaactttgaatgtactttttttgttaaagtctaaatttgaatttagctgtgacaaacttcaatttcaccattataacttttttgttggtacattgaaagtcgtttctctattcaatgacaaatattattcaccttcacatgagcgtcaccattttgatttccaacacgaatgtcgtttttgttgttacgctgcctcacgggttattgtctgtgcagcgagcccacaagacccgcatttttatccaaatagataaggttacgtaataggtactactcaagatatatatagtgcaaatattttccaaacagataacaaaacgatctctctccagcttcgagagtttcaggaaaagatcttagtagacctttagcgaattcgttttcacaaaaagaaacataactgatacatgaaacaacccttatgcattaaagcttctaatacaaatcatctagaaaacgctagaaaggagattagcagcggtggaaatagctgctccagtgagagcagactgaaccacttgctcatggcttgtcctctcagacgtcgtcatagccattgccgctcctgtcaatgctccagctaccgcgctgttccgctgtgacacatatcaaattacatactaattaaagatcatgttcatcatttgttcgttgatgaaaacaaaatgacacaagtcaaattaattagactaacccaatcatgagctcctccacgaacctctgtcataccgtaagtgatacctgagtataaccctgccgctagccctaccattcccaaatcattaaatctctttccaacgttaatcgtgaagcgttaacttaatcaaattcatatataaactcaccccattggagagattcttttcctgtgttcttcacctataggccaacaaatttaaacattttcagttaactaacaagaaaccttatgagttacgaccattctttatgtattattttgcaacacttagatatgaacacactagcacactagcacacgaatatttgacgaataataaaaggctaataattagcgattgtaataaactcaccaatgcatcaagagatttgctgctttcccctgattaagaaaacaacgataaaacatcattaagataaacataatgctgattacataagatcatcaaccaaatatgatacaattatgttacggacctctgagattagggaacctatgtttcttgttccctgtaatctccgacggtggacccacgttgttcgagtcaaaacctgcccctaaaatgtataatcaaactaaagtacgttctctatttattcattttcactcttacattacatactcatttcttatacatataaatcataagtaagaagaaacccgccggagtttcttaccgtcaaccacggtaaagtaagcttcccttgacacggcttgtaaagctcccaccttcatagttaatccatattaagctatgttactacatatatgttacatgcatatacgacagggaaacgaagagatatggatgaaaacttactccggcggctttaacgaaggaatctgcgatacggttaagaagaggatgaccaagatcgaacaagtgtgccttctcaaagcttcttatctcatccattacaattcttcctccactcttctccatttttttctttctttcttcacttgttgcttctctctttctctgttaatacttctctcttcaacaacaagtaaggagaagattgtgaaacagaacagcgttcttttgacacgtgttctgcttttccacacgtgtcggagtctgccgtttgaactgttcgccgttctccttccccacgtggctctcacaagataacgtcaggcagaccgagaaataaaaggcccaatgggctcagagttggatattatagccgggaattttgaaatctccggtttaaagacgagaaacgtgacacgtgtcatctccgctttgatatctccgcctccgctcgtcgagtgagactagtacagacttgtcatctccgtcactccctttttctctacacagatctctcattcactctctcgtacacaatg

SEQ ID NO: 6563 - DNA, 3000 bp, Unknown; identical to SEQ ID NO: 6554
  misc_feature (1)..( 3000): cDNA_ID_3048581_gDNA_ID_1621097_Annot_ID_171124 3000 nt of promoter + ATG

SEQ ID NO: 6564 - DNA, 3000 bp, Unknown
  misc_feature (1)..( 3000): cDNA_ID_3048585_gDNA_ID_1621097_Annot_ID_171122 3000 nt of promoter + ATG
atggtatcatgtttattggttgcgttttgtggaattcttctttggttttgggatattgaaacaagaaatgagtctatgagactcaagtgctactccatattaatctgggatgatcattgagactttaattgtgctcctgaacctgcagatcttttgatttcctgcctccaaaccaagcaaccttgtcaagacattcatttctaggtccgaatggtcttaaaaggcaaatggttgcacccaagtcagagataaaggtatagtgctgatcattgttacctttctcacattttctcactctttcttttactcttggtccaattcaatgtttaattatcttagatctgaaggaactgagaaaaatctttattttgtatggaatgataggttcaatatccgagtaatacagattggggttctgcggacaattcagggtaagtactcatcttctgttaccttctaagcttttccttaaagaagtcatggctatttcaaactgactccatgtatttctgcagtttaattgaagctggacctagcagttcctcagcatcacttaatggtgattctcaagaagtctcaacactgaactctgtgctctccttagatgatggtcgatggcagcgtcattctgaggcagtaaattcccagtttattagcgacgcaactgaagacccgtttcagtttgtcggtatgaagcaaccttcccctcctcccgtgcttgctcaagtgcatcaagagttagcccaaatttgcccatctaaagtagctgatcctagaccaggacctgcaattccttccctagaaggaaaagagggcagcaattcttatcagcatttgcatgtggtatgttccagctgtatcttctttcacttttgtgcagtttccaccaattccatagtgtttgtgagagtaaagtggaagggatatgcatatcaagtagaaaattatccatgattagtctaattatttggtatgtgttcaagaatcaacacattaaatcatcgaagtattggattcatgaccattacagcttcttaaaagcttgctagaatcggttctggaaatctttctctttcacctcttcttaatctactactaatgttgtcaccctttatttaaatttgctgaagcctgtgcgcataatggatgatttcctaaggctagctcggtcaaacacagaacggaatttagaaacttgtggagtacttgctggttctctggtgagtagatggaacctttgcatttataatttttgattccaatatcatgatcagctcgccattacttatattctgtctatttgccatgtttacagaaaaacagggttttttcatatcactactctcataatcccaaagcaggagtctacctcagattcctgtatgttcttcatttttcttaaccatttacatcaataacaatctttttaattctcgctggtatgcttctcacacttaggttcatcatcatttgggtaatgtacagtgccaaacactaaacgagaagaaatattcgagtacaggacagactctctctatttcccttgggttggattcatgtaagttctctcacccgaactaaaaaatcttccatttccagataatgacttaccaaaacgttactcagaacaattgtgaatccatatatccactagttgataagctttatcgattcgtcttgctaatttacattttggtttcagacacaccctacacaaacttgcttcatgtcatcagttgatctacacacacactactcgtatcaggtaacaaactccccttatcaatatctctatgttaatcacttatgatgcgattatagtaaaaccatcatctatatctattgtcccagataatgctaccggaggcggtggcaatcgtaatggcaccaacagacgaatcaacacctcatggaatattccatctctctgatccatcaggcgtatctgtgatccgaaactgccagcaacgaggcttccacccacacgaagaatcagaagacggtaacccaatctacgagcattgctcacacgtcttcctcaatgccaaactcaaatatgaagtcctcgatctccgctaaaagccaacctccatcaccatgttattatttttcctggagtcttaactttaaagagacattaaaaagacctcagagatcagatgtctcagccgtacatatatgtgtatacttcttaaaaaaaccttctctttaaagttccaaacttggctgagccgtcttaagtaatgatgattgtgtttatttataacgagtacacttttaaattcgtatgcaccatttcacaaagccagatgtttgattaaaaaaacataagtatttttttctgacgattttttcatttaaattaaaattcattatagtctgtgggaaagacctgataccatgaaagttgaggtgaaaatctgttattagctttcatcagataagaacggagagagaataacagattttcacctcctagataatgctaccagaggtacttgcaatcgttatggctccaacagacgaatctaccccaatatatgagcattgctcatacgtcttcctcaacgtcaaactcaaatgcgaagttctctactctaaactttcttaaacgaatataatatacttttaaaattactttcacaaaaccaagttttgccaaaaaaaaaactgtattttattttaaattaaatttagtcggtgcgaaaagactaatgaataaacaagtcaacttaagtaaattaatggtctctgtatcgaatcttaaaatttagatttaccaaaatgtttttgtaaaccaacgaaattcaatctttctctctgtgccttttttcctcttttctcgttcccctctacttcatttagggtttatcatcctctaccaatccgccgattctatacatacacttttcatatatatacatacatcgtctccactctcgttggctcatttttcattcaccgccacgaagcaagaggagattcgtattagccaccatg

SEQ ID NO: 6565 - DNA, 3000 bp, Unknown
  misc_feature (1)..( 3000): cDNA_ID_3048589_gDNA_ID_1621097_Annot_ID_171121 3000 nt of promoter + ATG
tatatatacatacatcgtctccactctcgttggctcatttttcattcaccgccacgaagcaagaggagattcgtattagccaccatgtctttgagacctaacgctaagactgaggttcgccggaaccgctacaaagtggcggtggatgctgaggaaggaagacggaggagagaggacaacatggtcgagatccgtaagagtaagcgtgaagaaagcttacagaagaagcgtcgtgaaggccttcaagctaatcagctacctcaattcgctcctctcctgttcctgcttcatcaactgttggagaagaggtaatattactagcgatctggaaccgtttcctaggatttgattggtttagatcgattcgattttgattttggttttggttttggctagttggagagtttgcctgctatggttggtggtgtttggtcagatgatagaagtttacagcttgaagcgactactcagttccggaaattgctttctattgagcgtagtcctccgattgaagaagtgattgatgctggtgttgtgcctcggtttgtggaatttctcactagagaggattatccacagcttcaggtttggtggatcgttatgtatctgtcatattttgctagaattgtcttctgatactaattacttgtgtgtgtgtgtgtgatttcagtttgaggctgcttgggcattgacaaacattgcttctgggacttcagagaatacaaaggtggtcattgaacatggtgctgttccgatttttgttcaactattggcttctcagagtgatgatgtccgtgagcaggtaagatatgtgtttatggttttttctcatgactcaatatactgtcaattttgtttgttttcgggaacaagcatgttctaaagcttgtttgtttcttaatcttttcatgtgtaaggctgtgtgggcattagggaatgttgctggtgattctccacggtgcagagatcttgtccttggtcaaggagctttgataccattactctctcagttgaatgagcatgctaaactctcgatgctgagaaatgctacttggaccctctctaatttctgcaggggcaagccacagcctccctttgaccaggtttgtctctcattcctatcttaatctctgcccaaagatgaaggagtttttctttttaattcttgtgatctcttaataacaggtccgtccagcactcccagcccttgaacgcctgattcattcgactgatgaggaagtgttaacggatgcatgttgggctctctcttacctttccgatggcacaaatgacaaaatccaatctgtcattgaggcaggtgttgttcctcgactcgtcgagcttctccagtgagtttcaaatcccatgatttcaccgtgcttttgtataatgaatgttatgtgttaatgaatattatcaattttattttgctgtaggcatcaatcaccatctgtgcttattcctgcccttcgtagtattggtaacattgtcactggagatgatctgcagacacagggtatgttggttcttttatagtgtcattcattcatattattcaggatacatggtccaatactgatgggaagaatgaaatacactggctagaaagctgaatctgagtttgttgataatgacatttagttgtcaaaagttacttgtcaaattcttcctagatgaatctctagaatgggaactgtcaattcttcccagattttatttccccccctgcatgttttttaccctagttatgcaatacctaacattccttttgaatagttagactaatttaaggcagtatgtataatactcttaagaatctcacacatgtaccattcctcacttattttgctttcttttttggttggttctacagtgtgtaattagtcatggtgcacttcttagccttttgagccttctgactcacaatcataagaagagcatcaaaaaggaagcttgctggacaatctcaaatatcactgctggaaacagggaccagattcaggtgaacttttgctaaagattgttgtttctgctcagcttatcagtttctcataaactaatcactaatgttggaagacatgtttcagaagcctttttgttgtttgaagaaagatgttctgtgtgtttatgttctctaatattgttgtggtattgcaggctgtgtgtgaagctggtttgatttgccctcttgtcaatctgcttcaaaatgcggagtttgatataaagaaagaagctgcgtgggcaatatcaaatgccacttcaggtggttctcctgaccaaatcaagtaagattatccgatataaactccatgttctgttgatctcaactcctttagaatctttgttggttatttttcaaacagtcaattaagttattccgttgtgtgttttaggtacatggtggaacagggagtcgtgaaccactgtgtgatcttttggtgtgccctgatccaaggattatcactgtgtgtctggaaggattggagaacattttgaaagttggggaagctgaaaaggtcacaggaaataccggggatgtaaacttttatgcacagctgatcgatgatgctgagggattagaaaagattgagaatctgcagagtcatgacaacagcgaaatctatgagaaggcagtgaagattcttgaaacgtactggttggaagaggaagatgaaactttaccacctggtgatccctctgcacaaggcttccagtttggaggaggtaatgatgcagccgtaccaccaggtggattcaacttccagtgaaggtaaaaaaacctcactacttgggactaatttatctaagcatctaaggctagactagcaaacagagtaaatctgcctgtgtgtctaccttgtgtgaatctgtgagtctggttttgcttccacaggagctgaacatgacgatttgaagagtcgaaggagcttaaagagtttgggggcactggttaaaaagggtatgattagagagtctggtcttctgtgtaaaagtcagatg

SEQ ID NO: 6566 - DNA, 3000 bp, Unknown; identical to SEQ ID NO: 6553
  misc_feature (1)..( 3000): cDNA_ID_1814830_gDNA_ID_1621097_Annot_ID_171119 3000 nt of promoter + ATG

SEQ ID NO: 6567 - DNA, 3000 bp, Unknown
  misc_feature (1)..( 3000): cDNA_ID_3048597_gDNA_ID_1621097_Annot_ID_171114 3000 nt of promoter + ATG
cattggagatctctgcatattcttaggcaataatgagcccttttgtgtcaaggcaagctcattccctggtctaaaccctaactccatctattttgcaggcgatggcttcggtgtttacgatatcgccactagaaaaccacgttccttccgtcccaagtctccctcagccttctcgtcagcatcactcctcccttactggatccctccaatgtctctttagtttacttgttcttcactagtcatgttctgtaacttttgttttttatgcttataattgttcttttgcgagcccttggacgttggccgccatcttcatacgagttaataaattttggtgtgaggaaatatacgagtcaatttatgaaacgaaggtagtaactttcgtaattccttttttttttttttttttctctggttgtatgaatcattcatcatcgatatcttatacttttgtatcatgatcgtatggatcattcatcatggaccttgaggggttactcaatagagagcagtagtgtggaagaccttcttggtatgactaagctcagaactctcacggtccattcccttgatggttgtacgttagaaactctgtctgcatctctctgtgaatcgagagaactcgggcagctttcattgtacgaggtcatgcatgataggcataatgaaggaaaattagttcttgatttgattcaactcaaatttttaacggtgggcatgcatatgcctaggttgcctgatcaacatcgattccctccaaaccttacgaacatatgtcttcggtattgttgcatggaagatgatccaatgccgattctagagaagttgctccacttgaaattggttgaattatcatatggtgctttcactgggaagaagatggtgtgttcaaaaggtgggtttcctcaattgtatgagctaaatttatgatttggaagagtggatagtagaagaaggctccataccatgtctccatactttgactataaatgaatgcagaaagttgaaggagcttccggatgaggtcatatacataacatccttaaaacaactgacaattggaggaaggaatagtgaatgggtgtggaaattgtctgaaagaggacaagatcactacaaagttcaccacattccttgtgttcagtttatttactagacctttgtctaattttatgtataaaaattataacaatgtagaaaactacaacacaaatgagatcaaattctgatttttaaaatccggttgtgatgattattaatcgtggaaaaaaatcagggattataacttttgttaaattgtgaacgtacaatattgaactgaaaatgccaaatgaattggttattattactttgatgaaaatgaattgatcgtttaattttttttatatttataacaaaaatgcgatatgctctttttaattctttatttctatttttgcttcagaattttttttcattttatttttggtcaaaaaggttattaatttccttttcaatttgtacgaatttaaacggtgacgtttttgtttaaattatcaaacaaatcaaaacaaaatcaataaaatctaatctctcatcatgaggcatctttgactgctctttaattcactaaaaaagtctaaaaccctaaccattgccctttttcaaacgaagaagaagaagacgaaacgctaccatcatctacacacacacacccaactacttttttccatcgccggcctgtacaaatgtcgactacccgtaggatccgcggcgagaatcggttttataacccacctccgatgagaaaacttcaacaagagcgtgagaagaagagacttgaagcggaggagatagagaaagagaagaagaaggcaaaggagattctcgatcgaaagattaaagtcgaggagaaggagattaagcaacctgaggagtgctcgacctccgattgctctgtgccgagtcgggtctcctccaccaccaccaccaccggaactacttcttccaatttgggccggtttctggattgcaccactccaattgtttctacgcgcacttgcctttggtaattactccgattttgaagttttacttgaatcgacgactagggtttgggcagttttagaatgagaacattagcatcaagcgttgaaaatgggaactttttatcaattcttgggaacgattatgatctcagtctcttattgaagatagaattggtttcaggttttagaatttatcgctatttaggattgtagatttgagaaacagattcagttagtagaacaattgtgatgttgttgtggtcagtcatagtttctgtgtttttgcttcagacaagtagtaaggggtggagaactcgtgaaccagagtaccgtccctatttcttgctgaatgatttgtgggattcatttgaggaatggagcgcctacggtgtcggggttcctcttcttttaaatgggatcgattcggttgttcagtattatgttccttatctctctggtattcagctttatgaagacccatctacgagcctgcacaactaggaggtgagttcttacattctgcttatatttttgattgtttcctatcaaccattagcagtagtgatcgggttctttgctcgttgattggttcttcttctgatagaaaaaaggatagcagttggcttttttgtcaatttatatattttgagatgaagccacttctttcttgggttgttcttaatcttcggatgcacgttctttaggagataggaaaaccaacttctaagcgttctctgctacaatatctagagatattcatttggatgactaatacacaacaacttttatgctctcaaatactagtcagtggttcaagtttatcatggtgttgaattccaaatttgtttcatctcgttggttttctctttaattcccaattcgtttctgctttctagagtaaaattcgttgttttgatgtttgttcttaaacaggagagttggtgaagaaagtgatggtgattcgcctagagac

SEQ ID NO: 6568 - DNA, 3000 bp, Unknown
  misc_feature (1)..( 3000): cDNA_ID_3048606_gDNA_ID_1621097_Annot_ID_171110 3000 nt of promoter + ATG
cttcttcgtttgaaaaagggcaatggttagggttttagacttttttagtgaattaaagagcagtcaaagatgcctcatgatgagagattagattttattgattttgttttgatttgtttgataatttaaacaaaaacgtcaccgtttaaattcgtacaaattgaaaaggaaattaataacctttttgaccaaaaataaaatgaaaaaaaattctgaagcaaaaatagaaataaagaattaaaaagagcatatcgcatttttgttataaatataaaaaaaattaaacgatcaattcattttcatcaaagtaataataaccaattcatttggcattttcagttcaatattgtacgttcacaatttaacaaaagttataatccctgatttttttccacgattaataatcatcacaaccggattttaaaaatcagaatttgatctcatttgtgttgtagttttctacattgttataatttttatacataaaattagacaaaggtctagtaaataaactgaacacaaggaatgtggtgaactttgtagtgatcttgtcctctttcagacaatttccacacccattcactattccttcctccaattgtcagttgttttaaggatgttatgtatatgacctcatccggaagctccttcaactttctgcattcatttatagtcaaagtatggagacatggtatggagccttcttctactatccactcttccaaatcataaatttagctcatacaattgaggaaacccaccttttgaacacaccatcttcttcccagtgaaagcaccatatgataattcaaccaatttcaagtggagcaacttctctagaatcggcattggatcatcttccatgcaacaataccgaagacatatgttcgtaaggtttggagggaatcgatgttgatcaggcaacctaggcatatgcatgcccaccgttaaaaatttgagttgaatcaaatcaagaactaattttccttcattatgcctatcatgcatgacctcgtacaatgaaagctgcccgagttctctcgattcacagagagatgcagacagagtttctaacgtacaaccatcaagggaatggaccgtgagagttctgagcttagtcataccaagaaggtcttccacactactgctctctattgagtaacccctcaaggtccatgatgaatgatccatacgatcatgatacaaaagtataagatatcgatgatgaatgattcatacaaccagagaaaaaaaaaaaaaaaaaaggaattacgaaagttactaccttcgtttcataaattgactcgtatatttcctcacaccaaaatttattaactcgtatgaagatggcggccaacgtccaagggctcgcaaaagaacaattataagcataaaaaacaaaagttacagaacatgactagtgaagaacaagtaaactaaagagacattggagggatccagtaagggaggagtgatgctgacgagaaggctgagggagacttgggacggaaggaacgtggttttctagtggcgatatcgtaaacaccgaagccatcgcctgcaaaatagatggagttagggtttagaccagggaatgagcttgccttgacacaaaagggctcattattgcctaagaatatgcagagatctccaatgtcctccgtgtaacacatggtccttttatcttcttccagctctctaaacaccatgaaacgctttgttccgcgacacaggaatgtcatcgaatcacctggttggtggttctgagcgtactacttgattaggaaacgttggcctgagggagactccacaaggtatacagtcttggaacatgagtcaagagctcccactcggactgggtcaacttaggaacgttgcaaaaccgcaactcaaccaactcagagccggtcatatcctctccgaagaaagaatcccaaaaaaccaagaagtgccctccaaaactaggagtgtagaacttttcatctctctttgaatacataacctttgattgatcaaaatattgaaaaggggttttaaagatgaccgaacccgagtccttgtgtgtgccaccaggcctattgaaattgatcataggtcctaaacacttgacagcaactgcaaaatctttgctttgatcaggtgaacaagtcattgcggcgttagtgatagcttgttgttggatagctataggtttaccaaggggatgcaaaggaatgcttttgacagatttggagccacatggattgtagtagtcagtaacatatatggctttatattcattataatcacacacggccttgaaaactccccaaccatgggacattccgaccagacaccctttacgcaactccattggtaataccttgtctcggacaataacttcatcttccttcaccgggtcaaaatagtggatattacttgttacatgaatatcatccatagaacttccatagtttatgacacgatacaacaagtaagggttggtggtagaggaggaaaacatccgaagagtgtggcatctctggtgaaaagtaagaaatagacatcagaagaagaagacgaaggaaacagagattatatacaaaaactagaagagatttaccagaggaagtttacggagagaggccttggaagagaggcttagaagcagagacgacatagcttttgctttgatatgtgaaaaaatcaaaaagaaacaaaagggttttcacataggtcatcaaaggaaaagtaaagaaaaaataattggtgcaaagtaaagaatcttgtgcacaaatttgataacaaagatatttcgtttccattttcataagattatataataagggaaaaaggaaatgtggagaaacgtggaaacaaagataaaaacgagagagacattattcttgtggccaggcactttggtcttagatcgagtcaagaagggactttcttggttgactaactcgaaaaccctttctttatttctttttgattcttcactatcaacgcaaagctatg

SEQ ID NO: 6569 - DNA, 3000 bp, Unknown; identical to SEQ ID NO: 6549
  misc_feature (1)..( 3000): cDNA_ID_3048610_gDNA_ID_1621097_Annot_ID_171109 3000 nt of promoter + ATG

SEQ ID NO: 6570 - DNA, 3000 bp, Unknown
  misc_feature (1)..( 3000): cDNA_ID_2173891_gDNA_ID_1621097_Annot_ID_171103 3000 nt of promoter + ATG
tttataaagaagataatgcttgtgatttcttttgttttttacttcgtaaatgatcatacataagatataaggatatgatgtttacaggagttaagccatacaatttcgagagaaaagcatattagattacatactagcattaacaccgtaacatgttatcttaggtaagcttcaaattatattgcttttaatacatagcagaccccaacacttggtagtgatctaaaccttattttaagtagcaaacacatatgtcttggtttgcacatttcccgaaggcagaaataaatactatatcatacataattagcttcttataattaattgcattttcaacataaattgcattttatcccccttaattacgaaattcctttataagaacccctccatagagctgaaccgccttatcgcagttaatagcccgttcttgtggcctctcaaagcggtcaacatggccaataaaaggacgagcaccactgaagtattgaatacgatccgtgggatgataaaccaccggttttacaatagttgactcatatgaaaactgagaaatgactcggcgagcagtaatatctagttgcctcttttacagtataagattttggaccaccatattcgtatgaattttggttaaaatacgaaggaaactcgtttctaggaacatatggtttaggggtaagtttatgagacttaccatacatgttatcgactatttcaaaagccttttgggcaattcttgtattcctatcattttgagccattgccaaggaagaacaaaaaagagaagaaaggtgtttttgtcttagtgttatctttgtttcttcggttttagtttgctttgggaaacaaagccaatgagcttccttatataagaaaaggataatgaacctacgtactcatctgttgacttatcttttaggaattatcccttcactttacatgtagtctttttttttgtctaaatatttaattcattaatcaaaagaggatgtacaaagatttttttttttatatgtacaaagttacatagtcatttttattagattatccctttttttagtggttaattgaacataaacttaaatttgacattacaaaggggtccttttttcccaaacaaatactgtttcggtaaaggaagacaagaatagacagtatatgtagtagatataaatctgacattaaattccttttgacccaaaaaaatgaacattgtattactttataaagaattaagacagtagtaggcggtagtggcgacaccaatttgcttctcatggtacgacatatatatcttgtccgcatttgacttatcgatatcagagagtcatcacggaaccatgttcactcttaaaaatagggggttaaataagcggatccttcacaataaattagttcagttctatagaggcctaatttagtttgtttttattggtggttgaatcatctaccttatgcaaattatttcaaagcaaatggtgtttccccactacaagcaaattcaaccattcataggttcttgaaaatttgatccgaagagtaaccatgcgatgaatgtatttttttagaattaacaaaagactaataaatcaaatttaaatgaaagaaattgctcaaatattataaatttcatgtttgacaattgattattcatattcttaaaaaaaaataataggatagtatagtataaaattataaattatttgagttgttaattataaattatttcgaaacgttagttgttctgaaaatgatctcttaaatctacgtaactatcaatattgactctatttttaatagagtcataagattagtttaaaacgaattatttcagcaagaaaaacattttccacaaatatgtaataaaactatgaaaggccctaatcgtattaagaaaacagatttgaaattatttaacaagaaaaaacgtttatgatttctgttcctaaaatattctcttcaattttggagagaaatgtttttgttttataatcatcaaatggtaagcttttaagaataatgtagggtcctaatatctgtctaaaaattgaaatatatatggtgaaaatttggaggaataaagagaaatatcattctttcttatattttttgaaacggcatgggatgctaaatgaagtctatactctatacatcaaggataagcaatgttgaggaataatagaagaaattaacgggatgctaaatgggaagaaataatagagaatataacaatgagaccactggtcttttttgcctagtgcaattaactttcgcaaaatagattccctatcaccaaatttgcatatatacttccattacacgtttcatgcctatgtagactgttaggattacaaagtccaacaaagtatctttttaattaaaagtgcagagtcgaagtagcagagagaggagatacggctccactctatcttctcattcctctaataatatttacgccacattaggccacaaatatttccacgcatctcaatacataaaattaaggaaaataaaattacgtacaaccttcattttgtaagaatttacatctcactaatcatttatactataaatcatatcataaaattcccttataagtatcaattcctctatttttttgccatgatttattatatattatattctatttatacgatttaattagtaataataaatatatacttctagaatttttttatataattcgagaaccaaaaagagtacacatttgtaatttattgttcttacattattatgaaaactttttttttagattaatttaaagagacgagttagagtagggcttataaacaaatataaaacaaaacaggtcgtttaggcccatttatttgttaaggaaacgggtaccgcgagaaactagggggaaagtgatagaccaaaaaccctaaatctattataatcactcttttataagtagtccatttatttcaccgccgaatatgacaaagaggtggagctaggtcaaggagataagaa

SEQ ID NO: 6571 - DNA, 3000 bp, Unknown; identical to SEQ ID NO: 6546
  misc_feature (1)..( 3000): cDNA_ID_3048618_gDNA_ID_1621097_Annot_ID_171101 3000 nt of promoter + ATG

SEQ ID NO: 6572 - DNA, 3000 bp, Unknown; identical to SEQ ID NO: 6545
  misc_feature (1)..( 3000): cDNA_ID_1814884_gDNA_ID_1621097_Annot_ID_171094 3000 nt of promoter + ATG

SEQ ID NO: 6573 - DNA, 3000 bp, Unknown; identical to SEQ ID NO: 6544
  misc_feature (1)..( 3000): cDNA_ID_2173870_gDNA_ID_1621097_Annot_ID_171090 3000 nt of promoter + ATG

SEQ ID NO: 6574 - DNA, 3000 bp, Unknown
  misc_feature (1)..( 3000): cDNA_ID_2173859_gDNA_ID_1621097_Annot_ID_171087 3000 nt of promoter + ATG
aatcccaaattctctttcatttatatgatattaaccttttagcgaaaaaaaaaaacttgtacgcaagagacggtcaatgtcacttgggacattatgtggactcttccaaaaaccctttagaatgttgtcattagagcttgaggttctaacggttaagagcttttttgagctttatatatattattttggatgttatccgggatgatataattttccatgtaatatctataagattttactttcgttgtatttcgaccccaaatctttggatgcatggctcgaccacttattatcgatcttccatcgtggtagcacgtatgagttggtccatcgggcattggcttcctgctatgtggtatggagtacgttgctccagtgcacgttggttggagtatgtcgcttctggcctcttcatcttttttcaatggttttttgctttggactagtcgattaattcaattgattggttcgcatttagtttttagtgggtttttgcaactctcttaggatgtgcttttgatgaaacaatccgatctattcattaaagaaaatcttacatctaaatttatattcttaaccaaacaaacatgtgttatattattaaccatataaacgtaacaaatttttgttttatcaacacaggtaacatatttattgtttatcttaaacataaaaaaaataattatttctacatgggttttaacttttaactcaattaattgaactgccggtctgattttccctgacttcaccaaacctatatacacaattcgttagattgactgatatcattagttttcgacataaattttctattatttccactctcacgttgtttaatcggtccgtgtttcaagagtttttgaaacgaatgaaaaaaaaaaagaataattagacacatagattttccgggtgacacgcaaatgccggtttagctagcattcgaaggtaagtgatgaaatgactaaagaagaaacgatgataccaaacctaaccatcaagcaaaaaggttgatatacctactatttagatgtatcctcctagaccttacattattgtatccactttaagaatttggctttcgtttcaaaagaaatacaaaagaaatcctaacattattgtatccactctaagaatttggctttcttttcgaaagaaatacaaaaaaaaatctgaaacactttcgaataatttgttgattaccttcttcttttatattccttgtgatctgctttacagttttatacatacacatttgattggaccattggttcggtattcttaaacgaccggagatttatccacacaacgtcttctcgcagccaaacacatcaaactacacatgttcttcttgtgtagaaaactctcactttcacgattccgacaccattttcctctcagactccgtcgttttcttggggaaaacccaaatccaactacccatttctctacattacccgacaatcaaacaaaacgaccagagaagtcgagactcgacggcgtagaacacaaaaccctaaaggtaaatggcataaacatgcacgtggcggagaaacccggatccggatccggagaagatccgatcatactcttcctccacggatttccggagctttggtacacgtggcgacaccagatggttgcgctctcttccttgggataccgtacgatcgcgccggatcttcgtgggtacggagacacagaagcgccagagaaagttgaagactacaccttacttaaacgtggacggagcgtggtcgcactaatcgtcgccgtgaccggcggagacaaggcggtttctgttgttggtcatgactggggagcgatgattgcgtggcagttgtgtcaataccgacctgagaaagtcaaggctctggtcaacatgagcgtactcttctctccgaggaaccctgttcgagttccggttccgacactgagacacgtgttcggtgatgattattatgtctgcagatttcaggtaattaatttgctgccctaatctttaaaattaggaccgtataccaaatcaataagtttggttagttcgatggaaagaaagatcaatggaatcatataaaagaggagaaaacgaataatatgattttaaagtaagaaatttaaataaatattatacagttgaatgacaagtgaatttgattacgtttttaattttttatataacagtaacatttatgagtgattattttgtaattaagaaagctggagagatagagacagagttcaagaagttgggaacagagaatgtgttaaaagagttcctcacatacaaaacccctggaccgctcaatctccccaaagacaaatatttcaaacgctcagaaaacgctgcgtctgcgttaccactgtggttaacacaagaagaccttgattattacgtcactaagtacgaaaacaaaggcttcaccggacccattaactactaccgcaacattgaccggtacgtttaatcaccacacggttcaatagtatcatcacataattttcatattttaaccaatcggttcgcagaaattgggagctgactgcaccatggaccggtgctaagatccgtgtaccggtgaagttcataatcggagatcaggatttgacgtacaattttccgggggctaaggaatacatcaacggtggcggtttcaagagagatgtaccattgttagacgaaaccgtcgtgctcaaaggattgggacatttcctacacgaagaaaaccctgacgtgatcaatcaacacattcacaacttctttcacaagttcctttaaaatcataaactaaggaatcgttaaataaaacaaaaataacattcgtgtgttttaccggttagtgaaaatcttatgtccaataaataccgggaaaatcggagtaaaccggatttaatcttgatcggaccgattaatatgaaattaagaattttcctccaaatttgggatttggatcatctcttcttcttctacgtcttcatcatcagtcatcactacgaatg

SEQ ID NO: 6575 - DNA, 3000 bp, Unknown
  misc_feature (1)..( 3000): cDNA_ID_1814807_gDNA_ID_1621097_Annot_ID_55736 3000 nt of promoter + ATG
aggaaccattgcatttttaaaccacaatgagatagataatactccacaaatcagaatattatcatctctttgaccacctacacagactctaagcgacacgagaacaactactaaaacggaagagaccaaaacctagtctgaagtacaaagtaaatccatactattagtccctattgatcagaatgtaatccatgtcccaatagcattaccacccggagacgcatcatcagaaagactcaatatccccggctttcgttgttccggtcctaaaccaaaagcggaccatatatccgactgacccgaccaatgatacaaggcaaaccagcaaggctagagcttttcccgagctaaccaatcaaccgtaagctactaatcgattaaggataacacattggagcccggattagtaagacctcacctaaacggtgcattgccggaacgatctcgccgcacatgccttgttgcctcgctccatcgccggactggaccagacattgagacggttcactagatctccggattatctcggccaccggcgaccacagctccatccccacgcctggaagactctgactctgcctctgttcatccgtcggcttggttctcctgggggatacagggatcgaaacagctgctcggagcagctccgaaccccaccagtctcctggataaggatcgagccgagagctctctcctctacctactgcctccgcatcgtcacaccgtcgtcgttgagcttcaccttagcctccggagaaaggagcaaagagtcgaccttatttctaaactaatagacaagacaacgaaaaagaaaaggggggaagccctctcacaccgccggcaaaagtcacaggcggcggagaggcggcgacggctcagatctaagttttttctcagaaaaaagctttcgtaggatatccaactttagtattgtattttctagagtctagacacaacatttaatttttcacaagcttgtatattgatcatcttttattttttcctttgctatttttattatgtggcttgactttgagtttggtgggaagttgcattccagtcttgcgagtaaaacattaagttctctactatcgcaagaacaaaaaaaatccccacgtttctttcactattaacaacatgggttttgtgtatatacacgtaaggttagtgaactctttttttttttttttgattgggtaaagttttaaattttactacaaagacatcaattaatagatttgttaatctgttagctagtaaagtttattatatattataaccatcgtgaagtttccttaaaaaaatctttgtaattaaaacactcgaaaaattttggttagaaaaaaagaataaagatgttccgccaaatgtttgaaagatcatgcgaatgcaccaaaactggaaaatcatgcaaatgcatcaaaactaaaagaatcctcgcaaatccatattttgttacactaccatttggaagataacatttatttttgcatacatcccgttccaccaaatgttttatttcatttcgttcactaaaagtctaacatccattggctaataatacgttacattatattttgaaaatatttatatatttcaatcacgaatatcaagcataacactactaatatatttaagataaaatccaagagacacgaaaagcaatcgttctaccattacctctacatttgaactttagagttccattggcgcagctttggttattcaacgacacgttctctcgactctctttgtgtacaattaatagtctttttttttttttttaacaattaatagtcttatctcaacaaagaagttgattacataattcaaaaacaacaacttgtttctattcgttttactctatttcatactattaacattttttatacaacatattgtatatattgcccagataaaatattcattttcagaagctttattcatttttcctcttctattatatgactaagttggtggaagttgcaccgcagtttcagagtgcaatattaacttctctagaatctctactgctggctgctccaaaaccaaaatattcccacgttcatttcatcactatggttttgtgtatatataaagtaacatgtaaggttgatagagagattaatgagagtttacaaaaatagcaagatttattgggtagttagtagttatcattaatctcgtcaaattattgattaagaaacacctcgtggagtcatacaagtctcatgacccaaaaaataccgttctattatgaatgtatgattaaccaaaattgagtgattcattttacgttatgttgcatttaatggacattaaatttgacattatgtcaaacacaaatcaactaatacttcaccgtgacatgatgaagaataggcatacaaagcggataaggttgggttggttagaagaatttcggactaaacttgaattcaaatgtctccccgttcgtttgagtccaaccaaattgtatcggagacttttgacaaatgcaaaaaaattcatagattaatcttgtttcggataataacattattcagcaaaattattttattatttttcatattacatacgctcatgcatggagctttgtaggtatagagctagccatcaatatttaatactaccgcagccaacttttgcagactctgaaggcctaaccttttcttatataaaacagtgtggatctatataaacatgactctacaattcgttattggtcatttccaaagtaatttaattttaaaagttctgagtgaaactaagagtggttctgtgccattctcaatgaaggactctatttgtgacaaacccctaatataaacctttccttcgttaactttcatatatcttttcttcccacacgcatctcttcttcaatgttctcttcttagaaaatcattattattcgtctttagttcttcacaaaagagtcccgtttttctagttgatattttgtccgggaaaatcagtttaaaactgaaaacatcagta

SEQ ID NO: 6576 - DNA, 3000 bp, Unknown; identical to SEQ ID NO: 6559
  misc_feature (1)..( 3000): cDNA_ID_1814798_gDNA_ID_1621097_Annot_ID_55739 3000 nt of promoter + ATG

SEQ ID NO: 6577 - DNA, 3000 bp, Unknown
  misc_feature (1)..( 3000): cDNA_ID_3090457_gDNA_ID_1621097_Annot_ID_55740 3000 nt of promoter + ATG
atctgacagaagttagtagtatataatgtgcttaatttctttcatatttttaatagaacagaacttatataatgaatatcgaataattttcacaatgatataaaggtgcatggggatatgcatgtggttgttaatgtaagaaaaagtacactagtcttcaatgaagaaagggtcaaatttatttcgtattgtcctcttcgtatttctttatttgtatttttttctaccccacaagttaaattctgatatgggccggcccatgggctttacgcatttattgtctaaatgcccgagaaagttcatgaaattacatccgattgccactacgcagtctttagtctttactagagcttgacctcttctctctcatgtccgagtgaacaaatcccgccaaagatacgaagagactgattgtgaaatcaaagaagcattcaaaagctcgttatctaaagattctgcgaagatgagtactatgaaattttgtcgcgaatggtaaatacgaatctcttcgttttttttattttgggggtcaaaacgaatctgttctctgctcttttatactagtcttctgaaattgaaatttgggttttcatttcttagctcatattgaattatatattgtacccagttctcttaagtctctaattgtcggaattttagttttggatggtttgcttatgttttctattggattaaagctccaacttttctccacttttgcagcttatgaacctttgattttgtttttttttgaaatgttcagtaataacattctatatcccaaggaagacaaggagcaatcaatcctcctctatgcgtgccgtaattgtgatcaccaggtaaactttgtttactatgctttcttttataaaattaggtttccttagtgttaatggaacaatgtggtgttgaaacaaagctagggctgaaaccaatagactttagttgttcacttgtatatgatttgtgttgatatttatttaagctctgatgttttactctttgtaatcgcttatacggttaaaggtcgaatgtctgaacttgaagtaaaccaaggaatgataatttaatgagtttagatcattttccttgtctctcatatcatgaatctgattggttaagatagtagtgcttatcagtataaagagttctttgagaacttctgaacaaacgcaagaccttttaaaaaccgtttagagggtttctgcaacttaacttctaaaaccatttgagtttcaacaatatccattggtgttaccgaatctgagtttttttttgtttctactgtttgtgttatgttttgttattacaaagcattatgcctttgttagctactgaaaaccattctagatgaatctctgtatgggatctttagcttaatgcccggacttgctaaccgaattagttataaacttactgagttactgttagctatttatcgtcctgttgatagaaggtcttgaaatttatattcttttatttggctttgcaggaagcagcagataacaattgtgtttacagaaacgaggttcatcactctgtaagtgaacaaactcagatcctatctgacgttgcttccgacccaactcttccacgtaccaaggctgtgcgatgcgccaagtgtcaacacggtgaagctgtcttcttccaggtgaatcattatcttatatcttaatctttaattcgtcatcaatcaaggagtaaagaaacattctttcgtttttctctgatctaacttaaagatcaaaagagatttctttctcttgctttttaatgtgcttatggctatttcggtttgatatagctcgtgtgtgtcatcgaattttcaggccacggctagaggcgaagaaggaatgactctgtttttcgtttgctgcaacccgaactgtagtcaccgttggagagaatagattgatagaagactacatttttcaaatgtaacgtgtatttgtgttccgctttatgagttttatacaattcaatttggagttttctgtgtaaaaatatgaatactatgagactgttctcgggtttcttgaattgtttcagggtcttttatgatcattttggtttttatgtgggtctaattataaatttgtcgttttatgcggggccgatctgaaaattcgtccataaaccatgatagtgttgaaaatttgtatacgtggagtctagccgccggctgctataactttgctataacgtgtgatattataaaaagttgataaatctaatcttctaaaccaaattgttttaataatgctgtgtttacttcgtcatcgtatcgaattatacggctgctcttgttaagtgatgacaatatcttcaaataaagttttttcttttgtaagcaaatatgataaaactacgttagctaatagccaacttggtccatcatagttcataaagtcaaaaaatcagtaaccaattcatgagtggaattatacttgattcaatgacactgtttaggagcttatctaaattgcacaagttttgttacacgtaaaacacaaatatgccaaattagacatgtttctcgtcattctaaaacattaacaaatatttacatagacgcagtcaaataaatcaaatttcgtatgataaaaaaaaaacaaaaaaaatagcaaggttgatttgtcaatgctggcaaaaataagcaatgtcctaatttctcaagttggaaagtgacatttctctacccattttttgaaaagatattctcttttgcatataagatttgataaattgaacgcatatttgcactcaagctaacgttatgtacttgattacttgacccgactaatgacttattgactttgattaataaacaaagatattagccactccattctacattatatacaatctatacgcatctatatatatctactaaaaaaattgtaagtacatacatatcaatgttaatttgtatataaggagctaagaacaaacccaattaggcaactagcaattgctaaaacacgtaagatctcaaatatg

SEQ ID NO: 6578 - DNA, 3000 bp, Unknown
  misc_feature (1)..( 3000): cDNA_ID_1814790_gDNA_ID_1621097_Annot_ID_55742 3000 nt of promoter + ATG
aggtaatttaattttgccattcatggagtcaagagagcaatgaaacacaagaatgcaaagaaaaagcatttgcttaatgaagtcattttgagaaacttcctcctttctaacgatctcagttccaaaccaaccgtcaattaatctctagatctattgaaagagattgttcgaaattcttcgaacaacaccaaactccgaggaaactccaccactatatacacctaacttgatgtagtatgaacttagcaaaaggaagtgacaaagatgttactcctcgaaaaaattggagagatcgtataagatttagaagaaaaacggagacatcaacggacacagatggaagagagatcaatttcgctagagcgtatatacacaaaagtatataaaattttgataaatcgaacaaagctaataacggaaatccgataaaaggtcggcagttattttgtttgtatatacacggaaatatataaaattccagacaaaaccgaaatcaaactccatcgacaagaaacctctcctctcagaaggatttgagagagagaagaaactatttttagtcgtcggattttaatttcggtgtactgaaaattgctttctctatctgaaaaatatgagtgagaaaatagaaaaaaaaacatatttttctggtcgagtactcttttgtttaaaaatttctttaatttcgtaactttttgtttctatgaatcaaagatcaaaattacaatttgttattggatttcaacgaatccaatatatttttattaatcccaataaagtaacgtaaaaggcagaatactttactagtgttataatttatatagttaactaaaattaggtttatgaaatactattttactagaaataaatacccgatcgaccatgttgaattattatttttatacattaaatttttcgattatatacttcgaattcttgggtcataatctaaatctaaaaactaataacttttaaaattgattcacataataaattcaaaactaatagcttacaccacaatataaattagtattttttaatcttaatatattatgccacaatcatctacgtacttggattattatatgtactaacctttcagcttcatttctaattaacatgcaatcacttaaatgatttgcagcatgactcttcattaatgcaatgtaataacatcaaaatttaattaaacgtcaattaccgtttcactcttccattataaaaagaagtaacaaaaaagttctccctaaagattttgcttgcctgaaaaaagtatgaattgcatcaaacaatttctcttggcaatttgcttttctctggccctaacatgtcaagaccatgtcttagtcggcggcaccaccacgagagacattatagtcccgaagatttctgagtggcaagtcacggttgttaacggtttgacaactggtgaaactcttttcatccattgtaaatctaaagaagatgatctaggtgaaattaatctgaagtttagaaatagattttcttggaacttcggagaaaatatgcttcactcaacttttttttggtgctatatgaacaaagataatggtcatatgaatgtaaacgtgttttgggatgatgttatcttgttccatagatgcggttggaagaattgcatttggactgcaaaaactgatggcctttatctttggaattcagcgagcggtgaagatgtattgtcaagaaaatgggaagttggatggtgaagccatatttttgcttttgggtaattttttagtacatgtatcttgttgtttttggcaaaaaaaaaattgaaataataaaaaacatttgttttaactttctctcttattttgtgtatttttcatcaatgatagattttttgttttagttctttatttataggtcatttaattattagattaatttcctgagataataagatcatagattaaataacaatattgtgtttgtgatatatagagattacattttacacttatatatagtggtaagatttctttttgctttcaaaccattaaaaacctgttaaacgattaacttgactcaagacaaagccattgattattgactcatgaatctagtgactcatgatgaaggagacgaacagtaaatattcatttgattattttaggtaaaaggtagttcagacctagtcatatatcctctaaattcatatagtgatgcaagtattttgcattacttagaactttatattattgatcacccaacacatgatttaataaacgccatgaaatgcatgtactatatcaaaatgtttctgaagcatatagttgacatgagaattttggattggacttaagaatgtgagagttacctgaaatgtcaatttttttccctttgttaacgaaaactcattggaacaattgtatcccccttttggcagtatataaatatattgatggcccaagtagctgtattttccgttatcagccaagactcaataaagtctaccggtccaaatttcaactgaatcaccggtccaaccactattaccgtaactagaccgctttttcttttttacattcggacaaaaaaatcaaaatttcgagcaactaaattgatctcatcttcaatcaaattcatcatcttcgatactcgtttcttctctctttggtttcatacagatcccaaatttctagggctcctagtcctttgatttcttcgactggaatcgcaattccccactacgtcaagctggacagacaccgaagggatcgccatgagagtggcggctacgaggattcctaccataaccaccgagcccatcccagaggtccatctcgtccctcagattcacgcttcgaagaggatgatgatgattttcgccgccaccgtcgtcgtcgtggaagcagccctagcaattatcgaattggaattgggggcggaggaggaggtaatggtggtcgacgctgggaagatgacactcctaaggattttgatggtcccggagatggaggtttccggcagatg

SEQ ID NO: 6579 - DNA, 3000 bp, Unknown; identical to SEQ ID NO: 6541
  misc_feature (1)..( 3000): cDNA_ID_1814786_gDNA_ID_1621097_Annot_ID_55745 3000 nt of promoter + ATG

SEQ ID NO: 6580 - DNA, 3000 bp, Unknown
  misc_feature (1)..( 3000): cDNA_ID_1814783_gDNA_ID_1621097_Annot_ID_55746 3000 nt of promoter + ATG
gtcaggtcaaagccgttgaatcaactagtgagggtaagaaatgtgctctccaaaacgatgaaagggacttggtaggatgtgcgacctcggaaatgttggaatctatcagcaaaaaatgcgaagcaagcattattgatgataacaaacgttctgtgagcatgaatgctttacaggatagtactgcatctaatgttgaaaagcatcctgaaacattttcagtagcgaagcctgctttgtctagcacactctcctctgcacatagtaatcaaatgagaggaagggactgtgttccatgtgaggttatagatgagaagaaagttatagtaattggagctggtcctgctggattaacagcagcacgtcatttacagcgccagggtttttctgtaaccgttcttgaggcaaggagtagagtaggtggtcgtgtatttacagaccggtcgtctctttcagttcctgtggatcttggggctagcataattacaggcattgaggctgatgtgccatctgaaagaatgccagatccatcggtattggtctgtaaccaattaggtctggagttgagcgtgttacatggattctgtcctctttatgatactgtaacagggaaaaaggttcctgcagaattagatgatgctctacaagcagagttcaacagtctaattgacgatgtagatttgcttgttgaggaaataggcaaggaaagagcaaataaaatgtctcttgaggatggtctagaatatggccttcaacggctgagaatgccacatgacaaggtgaacattgacaaatttgggcttctcaattcaagctcaaaaacgggcatcagaggtccctttatgcaggatgaaagctggaaagatgattttttgaatcctttggagcgaagagttatgaattggcattttgctcacacagaatatggttgtgctgctgtcctcaaggaagtttcgcttcctcactggaatcaagatgagttttatggcgggtttggagggcctcatgctatgattaagggtggttatagccgagttgttgagtcgcttgcagaaggactggacattcacttaaacaaaatagtttcagatgtatcttatgtctctgatgtatctgccatggataacagcaagcataaagtcagagttagtacatcaaatggctgtgagtatcttggagatgctgttctggtaactgttccacttggatgcttgaaagcagaaactattaagttttcaccacccttgccggactggaaatatgcgtcaatcaaacaacttggttttggagttctaaataaagttgttttggagttcccaacggtattttgggatgatagtgttgattactttggggcaactgctgaggaaacagatctaagaggtgagtgctttatgttttggaatgtcaaaaaaactgttggtgctcctgtcctgatagctttggtggttgggaaggctgcttttgaatatacaaacaagagtaagtctgagcacgtgaaccatgcaatgatggttcttcggaagctttttggtggggatctggttcctgatcctgtcgcctcggtagttactgactggggcactgaaccttacagttatggtgcctactcgtatgttgctattggtgcttctggtgaagattatgatgtattgggaaggcctgttcagaattgtttgttttttgctggtgaggcaacatgcaaagagcatcctgacactgttggtggtgcaatgatgactggagtccgggaagctgtgcgtataattgatatacttagaagtggaaatgattacacagccgaaatagaaacactagaaaaagcgcagaggaaatctgtacctgtaagggatgaagtcagagacctaataaagaggctggaagttgttgagctgtctaatgtgctagccaggcaatcattgctacgaaacatgttcttctctgccaaaacaactgtcgggcgtttgcatttagccaaggagttgcttaacctacctggtgaaaccttgaaatcctttgcaggtacaaaagaagggcttgcagtgctgaactcttggatcctggtaagctcagtgagatagttttttttaccaaagcactaaattcaacttactttcgcttatatgttttgttccacgaatttctattggctattttacatattcttgcttatataaaattttctgttaggattcgatgggtaagaatggaacccagcttttacgtcactgtgtacatattcttgttcgagttacgagtgacctctttgccttgaggctatcaggtattggtttttcttccaagtacactttttgtcccaacctaatatatcacatgcaatcagttctgtcttaagactcgacatcatgtgctatctgttttgggatttcagccctgtttgattttctctaagttggttactttccacttgctgatgcaggtattgggaagactgtgaaagaaaaggtttgtgcacacacgagccgtgatattcgtgccattgcaagtcagcttgttaatgtgtggctggatctataccggaaagaaaaagctaatagtggaaagaaatcgttgagacaagcgaatactacaaacaccccctagaataagaagaaaactgaatagtccggacacagacagtaagggaaagctgagcaatggcaacgatgtgaaaacagatgaagagtttgaggacaaccagctacctatgtcagaggaagagaaggctgtgtttgctgaagctgaggcggctcgtgcagcagcagaagcagctgcaaaggcaagttttttttaatctctaaattagtgaaaggcatttatggatgcttactgaatgtttttgttttctctgaggccgttaactctttatttatctgtttgttaacgaataaattatatgtttctgtcttgcaggcattttctgaggcctatcataatacttcattgcagcttcctaagatcccctcatttcataagtttgccaggcgagagcagtatgcaaag

SEQ ID NO: 6581 - DNA, 3000 bp, Unknown
  misc_feature (1)..( 3000): cDNA_ID_1815008_gDNA_ID_1621098_Annot_ID_55751 3000 nt of promoter + ATG
atgtttgactgtttgtaacatgatttcttgtggaaatttatgtaagaaatcttaatctttgaataattgaccgtttgtaacatgctttattcagtttctcttcatacattatcatcagtttctatttatcataagtaagttaattaataagtgggtacatatcatccatataagtaacattggcaataatgggatgatatcattgtttagtttagacttagaagatgagaagtacatcttgtgtgaggtcatgctaataatctactatacaataccccatcacttgctctcttatgtaaacttccaagttccacttaaatctgctatctaatgctatttttagctgcttaacatgtacatttaaaaaaatgtttagttatatgttttcgaccgtaatgttttctttgtataaatcaattatttgcaatgtagtagatctagtgggaagtatacgatttaggcgaaacagattgacaagaatatataatactgaaagagacacacagaaatatacaaaataaggagtcgtctctgctgaaaattcaaagagaattaataatgagatcggaaatctattgggtcccaatcgcaactcaaaagttaggaagacttttgataagattctgtccttttgatgtgattgccaagatatagcattctactttgtgtggctccgagacatgtactacttcgatactttctaccctatctatatccattcacacattacaaatttgattggtaactataattattcttttttgtatgtaacaaagttgtggtaaacagagatagtacggagttgttgatatctcactaaacaaaattttgtacctctagttttgtaccgccactattttgtgacggcaagaatacgacaattgtattttaattttagttttaattttcaaaagtgtataaaactggaagtgaatatattgtatcataactattaaactatacttttttaatacattaaaaaaaaagtttattttatcggaccacaatttttattcatactccatatatctcttaccctatcgtttagtgcctctaattgcaccatcatcgcttatccccaaaagaagattaacgtttcatgtcaccaatttgatccgacaaggtttaatcttaaagtagcatctttcacctcaagagcatgtttgatggaactatatacatatatatattgaaaatgtaaagttggtccgagaacgacaagcacttcagacaatgaaaatgtttaatggaatggaagaaattcgttttggtcgatgcagaaccaagcccggcccgcatggtaatgtctcgttcactatttgctttgacgaaaaaagttatgaatggtccaaacgaaatgattgctgtaacctgtaaatttggtaatgcgtaatcattcaatttatggtttgtgaacaaacaatgtatacatatagtattggttttaaatttcatgtactaataaggaaaagaaggagagaaacgatggaaatataaaaagaggctttttagggtttaagcctttaagagaataaagggacaaataacaataaggaagtgtcgttttctgtgtggaaggagaataatgaatagagtgtgggcattgtgtattgtgtcattctcctaattccaaattcattgcttcaaaactactcaagaatcatatttgcaagtagtggtgtttggctctacaacgttctctctttaccatgccatggaattattccttgaaacagaaaaaaagagaacaatcatcaatattccttttgttaaagatcttgatcattgggtctccgttagactctcactcaagtctcaccaatcagctaaaggtggaattttgataatcgtttttttaacgcttattaaaacccaagagagattcatgcatgttataatccttattcatataagttttcaatgtaatatgttttacacgtcactgaatttggtagaagtttgtttatgaactttgttgctcagctaacatagactgtgtttttccccccttacaatatctacccaatcaatgttttcttatactagtcaggacgttttttaaccaaaacgattgaactttcagacatatcactctcttttgtttttgtgcagatagatatatcactctctaatccatattagttctcttttactttattttattttatttaagaacaatttagttttttattcatctttattccatgtcctaagaatcgaagtgaatagttaacagtttgttttaatacaataatattagttgccgtcgtttcttctttaaatcactgttttctttggactttttacggacaaccaatagaaagtgcaaagaagcatattcaaaagttcaaaatccattcggacatgtccacgtgtgatctgccactctgtaaaaattccacgttagcatgacggacacgtggatatagttatgttctgcgcacaccacgagctaaccacacctaggcagcacgacctccgtcagaatactaacggccgttctcttccactcgcgtagttctcaagcaaaacactcacggcgttggaaacgtggaacgttgcgtcctagtccagtgtcaaaaaaacgggaccacatgagacaagctttgatctggacagagttctgagtgtgtcagaccttcaacggcacgtgcgtctcacacgcgtggaaaatataggaaagcaaatccatttggaacctcccaatgtgtcttgcagatttcatcttcctttttctttttcctttttaccatactcctcttaataacattggtcaaagatcagtatataattagttgtaattatatgaaaaagatattttaacatgggtttgcgtgatagagcgacacgtggataaactaacgaataggagaaaaggggtaataatgtaattttgtaacagcattcactttctgccagtagttccactgtcttgtcctttggttatataaacaagaacaacgcaactttgtctggtacttcagaagaagaaagaaaatg

SEQ ID NO: 6582 - DNA, 3000 bp, Unknown
  misc_feature (1)..( 3000): cDNA_ID_1815001_gDNA_ID_1621098_Annot_ID_55753 3000 nt of promoter + ATG
tttacataagagagcaagtgatggggtattgtatagtagattattagcatgacctcacacaagatgtacttctcatcttctaagtctaaactaaacaatgatatcatcccattattgccaatgttacttatatggatgatatgtacccacttattaattaacttacttatgataaatagaaactgatgataatgtatgaagagaaactgaataaagcatgttacaaacggtcaattattcaaagattaagatttcttacataaatttccacaagaaatcatgttacaaacagtcaaacatttgcatacctatgtaattataaaaatagtcaaatacatatgttctcctccgtaagtgccattgggcctcctcatgacttagaagacgcgagcgtttcagctgaaaaccaaaaaattctcatcagattcaatcagacaataatgtcaaaagttatatattaagtacataatcagttttatttcagaacgttcttagctgtaaaatgtaggatatgatcctcttttggtttaaacctcatgacgtggattcaatttttttgctaaaaatgtaaatatttcatagaaaatgaaaacagtttaggtttacaatcgatatttctatcatgatcgtggattccttttcgacatttctgtcaacaacaactgagtactgatacaaaggccaacgaccagcagtatcagcaacttgagggggatatcctttggctttcaagtgaacctttcctagttattaatctttttggcctcatatcgcttccaaagtgagttatattcattgtaaaatttgtaagggttagtacatccaccaccgagacttaattttctctattcaaaaagaatgtgaaatggcctactggacctggagagtaggattggagattctgatctaaagaatgaagtccattaagaattatgtttttgtacttcgaaatacccattaggtttcatgacccatctattaaaattcatataccaatattcatcaaaaaaaaaaaaagatttctattggcttttgtaaaactcccaaatataaagtgttttattctaccaactaaactgcatgtgacgaatcttccagctatatttcttgttgttttctctccttctatcttcttcttacgtatgaagaattaatgatgatgatgattgctcaatttgttcgttagtgaaaatattataagatacgcatacaaattaacctgtttcttctatatatagatgattacaaagcatgtgatgtgggagttggactattggagtagttgattaatcgagctggagagaaacaattacaaagattctttacaatttttaattaagcaaattagtacagacaaaaaaaaaaagtgtagaaggagacaaagagttgcgttgaaggaagaatgattgagaaattgaattatgccgactcacgccccactccttccataaatagtttagttttattttttgcatgttaatgtattaacctagtaaagaaacattgaatttaggataagcagtaaatttcatttggtgacaaataaagaaagaaagattgggttaagtcaaataatggcaactatgaaagttagagatgtgaaaagggttctggtgattccattattgtacctggctgctaacatttttgtttttcttttaaaatcaagaaaaaagttttgattaatcaaaatcgacgccaactaaaaacacgtgtcaaaacgtggttggtgacagtgggatatgagactgtattataaaaagctacatttctcaccaccacccaatctctctctcccttgaagtagactctaagctaaagccaccgtcagattttcagatctcagatctcagctcttcattcgacgccatggccgagaagggcaaaggaaaggttttcttcttctcttctcttcttattcagttaatggtattctcttattattgttttttttttaatttgtgggtcttgaggatatattcaatctttatttattattaacctgaggaggtttttgtatatgtgggtttatgtttgtttgtttttgtgtggattaaaaaaaagagttggctactttgtagaaactatgagaagaaatcagattctctttaaaccccaaaaaaagtaagaaaagaaaagaagagatcagattcttcttctctttttctattttgtgtcagaggtcgaatctgttcttctgctcccttcccttttttgttgtttctttcagtaataagatcttataaacgtcaaatccattagtacatataattttttatcaaaaaagcaaactatggaagaagcagaggatttagtgatgttgatatctgaaaaacaggtaactatgatgaagttgaaggtggatcttgattgtcccaaatgttacaagaaagtgaagaaggttctttgcaagttcccctcgtgagttacttctctctttttcttaacttttttttggtgaatttgattttgattggttttgtttggaaatggactgagtggatttacttgtgtgattgggaacaagagaaataagagaccaattgttcgatgaaaagtccaacattgttatcatcaaggtggtttgctgtagtcctgagaggatcatggacaaactctgttccaaaggcggcggctcgataaagaccattgagatcgtcgagccacccaagcctcctcagccacaaccccaacaaccacctcagaaacctaaagatgctcagcctaaagctccttagaagcctaaggaacctgaaaagccaaaacagcttgaaaagcttaaagagccagagaagcccaaacagccagaaaagcccaaagaacccgaaaagacgaagcaacccgcacccgctccagctcccgcaccagcacccgcagccaaacccgcacccgctcccgctccagctcccgcacctgccccgaagcagccgggaccgccaccgcaagcgatcccgatgatgccgcaagggcagccagcaatgtgttgcgggccctactacg

SEQ ID NO: 6583 - DNA, 3000 bp, Unknown
  misc_feature (1)..( 3000): cDNA_ID_1814994_gDNA_ID_1621098_Annot_ID_55756 3000 nt of promoter + ATG
cttccacatggtttagagcctcttctcttccatttgctggttttctccctctcttcctcggcttttgctcgtcagttagatacaatgtctcatctttcccttgctcataaccatacacttgattagagcctccgatcgcttgcacctcatacgattccaatgagaaacccgtgtcatcctcggtcttcggggagaaattaatactcatagaccgaggttttgctccaccaagactcagctgtcgaccaaagattttaggagcttctttagcctgaacaaagtcagacccaccaaacactgatttcaccatctcaatcacactcttatcttctggaatatgtcttaaagaaccaagctccacaactccagaattcactggtacagacaacacagtctgaaaaccagctgacctagctaagaaagacctaaccctataataactcaagcagctaggcaaatctgcagcccaaagaggcttcccagacacataggttccagcaggaccgtacttattggtatcacacctaaaggaaaagtacaaagaagccagataaaacatgtcgagatcagtaagagctcctgatttcaccaaacgatgatcttcatctgaaccaacgaacgacaagtgaagcttgcgaagcacacgtcttttgatctcatcttgctgagagtaatcctcacctgaagcaccctttttgacacggcaatgaccatctccccagatcaagacacaaccatcagagctattaacgttggacgctagccagaaaagagcataatcccaatcagatccttcaacaacgtgacgtaacccttgttggagattggaatcacttggtggtgagacaagcttggacaaggcagtgttggaagctgaagctgttgagatgaaaaagtcgcaagcttcagagcctatggtggattcaaccatcgctcgatcttcttgattctcccaaaacttttgacccatttctcctgaaacgttcattgacatggaatatacaaaaattagggtatggaatcaaataaaattaaaggtatttggattgagatcgctgcttacaaatgagatagaagatgatgggtttcgtgaggaagaggaacgagaatcacgtgattcttgctgagacaccgaatttagggtttgttggtgaaaaagcaaaatcctttataaaggatataactctaatttatattgctgagaaaggaatgatcaaagagaagacaaaacctgagcttggttcacttcagatctgtagtgacttgttctgaaattgacgaagaaagaagaaaagaggaagagactatgcgagagagagaatatgggtttaatcgtaatttaataccaaggacatcatttccttcagttttttaactgcaaactatacttttgccttttcttacataccaaaccacaagtcattgtggtgtaatatctattcaactacaagtaaacccatatcactggatttttgtcgagattatgtgtacatgttgggaaattatttcgtagtacaacctattatgatgggagaatcgaaactcgtcttctgaattaacttatcgcaaatcaccgttaataagcggaaaaggaatttacacatcttacaattatgcgcaaatacaattgttaattggatgagtcatgccatattcttgagatggtatgataggtatcattacaccatgtagtcaatcacgatttttttggataatgtggtttagaagaactaatcgcgtctaatatagacaaacttattcgttcagcaaaacaacaattcgatatttttattcgattgacatgagtcttataaaatttatcactagatgtctaataaaaaaggttcaaacatttctaataattcgattttcgaccaaaataagaaactttaaattagcatcaaactatcttatatggttgtttccttgcttaaccttcttccaaatcaatttttcaaattagcatcaataagattttaaaatacatcataatgttgttccgatagtgtgtgacaacactaaccatttattcctatacaagtttatttacttgctaattcatttactgaaaatgtccatgaacaaaatacctaaaaacgaataaccataacccaaccaaatattaaagacatctccatcaagaagaaacccaaacagtttttcaaacaaaaagaatattagtattttattataattttatatatgattaaatttttattttagcgaaccaattgaaaagagaaaaatattatgatggtttgtataaagtatttcatagtttaacgagaaacattctacactctctttcttttccttttattatttttattattttaataataaaaaattaccaataaaaatggtctatcttagcttttttttcttcatttttttttccctcaaccaccattcaacaattaacataaaaaataatagttttttaagttgaagttataagagtcaatttagtttaagtcatatgctttagtaataagcatgaccgtctaatcccaaaaaatctaaaaagtacagtgccttagaaatttcctttacctcgacttccctaattttaatcttctcggtcggaacttctgaataatattagtagagatccaaaacctcacaaatttcgaccgagttttgttgaattccgattagatctttcttccacgaaacccccccaagtacccattccatcttctccggtgagtctcccatgttggcattacgctagggttcttcttctctgtggtttcgcataacccaataatccaattttctacttgggcatcaatgggtcgctctcgagggaacttccaaaatttcgaagaccctactcagaggtttgttcctaattcactactctaatttccgatttggggtttttgtggatttctcttttgtaattgccaatttgtgctgaaattgatttgaatttcaagtttctttgagtctgtgttgtgcaattgtcattgatctctagttgggacaatgagcatg

SEQ ID NO: 6584 - DNA, 3000 bp, Unknown
  misc_feature (1)..( 3000): cDNA_ID_1814986_gDNA_ID_1621098_Annot_ID_55758 3000 nt of promoter + ATG
cgaagatgtttgagagtttataggtagaaactgaaagaaaccgaaactagtgggttcgctgtaatattgcaagatgttgtcttggtggttaggtttagggtttaggagctctcgttcagctcttaactctcttgctctctgaagttgtctgaatctttcttgaagcaagacgattgaagaatggatcaccatttgttcctttcggtctcttgctattgaactcatgacgtaatgatatgagtcttagagagagtcttgctagggtttggggccatgttacgtgtgttgagcctatttatataaggaggaaaaaggtgtatattatttcttattatttaatctgcatgagaatactttaaaaacaataaaagtatatagggttgttgagtagttcgatgaaattccgaaaggaagagaatcaggagtaaagtggtaagagaacaagaggaagaaggcaaaagtgacaatctaaggattgtaaaaagagaatgtataatgtgtgagtggaaatttgcatatttttatttttatttttaagaagcaaaagaaaaaaagttggccaaagtagaaaatggttgggaggaaaatgacaagaagaatgtttgaagggaagcacatggattggtttgtttggatgattattgagatatataaacccttttttcatgccccccacttacctccctttaagggctctttttatttgaaatggaaactttattacatcccgagaatatagggtgtatataaatatatataagggatggtcttcttaaacgtttgatttgattgtatgcataacagagttgtaattcaatgataaattttcaatatgttaaatacaaaaatcttgcaaggacatgcctaaccataatatataaaagagtaatctaatcaaagatcatattcgtatgttgttatattcaagaaaacttgcatgaggttttaaatattccttggaaaaaaagtgaatatgagaaaagggagtgacaaaagggtttaggagagattttggtggcttgggagatggtgaattggagccacttctttgtctctacgtcaaatcttctcagtggaatttaaagttatattattggcattcaattaaaaatgaaacacacattaaagaagagtgtcaaaagttgttaatggtttctataaattagttgatccacttttaagttttaacttcttatgatttggcaaggaggaaaaagtatataaaaagtgggcctatctattgataaaaagacaaatggagttcaatagactagggaataatgatatcaacatatatgtatgagatgtgttttgattgataaataattgtgaaaaagaccactcatttttacacaagacattctctctcgatctcctcgttttctctcgatcaaaatgctactctacgctcccttcccataatgaaaacatccatgcatgtacattatcatatttttactaatttagggatcgaaaagattaatttataaaaaagtagaatactatatacgtatcaattaatatatgtgttcaatgcaaagccgatgcaaacttatatatttcctatcgtgataatcttatataatagatattagttgtgtttgatatatataataattgcagtacatataattcttaacacccatataatgtaaaattttctgatacaattctaaaccacatgtgtgcattttgagtttcacttcatagtcggattctgcaaactccccacattaattggtccacaaggtacaaaacttatctcacatatattcaccaatatatacaaatgtcaaatgcctttataatgtatcactcttgattgttgatattagataagaatgttgatatcattacaaatgaaatgatatattagattaaattggtaaatttattgttacacctctaacaacgaaaaaaagtgagacagtatagctacaaaacggagcgggttgaaagaaagaggaagtggacaatggggatacaaagtttgaaaggcacatcaaaagtggtgggagcaaaagtttgtcgtcaagtaattggaatataatggcatgcatacacgaaagctgaagatgctacgacgtttaggatttggacttacattgtttttcttccttttttcagcttcggtatctgcgatgttatcgataatgctctgatttggtgataaccccaattagatagatgattaacataattaagtgggatcggatgagacaaaacatatagtgtctttagattagttgagaaagattagagacaacgcgtgccatttctggtaaaaccattacaaccactccacgtaaaaagaatacattatgtttgttaaattttcacatttctaatttcttaccctccattttgtagttttactacatctctactatttatatctatttttatcctattcattctaaatttggatacttttactgttgactgaaacttgtagcctagttgttgtttcttttcacatgtactcatgtatacccaagcttaatgaaattttaaagaaaataaacaagcggtttagttttaatttaatgggccgtttctttatttcaacgaagcccaatagagcctgttgaaaaagggtttagttattgttgtttacacataagggcttgagttttatttatttcacgaaacgagtagaaacttttgttttatcaaaatcagaaccctcctcttttacagattcaggccaattctaaattcccatcgttcgttcaatttcagacgttaacctcggcttgaaggcttcaaatttctgtgaatccacgacggagattgtaagttccgatcatactcacgacgatctcattctatatgcactagaatcttttcctcctccattgattagatgatatgtttatccagaacatgatggattcaattaaggcttttattttgttgatctgaatggtactgagttatgaattgttcgagcagattggtgaattacgttagaatcagtaatcagcaaaagggttaatg

SEQ ID NO: 6585 - DNA, 3000 bp, Unknown
  misc_feature (1)..( 3000): cDNA_ID_1814975_gDNA_ID_1621098_Annot_ID_55763 3000 nt of promoter + ATG
ctgttgttattttaggaccattagctttatgatagctagataataaattaaactagattaattccaaaagtacacccaattttgtacaaatttttggaattagtataggcttcttcaacttatagttcaatcggtattagttattttttccttcctaaatgccatttaaacaaattttccaaaacttccacaaaaggttaatgaaagacacttgaaagcgtaacgcacaagagtgactcctcatttttgaaaaatgcattcccacctcagtactgctcagaggtcttccatgttcatatacaaaagcccttttgtaattccttaaattaggcattaacaatgtaaaagactcttcactctcaaatgaattttcaacctaaactatttgcagccttgatgccatttatagaccttttgtattaagatgccgaattcctttttttttaacacgagactaacaacatgttgaaacttctttccatataatgtttgtcatgacgaactctttgttacattaattaaacatctttatacataatgtcattatttgccatctgccgaacctagccaacatgtgtgtcatagggatcgtaaggggtgactagtcaacgaggtgagatatacattactgttaaatctcacctgcgagttcttcacaatgcatgatatatccatttagaattcgaataaattggtacacataataatagctagagttcgaaatatttaacaagcatcggttatcttgcacctttttgtcatcttctgagttttccggctagtcacatggttttgcttgtgttgattttttttcaaaagatgttcaatgctttgattcttgatctttcttaatacacacttgtttcgtttgctctccaaagtcgactcaaacacacgaacgcttgctcaatttttccgaattctagcaaccgaagattttttccaaaagttatccaaacgtacttataacctcttctcaaaaatgatttatattttaaaaaacagtcatcgccattcatgcatttagttttggaaaagtatctcaaatgtctaaagatatatctatatagccaaatatgtaagatattcaaattcatggtaatggcatacacaaatatatattaaaccagatatctcaatcaacaatttgttttttttttttttgcttgtcaacttcaacattttatttagatagcagtaatcatttattaatatatttaacatttcgtatggattattgttatataaaactagtgaacataacatgtacgcgtagacatacaattatttacagattaatgtacatacatacacccaactttgcagaaaatgacatttagtgatggaaacattcatcaaatttacaatcttaaaactgcaaaaaacgacaaaaatggtctacttatagtttaattaatagacacttgagaatattaattaattaaggattacataatcttttatacaatagtagtattttcctattttggtcgccgtaataaggatatacctactctatctctacggctgtctaaattaacgattgttagagtgaggacaaacacaatctttacaatctcatttatttaataggattattaatcattttagattctagttggggtgttgaacaactcaccatgctgtataattagacatcacattattttaaaattgataacactgagattgtttgccttcgaagcaatacagagtaatatgctaaatcattaaacttaggattatatataacctttgacagacaaaatttaacatgatttaattgttagtacgtcgctttggcggttgattattaatgtttaattaatcgttcgtacgtgcactagcttattcttgtttttgactacaagatcacgtattagttattgcaacaagttgatgtcttactcaattgatctaagaatagattaacggaacctattgaaatatgagagttttcataacaccgattcactggaaaaatcacgaagtagttatttcctgaacctattgttcactaaaagataaaacatgcagatttttttatagagaaaattgagtgatgattatgaaaaaatgttgtaaaagataagaatttagctcgaaaaatcagaatcatattattttgttaatgagaaaagggtctttataaagtattcttgtccaatactactatactagtccgcaagatattgcaatctctagaaattataacgagtgattatgtagcatcctagtgatcatgtaagaaaacatgttttttacatctttatgagtggaggatcgtgttgatcaaagtcatatccacagatgtcttgagccactaataacctcacatttcttcgttttgttggtacgctataaacccaaaccgacctaaatcaatcaaagatcacaatggtaaagacactgaagagtaaaacccaaggcattggcccatgaatgaatctatgtcgacaagctctgcacgtggcaccgaggtgtagaatttaaagctctaacaaccgttggatcatccaatctaacggtgtaaaacaactctttctcaaagccgttcataactctcaaagacctcatcggcacagccgtgtatcggaattaccaaaaaagccaactgtccccacgtgtcttgtgaacttcattcttctgtttgcaggggcttttttgtagtttaacctggaccccctcctgactacacctaaaagtcacggtccacatggctggtgacacagacatgcgaccaatacgcttctccttctaaaccgtcgatttaattacatccacctctagatctcgccacgtgtaacattgatttagaaaactcgtcacagtcccgtgactgaagaatcaccagataccaacagctacaagtttttaaaaaccttctctcatcctcttcctcaagcctccctcctcctctttaatctcaccagtcaccatgaaagtttagagattttttgaaagaacaaacagatatcgaattcgagttttgcaaaaatg

SEQ ID NO: 6586 - DNA, 3000 bp, Unknown
  misc_feature (1)..( 3000): cDNA_ID_1814966_gDNA_ID_1621098_Annot_ID_55767 3000 nt of promoter + ATG
acaaagaacgaagcttttctgcgatcaaacacttctccagagcacaacgctatcgttgaagataacaacaacaattaacgaaaaaatatgaaagaaaaagcaaataagcaacctacaaaaattctgcaaaacattaaaaaattatgcgataaggtcagagattctctacagatggtgtatggtaacatctaaacacttcagctgacgttgtatgcttaatctgttcagtgagaatctgacggtagatattagctatttactgaaataggaatctcaaccgtccattttactgaaggtgtacgaggtaactgtctacgtagatattgcctccaacaaaggataaagaagaaccggatatgctgggatcacgtttctgcatacgatatgacacgtttacccctagaaaatgtgtgttaggtgaagagttcggaagggtaatagttggaaattgagaatgtcgcttataagctttgcctcttctaacaaaatgtagggcctagtgcagtaatgggccttgcaaataaacggatggaaatatgaaaactaataaataaagtataggcagaagtttttttatgactgttatagagatctggagatgtaggtcttggtgtatggacagcttaggatttcaagcttaggcatttcgaaatcaagggttgaaagcaattactgtatttgagaatatatcttcaacactgcacaaaactcattttgtaatttattaaaataccggaattgagtgattaatgtcaaaaccgagaatttacaggataacaaagataattaatcaaaatgaatcttttatcaaagtaagataagttttctaacaagttttttacttatagatataaaatattatagttgtgaaaagacataaacatttttaaaagttaagattgagttttctgaagttgaaaaaaaaatcaaaattattttttaatcattatccaaaatcattacttaatccaaaccgatgcccaccctaattatttaactatattaataaggtttgtaagcaatagtatataaaaagctaaaaaaaatataagggtatctcactacgtatgacacttatcaagtttgttagagcatatggggcacatatgtgggagtatgcactttttcatgtttatttcactgcactttttcatgtttatttcactgtttcaaaacaatcaatacaattatatccttactctcgtaacctcaggtcaaatagcatggttaagaaatgcctttgacgaatgatttagctgtgcagcaatatatagtactttgaactgctctaatgggagtggattgtggattttcctttcttctgtttcttaatcttgacattagatttccactccaccccatcttcgtctagtaccttataagtcgttccagcaatgtagaaggtgactttcttctcttcaaggtacctcacaaaacgtttagcaaactcaatgggtgttgaatggcttttgtactttgataaaagactcacagcaatctcctagttaggcttgaaaatcaaagtcttgacaactcgttatgcctcatcaatcacttttcctctagccaagccgtctaaatatgtccccattatttcaatagttggttctatccatagagtcttgactatccttgcaagaagataatgcccatactcagtttgtcgagcatgtgtacaagttaccatcacgttccaaaatgttgagtgagttttgatcaaggtggaaggaatgttctcaaagacttggattgctttgaagcattcactatttgtgcctaaggttgatataaatgcattccacatacctatacatgtagctccagatttaccgcattcatgaaagagtttttctgttaagaagagtttcaaactccaactcttaagattggagagatatattagtcacatggtaactttgttaaggaaaacaaaaactcaaatatttttaaaatttgttaatcaaataattttaaaattgatttcttgtataaaagtattgtttttttgtgtattttaaattatatttttatttttattaagttattatgaatcaaatatttaagaattaaattgaattttgatttatacttatattccaatcttgtatataagttagtcagattgaaatatatggtcgaaaattggtaaaaaataatattcaccattattttggtcattaagttttgaccactttttggtaagatgttttcgaccactattctcggtcaaaaatgtcaaccgatcaaaatatttctaccatttttattggtctaaaatattcgaagcaaatgtttaattcagtataaacatgcaaccaacaatttacaaatggtcaaagaatttctaccaattttattggtcagaactcaacttgcaaccaacaatttacatcaacttcgttttggtaaaaaaaatatcgatcgaagataggtgtttttgaccaaactgatgaatgtatcaattctaatcgtaatacattttcgacatttaccacactgatgaatggtttttactgttagggtcgaacaaaaaaaaaatccaaattgatgttagctgttctgatgtctctaatttcgattaattctaccaaaacattaataacttggactacattttagttgaaatttaccccttaaaaacatccaaattgggtgatacattggtgagagagaaaccaaacctcatttaaagtcataagttataataatgcagatgaggacaaatatagattaggatatggtgttgctggtaaaggtgtgaagcgactttgcctccttggtaccttgagaaatgtaatgatgaagatgatagtgttcgtggtgaggatgatgatggtggatatagaggttatgaagctgagtgggaagaagagttattggcccataattctaaaaatatacgacagccattttgaatgatttcaactaaacatacggttagttccggtttatattcagtttcgtaaccaaagaaaaacgcaaatcccaaattttccggaa

SEQ ID NO: 6587 - DNA, 3000 bp, Unknown
  misc_feature (1)..( 3000): cDNA_ID_1814958_gDNA_ID_1621098_Annot_ID_55769 3000 nt of promoter + ATG
cgaccacacccgtcagtgttggagggatccacgagtgcttacgagacaaagcagctctcaaacggtggtctgtatctgcgaattgacatgcctggtgtccctagcgacggcttcattgtggcagtggacggcaatggtgtcgtcaccatcatgggacgagctcctgcgactatgcacgactcaagtgggcgtagttacgtatgcaaggtcgccattgtccctagaggctatgctggcgtcggatcaagataatcgccaaacatggtgtcatccgtctcactatccctccctactaattaatgaatcggctcttaattaagatcatgcttttggaattaatcatcatgtttaaaacaatattgggacatgcatatgtttgtctttttcttttggattcccgaatatttcaagaacactaattaaatggactttaatacatatgtacgtataagacgtgtatgaaaatattcactcgtatgttttttttttgtcgcactcgtatgtttttaatcttcgtctaatgcatggttaaaatgaaaataaaataaaaaatgatgcactagaaaatgtcagcaaatgaaaatagaacacgtgtcagtctagagactgtttgtcgtttctcacctgacaccgccatactctcaccttcatttactttatgaaagcttcgcttcattaaacatctaaaaaccctagaaccagagagagacagagagagattgagagatctcaaaaagcaaaagaaaaaaacccaaaccgaaatcttcggccgccgaatcatcatcatgcctatccgccgccgagtcagaatcaacatccctaccagcccccgaatgatcacgcctatcacgcccatagctccggcgcctcacgctcatagtaacgatctttaaacccaaagtttacaattacttcaccatttcttaaaaatcttagatttttctccactgatatgcatacatttctggttttttggtgtatatgtgtagatggtttttacgctatgaacaatccgtaccaagcgaacggaccaaaagggtttgctgagttcaagtatctggaagatacccatgatctattcgtgaggcttgatttgcctggagtcaagaaagagactgtggttacccacttacccttctcgaaccatccaaaaaagctgttactgtgaccggagacgcagctaagagcagcaaacacgatgcttctaaccgcaagtatggaacctccgtgggactactctgtgactgctgtgaaatcagtaacaacattcatacctttgttgaagatggtgttgttagactcatcctctccaagaagaagatctatcctcatgctcctaatttctgttcttgtaaattcatttttttttttgggtaaaattacttctgacattttgaaagataataatttattcaagacatttttgttgttgtattgttttcagttggaggtgcaacaatccctactggtgatgctcctggttaagtctctatccatttaatcttttgattatttgttcttaacttcttatacgtcattatctatggtttgtttatattaatgatgtgttttatatcttctattattttccggttaatagatcagagatatttgatatttcttatcatttgagattcttttagaaattagtcttggttgttttatttagtaacgtgtatatatatatctgacattttttcatgggtttattgtgtttgattccaattggtgcagttgcagatggcactccttatggtatgtaacatcaacttttgactaatcctttttagtttttaccatttttttttctttttcctttgacatgttttctaaaatcttcttctttttaattttgtagtgaatctcttagctcattttcgtggacttatcccaaaaggtatatatatatttgatttgatatttttaccactccataaaactttgtggttgattaattaactaatctacttcattatttgtttcatcataggtcgccgttgcactgaccctggtggtatgaacttaatctctccactgtaacataatttcccaatatattagtttcattatagtatgtttatatcacatgcatgatttctataaatagattcctctatactgaaacaaaagacttaattaagggaggcttaatggtatatgttttgttgcttcacgttggacagatccagcgttcactggtccggtcgtactaccacacccgtcagtgttggagggacccatgatgccttacgagacaaagcagctctcaaacggtggtctgtatatgcgtgttgacatgcctggtgtccctagcgagaagttcatggtggcagtggacggcgatggtgtcgtcaccatcatgggacgagctcctgtgaccatgcacgacacgagtgggcgtacttacgtagccaaggtcgccaatgtccctagaggctatgacgggggtcggatcaaattggtccccaagcatggtgtcatccgtctcactatcccttccaactaatttataaatcgcatcttaagatcatgcttatgcatggagcatatctatctgtttgtcttttcttttggatttccgaatgtttcaacaactttaatatgtacctaattaagacgtttcactcgtatgtttatgcatgttaattatgcttaattttgtcaccatctaatgcatatggttaatagtcctggtaaaacgaatttgctacttcactattagtactgtaattgatttcaagagagattgactcaaagtctagagtggcgcgatacagctcaactaatacgtgtgcttctagattgctccaaaaaatagaacacgtgtcagtatagagtttttgtcgtatttcaccataatactctcttcctcactctctcattcatttgctttacagctttcgcttcataaaacctccaagaaccctaaagacacagagagagagatctcaaaaagcattaaaaaaaaaccctaacgaaatcttcagccgcctaatcatg

SEQ ID NO: 6588 - DNA, 3000 bp, Unknown
  misc_feature (1)..( 3000): cDNA_ID_1814954_gDNA_ID_1621098_Annot_ID_55770 3000 nt of promoter + ATG
tgagaattgacataagtcacagtaaggtgtaactcacctatctcagaatttgaatctatccacctgggagcggtagaatagaagattgttccttcactatcaagctgcagcacccacctgaaccaaaaaaaaaacgattcttcatatcatactggtaaaacaggtcaagtcttgagccctctgccaaggccttttaggtggaatgcatgataatgcatcaccaaaaaagaaaagtgtactttttcgttgtagagtactaactactaatatgtgaagatatatgcagttcaaacacctaaaaacgaaaagaagaaagccagtaaaggatacagtaccatgatataatagcatgaacactacccgtggtttttgcttctatgtgcacatcaagctctccattactttctggccgtttccaaaagtcaaattcaaatattttgacgggctctgacaactggatgaatatatgaattgagtttataaactaaagctcattgcaaaactgtagggagaagttcaggatactagtaccagtttgatctctttctcaatagcatcaacatgcatgctatactgttgtgacttgataccaaatagactctctaatccaggaggaactagacgaacaccatcggatgttttagcctcgttatttcgtagatcttgcaagttacataagaatgtgctttcaacaagcttgaaaatattgtaaagacagagcaaagggaaacaatgtgagaatgaattcaatcaagctaaagaatgaccaaaattcgattagactaaataacgaacctggcaataagtagtagctcgatatggcactgttttgggattatcaaccagcaacatgtcatgagcgtgttgtaaacttgggattagaccttcaccaagtaactcagagtccaatatttcactaacctaatgaagaagagagacacacttatggttatttccttctgaaaaattaactacaaagtatagatctttgtatactcacaagaacgtcagctcgtgaagcaatgtcttctgatccaactttgagttcatcggatcgtttgttgataaggttaatgttcttagtcattccattcttatgcataaccttcctcataagcttaaccatcggtaagtaagactcacacgccgtcaccattccttttgaatcacctctcattgctctcacagccatcattgatagcaacccagttccagcactatacacacaaattccacattctcctttatcaaaatctgagtgtttaaaccaagaattgaatcaagtttatggaaatgactcaatgagaagacgaacccaatgtccaggacgtggcaaggttcagtgatggttttctcgatagcgagacgataagctatgttacggcgagaatcattgagcatgtcgagatacgacgtcgtcgcgagtaggccgtcagtggaagttccgggttggtcattgtcctcaatgacaatccattcggaatttccggtgagagggtcttgtctgagctggaagacgcgttgactagactgagagctcatggttcgagcagtgacggaccttcttaggcgagtcactgagtggcaatggaaggaggagataaatgttttgggaggaagagaagacagaggcgacattaacggaggagagcttttaaggtttttattagtcgtgagaagaaactttccggcgattgtttatgtttattgtttatttaggccctcatcattttctttttattgcaaatgaaccccagactttcgaaattttaaatacaagtaaaacaatcccaactgccaactcttttgtgatgccaaataggccaaacactattattactaaatcagagataatagaatttcaactttcccatatacctttgttggaacaatataccaaaaatatttaaactactctacaaatgtcatagaatcaccttatagcataattattgtgatctaatattaaaataaagaatgaaaactttaacgaaaataaactaaagctcttgatgtataatattcgttgaaaatatctacatatattacaattgaaaaacaaataaggacttatacacatattaaaaaatatttatataaaataaaatacaaaaaaaaaattgattatacggtacatttatatttaagagtaatcaaataataaaataaatattacaaaaatttgagaaatacaaaataccaaatcctggaagcccttctatcaattatacttatattaaaacaaaattaatctacaaaaaggacaaatcaaatatagatttttttcgtcagttagaatggttattcggtggtgtagcgcaaattttccatatttttgaaaattaatacaagtaaagactatactaaatcggaacgtatatgagttaagggtttaacttagcaataaaaatatttgtggggttaaaatgaaagatccaaatatttagtttcggagaaaaaaagaggcttttggccggagaagacaactttcccatttccacaacttggaaatcgaaatccatttcgaattttggttagcagcgatttcaaattccaaacgtaagaattatggcgggagtgaatcaggcgtgtatcttctgtgagatcgtgcgaaatccaaccactactcgtctccttcacaccgttatcttcttcttcccttctcttgtttgtttggttcatcatcagaggctaaattgaacaagttttcttacgtctgcgattatctttttttcaggatgagaaagtcatcgcctttcaagacatcaagcctgcagcccagaggtttgtgtctctgttcactcactttgctctatcgagttttgtgaattgagtttgattccgtttacttaagcttgtccattgtaatcaatttgcatctccttgcttacttagctatcatttactggtatttatgaacaaagcactgatgatgtaggcactatttggtgattccaaaagaacatattcctactgtgaatgaccttcagagaagagatg

SEQ ID NO: 6589 - DNA, 3000 bp, Unknown
  misc_feature (1)..( 3000): cDNA_ID_1814950_gDNA_ID_1621098_Annot_ID_55771 3000 nt of promoter + ATG
caagaatctcaattattgcaattccctactcatttagaacataacaccattaagaagttttgttgctttgttatctcatatacttgacttcttctagtggttcctatcaaacgtccccagaatgttataccataacaaatctcagaaaaaactatcttagaaactgtattcccgcatccaaatcatcactcaaagaagctaaaggcagtgcaactgcaagctgtacttctatctaactacacaagttgcatgtgaagtgtgaacagagaagatttggtctcaatggcatctagtacttagataagctcaggtttttagttatgatcacccaaaagtcttatccatgctattgatacctaaggatccccctacaagggaaaacgagtaatctgaaccgcctgagtataggcgatagtctgaaacttaatgctagattttcaatctcttttgttcccctaatcacagtgcttaatacctcctaaaatttgttagcatgacctatactgtttccacctcacacgatcacaacacagaaaggtcactactaacgtacaagttcattcaagacgtgtttacctgttatgtggataactatgatgtcgcaagaacacatctgcaccagttaagctggaataggatgatgatgatgatctcatgcactgcaaccagtacaaacccctacattttagagatgacatagcatcaaagcaacacaagaaggcccacatataccagagatcctttatggaagtaaggggtctaaatctctgattaagtctaaatttcatggcaattattccagagcttatatcagaatccttcatgtatacgtctcatacccataaagcatggaaacaatgagattggtgttaagtgttaactattggacaatggcagaaattacatataattacttgacacatccttctttcatatacaaaatctctaataatatttggcatttgttcacagatttgccagcaaaagaatagaaaagagatattgcacagttttagcaaagagaagcaacgcaatgcggttaaacaagttgggttcagttacacctttgaaagaagaggccttatcttctctagcagtgtctcggcttcaataaatccacccaaaggtcccaaagacttgtacttgatggctttccatctgttttgatgacaatattgataacaaagcttattatctcacagttttcaagccatgggaaagtaagagagagacgcaaagaatttcccaaaaaagatcaacgagtatgaagcatatatatacctgggcacataaggcaatgcaaaacagtggagatggagatgatcaacactgttaaatggtggctggtgaaaaccaaatctgtgagaagaaagtacaaatcaggttaatgctacagaagtcaccaaaaggagccttacttactccaaattcataattgatttcattgagtgtatgtaaccaagaaagctcacctatgaatgctttgaggagcatctttctgcaacagttgttgtcccacactaagcatgtgtcttactgctcaaatcataaaacaaacatcctcatcgaaactttacataggcacaacagaaaatgaagtataaaaatgtttagataaccaaccaagtgagtagtcttcatctcttctctgaaggtcattcacagtaggaatatgttcttttggaatcaccaaatagtgcctacatcatcagtgctttgttcataaataccagtaaatgatagctaagtaagcaaggagatgcaaattgattacaatggacaagcttaagtaaacggaatcaaactcaattcacaaaactcgatagagcaaagtgagtgaacagagacacaaacctctgggctgcaggcttgatgtcttgaaaggcgatgactttctcatcctgaaaaaaagataatcgcagacgtaagaaaacttgttcaatttagcctctgatgatgaaccaaacaaacaagagaagggaagaagaagataacggtgtgaaggagacgagtagtggttggatttcgcacgatctcacagaagatacacgcctgattcactcccgccataattcttacgtttggaatttgaaatcgctgctaaccaaaattcgaaatggatttcgatttccaagttgtggaaatgggaaagttgtcttctccggccaaaagcctctttttttctccgaaactaaatatttggatctttcattttaaccccacaaatatttttattgctaagttaaacccttaactcatatacgttccgatttagtatagtctttacttgtattaattttcaaaaatatggaaaatttgcgctacaccaccgaataaccattctaactgacgaaaaaaatctatatttgatttgtcctttttgtagattaattttgttttaatataagtataattgatagaagggcttccaggatttggtattttgtatttctcaaatttttgtaatatttattttattatttgattactcttaaatataaatgtaccgtataatcaattttttttttgtattttattttatataaatattttttaatatgtgtataagtccttatttgtttttcaattgtaatatatgtagatattttcaacgaatattatacatcaagagctttagtttattttcgttaaagttttcattctttattttaatattagatcacaataattatgctataaggtgattctatgacatttgtagagtagtttaaatatttttggtatattgttccaacaaaggtatatgggaaagttgaaattctattatctctgatttagtaataatagtgtttggcctatttggcatcacaaaagagttggcagttgggattgttttacttgtatttaaaatttcgaaagtctggggttcatttgcaataaaaagaaaatgatgagggcctaaataaacaataaacataaacaatcgccggaaagtttcttctcacgactaataaaaaccttaaaagctctcctccgtta

SEQ ID NO: 6590 - DNA, 3000 bp, Unknown
  misc_feature (1)..( 3000): cDNA_ID_1843013_gDNA_ID_1621098_Annot_ID_55773 3000 nt of promoter + ATG
ctgaataacgaactaaacatgttatggattaggccctaatagctagtccagttaggattttaagattttccgatgtatattaagtgtcaatgtgtcatacatgagcctctaataaacacacgcccaaaatcaatagaactaactaaccctatacaccgaagtaatatagaaccagcacgaactctagatctggaaaatataaatacaaaatatcttttaaaatgttttctaaatattattgtaattatcatatgaaaaaaaaactattcataaaaagtaattatcaacatatgtaatctttcaaagatgcacttgatgtgtgtatcttgttggttagaattttaatttattaatcgataacttggaaggcaaataacagtaaaaataataatctaactgtagtaaatatctccccacacgtcattttttttatttttttttattttttattttggcaactcacatggtttgattcattgataagtcagtttcaattttatttttctcaaatttaaataattctccatttctaaaaataaaggggcaaggtattggtacgcacatgagactaacattcatacctttttatgaaataaataaaacaaaaagggacacaagaaggaacgcaagaattttaaactgaaatgattgtatctctaaattgagaaaaatcccaaaaagaattagtaacaaattaaataactaagcggtgttgttttattcggaggtaaaatatatatatggagggtatagcgtcaactcgcttttttactacattttgatttctctcccaaagttctttaatttttgtttgggtatcacatttgtagtcagaaacaaaattgttgaatgaattatcgacgactattttcactcgttggaatagtcgggattcaatttattaaaccgtcgtaaggaagctaaagatgtaaaaatgatgatatacagacaatttggctagctcattcactttttaaatgggcaaaccaatcatgaatgctagtttaatttatcgtgtgattgattttttttttatataaaaaaatagaagtaaaattgtaactttttatgaaaaccgtcgtaatcgtacgtcactaagctacaaaaatacaacaaacagtgactaataagaaaatgtagagtgatattagatgaatttaacacgtggaaaaatcatgaggaggagatgattttttctgttgcattcccttctgtggttaccagctacgataacgttcacgccctcctccacttaaattagaatgtgagaaaataaaatagcaagaaattggagatcacaacagtattgagtgtaggacatattacaaaggagacaaaatcagtcaatagtaaaaaggtatcacaataaaaaaaaatgtcaataaaaaggggccattgtatgacatgaaagaacaaaattaagtgatcatcacttctcctcctttatcgagagcttcagttttagagcaacaatgtctctatttctgaagcccttcctcttcctatacgacaccactcttagtcttctcttacttctggtactttatagctcgatctctctatatataaatacttaaataattactgtgacattaagttaattgttatttctcatgcatgaattagttcaatggatggagtcttgaggatacagcagcagcccaaaagaggcgtgaagcagacaaaaatgctgcagaaactgaatggatccaactccaatacttgtggaccaaaacaaggagtgttgtactacttcccgttttcaagggtttggtggttatgtgtttggttctatccattatagtgttcttcgagagtttttacatgaactttgtgatactcttcgtcaagttatttaaacgtaaaccccataaagtgtacaaatgggaggccatgcaagaagatgttgaggttggacccgataactacccaatggttcttatccaaataccaatgtacaatgaaaaagaggtatacgcatatatatactacctttattaattacactcttttattatatggttgatttagtagttcaagttgtagatgattttacggatccggccgtaagggtaagtagcttgttcgaattccttttttttcttatttattaattagatattacaaaaaaaaaactaaacaattcatacaacatgttaaaaacaatggacaaaccaatctaaagttcaaaacgcattggttaaatatttattcaaccgattttttgacctagaccgctctaattacttggttaagaacatcagactaatatatttttaaaatttaaatttatttaataaataaccacaaaagtggaaaaatattttgaagatacgaatatataaaaataacatcatgttttattttaatttgaaaatagaaaatatattgaaacatacataatttctgtaactatcatatatattttattaattaaacaaaaataaaataatatgaaaatgtttccgaaattttttgtttaattagttaggtgttagacttagacccccttcaagcgcttgattagtgcctaatttttttgcacaaactttattttgtgtttcttatcttttattggagaaacaaacaatataattgtttgcttaattttttcttttataatacttttaactattaaatttaaaatttgtttgaggtttaaatagttctccttatatatagaatttccgataataaatagtatagtgtgtaacacttttctcacaattttttcacctaagatgtttatctttttcctataattgaatcttcttttgatttacaaatcaaagatatatcacaaaattttgatatagacgggacttctatatcgatccatcacatattagaatgcaaacattgtaatttgtatatatagtatgatgaatgtgaaagtgtaagcaggaaggtgtggacgtagagattgcaaaatggcaaagccaaggcataaacataaggtgtgaaaggagagataacaggaacggctacaaagccggagct

SEQ ID NO: 6591 - DNA, 3000 bp, Unknown
  misc_feature (1)..( 3000): cDNA_ID_1814935_gDNA_ID_1621098_Annot_ID_55776 3000 nt of promoter + ATG
ttcgagcttgtgaaactctcggatacaagaaacctactccgattcaggtccaattcatcccacaagagtgttctaattcagttactaattagagtttttatctgaatcgcttgtgttgcacaatgcaggcagcttgtatacctttagcacttacagggcgtgatctttgtgccagtgccatcactgggtcagggaaggtgagtactagattgatggttttgtgtaatactgagattttgtttaggtatttaactaatgtatagagtttttgattatgattatttcaatttaccttgttgtaatagactgctgcattcgctttacctactcttgagaggttgctgttccgtcccaagcgggtctttgctactagagttcttattctcactccgactagggagttggccgtccagtaagtagcattactttgcctcccataacaataataaactttcaagtccttttgattcttgttgctgaaaaagctgatttgtttctttggaatggttgcaggattcacagtatgattcagaatcttgcacagtttactgatatcaagtgtggattgattgtaggagggctttctgtaagggtatgtatttatctttctctaaggatgtatttgtctgtgtacactatttgatgtttgagaacaagcttattttctctctgagaatcgtttcttaaaatgggaatagcaagattgctaaaatctttaatgtttcttgtgtaaggagcaagaggtggttctgaggtctatgccagatattgttgtggcgactcctggacgtatgatagatcatttgcgtaattctatgtctgttgatttggatgatctagcggttttaatccttgatgaggcagaccgccttctacagactgggtttgccactgaaatcacagagctggtatctttctgatttctttgcgtttatctctttcgtacggtcggttcctgtgacacctagtattgaattgtagtcaataacttcttgtctttgttagtttctaatctgaagaagtggacactatataatttgacttaacaggagagattatgttatgctgttcgttatttgatttatatttgagtccacatctatatgcaggttcgcttatgtcccaagagaaggcaaacaatgctcttctcagccacaatgactgaagaagttaaagagctagtcaaactttccttgaacaaaccgttgcggctctcagctgatccatcagctagaaggccaccaggcttgactgaggagtatgtcagccactacttatcattttcaaccttttcaagagccaaaatatttatccacaaatagcttatgaatatacatcatgtatgccaattagctaactcgtgatctcctaactgtagggtggtaagaatacgcaggactcgtgaggcaaatcaggaagctgttcttctatcattgtgcacaaggacttttaaatcaaaagtcattatctttaggttagaagccactataaatatgatgcctttcaaatccaagttccataaagtgcttgcatagtttggcattttgtatttcagctgagagaattttttgtcccttcttgcgccagtggaacaaaacaagctgcacatagactgaaaattttattcggattagctggcctcaaagcagctgagcttcatggaaacctaactcaagcacaacgtcttgatgtaagaaacttgggcacatcagctttatttgtacatgaatatttctgttctctgtttgcaagtacttaatggtatcattttgcagtctctggagcttttcagaaagcaggaggtcgattttctcattgctaccgatgtagccgctcgagtaagtataagaagcaaaaaacttattttcaagattctcttctcagtagctctgctatttaacctcttgaacactgtctgctttgatcattccagggacttgacatcattggtgttcaaacagttataaattatgcttgtcctcgggaaatagacaggtaaacaagatatatttcctgtattatgattaaattaaaaagctactagttttgttctctttaactgatgtgaggacaatatgttttcctttgattttgcagttatgttcacagagttggtagaacagctagggctggaagggaaggttatgctgtaacgtttgtgactgatagtgaccgatcccttttgaaagtcattgtaagtgaatcatcagacatacatggatcttgcttttacccaattcattatcgctttgtttagacatttgaatcgactttgtttctttgtttaaaggcaaagaaggtgggttcaaagttgaagagccgagtcatcccagagcagtcaatcgtcaagtggtctcagataatcgatgaaatggaagatcaatattccgctgttatttcagcagagaggtttcattcacactcatcaaagaattatggtatcccaggagaattggttgatctgtatacttaagctttgaggtgttttcatcaatttcagggatgagcgagctctaaggaaagctgaaatggaatttgcaaaggtaggcagctttggttcttgtctttgttcaattattgtgggaataatttcaaattcgtgattatgggcttgtttctgcaggcggagaacatgcttgagcacagagatgaaatatatgcacgcccaaaaaggacttggttcatgacagagaaggagaagaagctcgtggcacaggctgaaaaggtgttcttttaatttcctgaggttgttgttgtagagagagggatacacttgtctgaatcattctttatactttctctgaataggattctgcagggaaccctgctggaggcgaactagttagtgctgatagagcagaggacctcaagatgaaggagaagagaaaacgtgaacgcgaggtctgtttatcaagaagctcttcactattcagttgcattatcgttctagtttagtgttgattgcttcttcctagagaacttacaattctcttgaccatg

SEQ ID NO: 6592 - DNA, 3000 bp, Unknown
  misc_feature (1)..( 3000): cDNA_ID_1814931_gDNA_ID_1621098_Annot_ID_55777 3000 nt of promoter + ATG
aaatattcacgtagtcatatacatgatacggtgatcacaaatcgaattgaatcgtgtagttaattgtcgtattatataacaagtaaggaattattacaaatgtactaggtaatcacccgcgctacgttgcggtattttcaaatttttttatcgtttaatttaaatataatttttaattatctaatcatttacttatataataagtaattattcttagtattaaaatatattttttttaacaacattctcaacaatgcattatacacacaattcctaaacaatgttcgtcttaaactaattaaatagagggtaatattgggattctcgaaacctaagaatttgatgattaaacttcttacatactcttcaccctcgacgatttattatatatatatatatatatatatatatatatataataatatgcaaactattcaaactattaattaatccatgactactatacactcataatttgagttaagattacagaaaaaaatcttttgagtatgagaaaaccaatcaaattattttattgaaaaacatttaataacaaaataaatttagtattagtataattaaatatgtaaaattaaataataaatacatcattaatctataaattaaaagttgaagagcttacattaattattcagtggacacatggcaaatgttaaagtgatgatgtgtcaatcatatggagagagttggccaactttcatatatatgattcttaaacctgtaaaagttcagttcacccgacgaaccaacttccaagtagtagtccaaatcatagattcttttgaggttttaaatgtaccctcacgtcagaatctacttaagtctttcccctttttctgtctctctttcaccttttcttctccatcgatcttacctccacggaacttcttatttaaatcaaaaaaattcagaatcttttaatctcacgcaggcaaatgtctcgtaatttaatctatagaagaaacagagctctctgttttgttttaatcttgttctgcttcccttaccggtttggcgctagaaacacgccggaggcggaacaatccacagcaaaagcaactcaaataatacacgtcagcaattccacgtggcatgatttctctcgtcttgtagatgtccaaataggtagccacgtcagcggcgtatcagagctcaaaagatacctccaccgattcggttacgtcaatgatggctccgaaatattttccgacgtgttcgatggtcctctggaatcggcaatctctctgtatcaagaaaatctcggtttaccaataaccggaagactcgacacgagtacagttactctcatgtcgttaccgcgatgtggcgttagcgatacgcacatgaccatcaacaacgatttcctccacacaacggcgcattatacgtatttcaacggtaaaccgaaatggaaccgtgatacgctaacctacgctatctccaaaactcacaaactcgattacttgacgtcagaagacgtcaaaaccgttttccggcgagctttttcacagtggtcaagcgtgattccggtgagtttcgaggaagtcgacgatttcacgacggctgatttaaagatcggattctacgctggtgatcacggtgacgggcttccgtttgacggtgtacttggaactttagcacacgcttttgcgccggagaacgggaggcttcacctcgacgcggcggagacgtggatcgtcgacgatgacttgaaaggatcttcagaggtggccgttgacttggagtctgtggcgactcacgagatcggtcacttgttgggattaggacatagctcgcaggagtcggcggttatgtatccgagtctccgaccgaggaccaagaaagttgaccttacggttgatgacgtggcaggtgtacttaagctatatggtccgaatcctaaactacggttggattcactaacgcagtcggaagattctattaaaaacggcaccgtatcacatagattcttgtcggggaattttatcggttatgttctgttggttgttggtttgattcttttcctataggtttataggcataaaaaatactgtttttattcatttatttttaattaaatgtacatatatttttcaactatgtaaatgtaaatatatagttgaacaaaaaaagatgtacatatatagttaggcttataattaggtttatggtcttgatgatagcttcctctaagggattattattctttgattcattactttttgagtttgtgtatatcattatctcaaaaaattgaaagatattgatgtttatggaactatacatgattggtcccacccctaatggcactaatgactaattcataggtgatagattactttatatatgtgctccaagtaaatactgtttttttcccaatccaaactagattgaggaaaaaatgtagataaaatatctgatctactttcttaagatcctaccttcatttctttttcatagtaatcttttctccatatttacaagctatatacattagtttcttgttcagacaaaaaagaaagaatataattccattagaaaaaaaaattcattaaacagaatcttattttagttaagaaaacagaaaactgttttaagtttttttggctaaatatgtacacattatacaaaccttttttgaaagaaaataacatcttggtgttttgtatcatcattttttctttaacatcattatacaaagttacaacaacttgaaaaaattaattatataagcccattaaatcttgtatcataagcccagcccaaagttataaacttttcaaaatgcaaggagctaaaaaacaagttggttttgttggtttcaaatcaaaccaaaccgtttttttaagattacgaatcgaatggtttatttttgctaaatcggttcggttttttctccagacctattagtaaacctcttgcttcgattaggcggtcgtctctctgaaattttctgaaacctcttaaaccctagcaatg

SEQ ID NO: 6593 - DNA, 3000 bp, Unknown
  misc_feature (1)..( 3000): cDNA_ID_1814927_gDNA_ID_1621098_Annot_ID_55779 3000 nt of promoter + ATG
tactagttcagattcttcgttattgggaaagtttgtctgaagaagaaatccttagaatcatggagagggttacgtgtgagaggagacaactaacagaagagtctcctgttgaacaagatagggaggttgaaccaaaaggataaacaattctaccaattagcttcaattatttaattagttttgtagattagtcctatcgtattcaaactctcttaagcataccattgttttcttcgttggaggctgcctatgtttatctactattattaaaaactatagatacgtcacataagaaataaacagatgtaataagattaaccaactagatgaattacctttggttgttgaaagggagataaattataactgatggtgatgtaatgcattcggagaaattctgagagagacatggacaatggcactagaggtgtcccaacaaattatatttccacacattattattcgattagggttccaaattccaaccacttgttttttttatccatattgatttattcatataaaacatatcattatcgtattttatagcgataaaaacatgtggatacttttaaagaagataaaaagattaaaataaaacgttattcagtatatttcgtaattctttgtagtactagggacttacctggacgggatcaactcgtgatcaataagacaagtggcctaggctagtgatcgcattgcacatatcgtttgggtgctatgcttaaggttttcctttaaggaagagtatgtgtcattatttgtgacagaggagatttgcattcgcgcaatgctactgattttcaattttccactcttgtcacgagtactgttgagagttaaaaggttcattgtcaagaacataatcggcattttagtcttttggactcaacatttgcattaattgtattcaatatagatggaccatggaggcgtgaatattgttctaactgctaaggacatcatatctcgatatactagcttgaccaaatggttgagctctttacatactcttcctcaatcactcgtaaaattgaacaaaaaaatttcaaatcccccgtttcaaggaaattatttaatattctttcatccttatttcaaactcactatataaattaaaatattgcttatttataagctcattatacaaattccatatagattctcgtccctttgattaataaacgtcaactaattaacggtaataacttattatatagtaccttacaaatctctagattggtggtccaacggtatttggatcaacaccattgaaataatttagtttattgccgatttaaagtagattaattatcctaatgacaaatatgattttttttttcttctttttgtcatcacaaatatgaattggtatcctcattggcctgattaacatttctaattacggatcttacctcttcgtgccaaagaagacatttggaaatatatgacccccataaaccaaatatatgtttcttattaatgttgtggaatttgggacattttttaaaatggacaaaagaagacagaaacaattttcctacccaaaatggcgtccttaattttttcattaaattgtaaagcctgtttcaaaagaaaattgactttttgttgtgatagtataaaaaatgacatttgactttttaagtgacaccaagattctgacaataacgaattatatccatgctaattaattgatagcttaattaacaattgcgcaacataacgtgatcaaattaattaagctacatatcaggccttgatccgtggtccaaataatcatcctactaaagaaaaccagcttgttatagtaaaaagccgaattcgtgtaaaaatcggtttaaaatattcggtatagactctaatctcgatttactccggtttggttatcgtgtgtgtgatcgtaacttgccggtggatttgcgacggacacgtgggatgttgtaattgtctcacgtgactcatcgtaactacctttaaattcgctactgtgattttccagattcttatgtacatttgtgacttcttcggtctatttttgttatgtttccaaaaagacatgaatgaagaaacattattacagtttcttttcttcccttaagcctatttaaaattgatatttctaaattcgaactatttattcactagtcgaagccttttaacgcaaatctgagctcttaagtggcgcaaaaaccggtttaatatgtaaatagtaactcggtttagattaatttcgggttatttttgtgattagtgtagttaactaattaattcaggtgaataattatattagagagaaataaatttcaggacaaaaaggcaaagctttggtactgtctcttctcttctccgtcttcttcaccatttcgaaaaatctcaaaactttacagagagaaagagagatcctttacatatacttcactgtcttcttgaaaaccctaatcctccgatctgtttaacctccgatcaagagagatttcttcagcttgtgtgtatcagattcctttggattccccgattcttcgtcgtatcgaatcgggggatggcatttccgtgaaatcagtgatgaaattggaggtgagaagaagttatttctatctatgggcgtagtagctgaggtttggaggtcgagcgtgaggctattaacgaactcgcctcagcttaacggtggctctcacaagagtgcgttatggaagtggcgatttttctctgctcagcccaaaagaaccgtaatgtggacatgggtttgtggtttcatgcttttctctttaggagtcatctcacttttcactggtcacgttgtctcgcaccttgagtggtattctcagcaattaagcaaacggagcttactggtaccttttagcttacttagtgtttcgtttgttacttcttctgctcaattttgtaaccaagtagtgaaattggatgttattcttcaggatatgagccgtcgagaaccaattgatgtatggaagtcaaaatattcgaagtttttct

SEQ ID NO: 6594 - DNA, 3000 bp, Unknown
  misc_feature (1)..( 3000): cDNA_ID_1814923_gDNA_ID_1621098_Annot_ID_55781 3000 nt of promoter + ATG
tcgttgaagctgtgctaacacttgacacaacagctcacgtacacacccaattcaatccaaacaaataaaatacaattccgaaaacataagttttatttgtatatatcgtaagaaccaatattaaactgaaacataacttttcttgtaaatcattcaagttcaaaatatatcttacttaaaataagcagatatatatgttaaacttatgaaccaaacatatactgcctataaaaatttaaacaacccatcctattattgtgaattctatgaagtaaattcggattaaaacatcccatcgcaataaaccaaaaatgtaaacacaaaaagaaaagcatctctagtatatttagagacccacgtacagtacttgatctactggagcattcatcgtatgttataggtgactgctaaactaaagagaagaattatttttcttctagtcccaccacatattggatcaaagaagtagaaagttttctcctacatattatagtagaatgaaaaattactctgaattcttctcttctattcttataccagtcacacccatagattttatggtaaacgagatcactcctatatcagctcctagtaaataacaaagaagttttcagtactgaattatatcaatctttatcgtgaatgtttccgtacgtatggtatttgtccttttttcaaaataagaattatgagcttgttgattgattattcaaggatgaacttatgaaatatccttttgccagagcttggttaatcccaaaacatttcgtattgtagttctaaaaaggtaaaagaggaatgaaaattataattgggtagtaaagtttggtgggacttgcaagtttcattcaataaggtttcgtttattatgaatgcaccgccatattgtgaaagtgaaaatgacgttgcaccaaactaaacaattaattccccctcatgcaagatattgatcctcttcaagtttttcttctttggtacggtgaccttcctcaatgacaatgagtcaataacaaaaagaaaaactttgcgtttcatttactaatttattttccaattttagtttaatagatatatcatgccaaaacgttgggaatgtatatttttcatacgtgcgtaatttttattcttccggttaagtattcccaaactttaacaacaaattccgttttcatgttttacacaaaactattgtaaagttgattaaccacattagctatatgactaaattattatttttggttcagttgactaagaaaatagaaactgtctaacctatgatgggaccagacaacagtatctcatagcattattgaagtttggttagttttcattaaatgaaaagaatatatatgcaggttatcttctagtcccaaagtgacaatgacttgtcttgtttggaattggactgattaaagataaatacaaaaatatttactatatgaggatacataatgtgtaagtttataacaactgccaatataactatcaaaatatcatacaaaagcatgatcgcaaattaaaaatggtacgtaacatgtaagaaaacgaattagccaccagttgatagtagtctcatttgacatctattgttctattagaagttaaaaaaaaaaaaaaaaaactatatgaaaggtaaaccattcccaatataacgtaataaacataaccatcgagtatcaaccaaaatcatgaccacaatatgtcaagatgaaagtctattagttatttgtatgttagcttaagtgaaaaaagtggatgtgggtgagtgagcggttacaatcgatgatgaatgagtaaccgtacgaattgatattgtcaactatcaaacgttaaattttcaactcaataattaatcaacatttgatattcgtgaagtaacttttcacaaaaagtactctttgataagatgatttatgtccataaaactaattgcttcaactacattattgtcaatatttgatatcaatcaattctctatgcttccatgtgcaagtcttatcgatgtgattgaaatttaacttatggtgtaatctttttgtaacaatcgtttctatttcatattttaaatgtgaaatttatcaaataggaatcatactagaaggtctcatatatattgaaccgaataaataatatttaatcatttttatgatatatatcaatcgcttaaatccgcaactaacaactttatttacaggtagatgtctatcatttacacaaatttttgtcttgtttgcggttcgatctcctgcctagcaaggattccgatgagataagaaggcaatctttatcgcataacgtttatggtaatttaatatgtcatcacaacattatctacgatctgaaatcgacatagtatctctgaacctctgtaaataccacgtattaatttttttttaatattaaccttcgtagaaatcacgttgatcgtttatataaaaatataaatgaacaaaaatttcttgacaaagatataattttaataaaatgtttgtacatatatataagtctgtataggaaacaacatatgaagacatgaagataataatgtagaggtagttataattttttgtgtcttaagtcttcaccaactcatggtgaaaggttcacaatataagttgatcgatcggagttcgagttattctactaaatatggcttcaataaaaatttggttactctaaatagtttcaatgggaaaaatatgtaacaataattttcacaaacctcaagattgattttctaattattaaaataaagtacaccatcaaaaacaaaacagggacaagatccacgtcttgcaataaaacgtgccttgtcaaagatgttctctttgactctttagtgtagccatctctttctctatatataaaaatcaaccatggtgtgtgtcagtgtgtgcacatatttttataagatatcttcacatacacaaaaacatttattgtacagtgcacaagtgatcgaatatttgattctttttcataatcagagatctgatctaa

SEQ ID NO: 6595 - DNA, 3000 bp, Unknown
  misc_feature (1)..( 3000): cDNA_ID_1814919_gDNA_ID_1621098_Annot_ID_55782 3000 nt of promoter + ATG
agttaatagctttagaatatattaggcatttcaagaaaataatactcagataattaagattccagttttgctcagatacttggaatcttaattatctgaaatttaaatatttctttttaccttaacatctaattttctttttgtgtgctttacaatatcttttttacaaatttaaaatgaaaaaatggaaaattgagctggtagcaaaattaaatacaaacattagacccttttgaaaaaggaaaaaaaggatcgtacgttacgttgttatctccaaactgtggaccaaaactgcataacgtgttaaaaggtgagatagtgtaaaagcattgatcaagattcatgcaatgggaggagaaggtggtgctgagcccgtaattcactttgtgtttgttcatggagccagtcacggagcttggtgttggtataaactcaccactcttctcgacgccgccgggttcaaatcaacctccgtagatctcaccggcgctggcatcagcctcatagactctaacatcgtcttcgactccgaccaatataaccgtcctctcttctctctcttgtccgatctccctcctcaccacaaagtcatactcgttggacatagcatcggtggaggaagtgtcaccgaagctctttgcaagttcactgacaaaatctccatggccatttacctcgcggcttccatggttcaacccggatccatcccttctccgcatctttcaaacgtgagtgtgactcttttactaactcacctctcttcttcttcgtttttttttgtaatgtatagaagatatatagaaccactcgctagctatttaactcttgtgagtatttgatagatacatgtgggagaagaagatatatgggagtacacatatggtgaaggtaccgataaaccacccaccggagtcctcatgaaaccggagtttatacgccattattactatagccaaagccctcttgaggttaatctcttaattactagtatacataaattatatttcaacactatagtattattattattgtttttgttaatatgtggtgaattgagtatataaataaaattggttatattgtaggacgtaactttgtcatctaagctgttgcgtcctgctcctatgagggcctttcaagatcttgataagctacctccaaatcccgaggccgagaaagttcctcgagtttacatcaagactgctaaggataatctatttgattctgtgcgtcaagaccttttggtggagaattggccaccttctcagctgtatgtcttggaggatagtgaccattctgctttcttctctgtcccaactaccttattcgcgtatctcctccgtgcggtttcttttcttcaacgataaacttcaacttatccttcatacattccgatctagataacaaactaattgggaataattagatgatttgtttggaaggtgattgatatgatattatgattctattaagtaatttcctttatgttatttgatttgagtttgaataagctttacatgcgaagcaatccagggtaagagagatagaaatctccttgtaaaggaatgttatttgtatccttggtttctttttgtcaataaatctatcatagtagctaagattaattaagtttcatggagaaaaactatatggtgctatctttgtttttgatggatgaggtgataaagatatccttgaacgacaacatgaggtgaatactatgacatgtcatctcattatctcaacactatgacatgtcattatcctcaagcttttaacaatttttgtgacccttcgatgccttagcgtatagttcttgttgttttgttttggttcagtttagattcacattttaaaaaaatatatattattaaaagtgtagagatccgaaatttatataacaggatggcctaaagcaaaattttgtttttattattcataaggcatgtgtacgttattttacggataacctcaaaacgtatttggaccacagacgagagaggagattaagttcacgtctctttttccttttttctgcctttttccttgaaattgtttgagtgaacactagcttgtttgaaagacttgtcagctagcaagaaaagagagtacatatgttggttttgtccaacacagatagacgtgtaacgttatgatatctccagtatgtggactaaactgcatacatttagtgttaaaaattgagtggattagcattaataagcacacacattgattgagattacgatgggaggttacggtggtgatgagtccgtaattctctttgtgtttgttcatagggccagtcacggagcttggtgttgggccaatatattacgaaatcctcttgaggttactctctttactcacttcaaattgtattcttggtttctttgtcaataaatctatcatatgctagactaagtatattttatgattttatctctaacaaaatcttataactttattttttaaacaagtaactaaaacttttgaagtaattaactacaaaaattaatgtgaagatatattatcttatcatatcatatcaatgaaggcgttcaaagtaagatgaaacatggtaaaattacatgtcatgagaatcttacaaatatctctgatattaattggacaaaatcataaaaacataactatgtagatttcatcaaaattttaattttcatgttttaaaagcaataaagtttgcaaattgatgatgtggtctagtatacaatttacacctatatattatttaaatttattcttgcttatcacgtttagttgacctatttcattaaaaataaggaaattcccaaaccaaataggaaactctggcccgcacgagaattctatatatatatatatacgatttgtttcttttggtaaaacaaatcgaaacaaaaattagatttcagagctaactctgagaattagggttcgtctctcgacaaacaaaaatctcagccccgtggaatctattctggtgtaaatcgaagaatg

SEQ ID NO: 6596 - DNA, 3000 bp, Unknown
  misc_feature (1)..( 3000): cDNA_ID_2999815_gDNA_ID_1621098_Annot_ID_55783 3000 nt of promoter + ATG
tgtaccaaccaaatatgtctggcattttattgtctccaaacattgatcatcagctgttaatacaacaggttgtgctagaagggatatggaaagaaggttttatggcacttgctgctgtaggcgcgaccaacattggatccattgaggtaggtgtaatgaaaatcgaaactcataagcctcagacattaaggaacttgctaaaaattgcttttatagcttttcattgaacctgagctaagaacaaacaagccaaagaagaagctatttcctacagagccaccagaggagcgggtgtatgatccagaaggtcttggcttaaggctcgagaaggggaaagaggtaagagtaggttcaaaagagagaataaaaattccagtttaagaaatgtaacaaagttcttttgttcgtatgattggtaaatggtcacatgtatgggtcgatgcaggtagctgtattcaacatgggatcaaccgtagtgctcatttttcaagcaccaaccgcaaacacacccgagggttcaagcagttcttcagattacagattctgtgtcaaacaaggagacagagtccgcgttggacaagcattgggaagatggaaagaggaatgagtacatggcgttatgcactaacaacatataccacactgttgtttttcttttgttagatctgaccaaatcttcaatcagttattaaaattatttatgcatgtctctacttgagagtcgaggctacttataaacagattttgtaattgccctaatcctacctattgaatcccatatctactattttttagtgtcttgaaactttgaattcaatcctaatataaacacgtcattagcatttcaattaccaaagaaaagcaagaagaagatgaaagagcaaagctcagtattatacagatctgtagataatgaaaactctggccatcgaatgatatctttccaccaaagagaagaggttgtgtacataaaagacctttgaattaacctaaataagaagataagagaaaaataactcacattttatggtttatgaatttgatatcgaaagatctcttacaagccatgtaaaaacaagaattcccccataattttacagtcgtccaaatcatcaatatgtcatcatccttctcaatttagtgttgaaatcaaccacagcctctggccccctatatcaaaactttgttcctgaaaagtagatataagtacagattattagtaccaatcagtgagaagatgataaactccatggttacttgactagcacaaaaggatcaccttccaatttttagcctaaacaagctttaacgaagaggagcaactataatttttgatcatctatcaaccatggattccccacctgaactcgatccaaacacacaaagtacactaaagcattcagtctctacaaagcattgacaggactaacatttacaaacaaagctttcagtcttctttcactggaaacatacatatcattttacatctcttcaacgttcacaaatagtaaggattagagaacaatgctaattcacttccctaacttattcaaaacttttagtagacttcaagcttaaaacccatggttatttgatatcctacacaccaagcttaggtttttaatttcagggcaaactaaaatgatggttactgatctcctacacaccaaaacaagtcgcaatactactcaatttagatcattcttatacgttcatgtaaagcaatcaacaactgattctaattgtgattttaactatgactacaacaaacgtgaagatacctagagctatgagttgtttcagcagatcagatgaaagaaacacagaagagtgaaagaaaaagcacacctacgtctgtttagagtacgaagatgagaaggggacgcgtttgttgcgaaacatcatgtaaccaaccggtaatacaacaccgatcatcatcaccgccgatccgatcaagtaccgtaacagactcggaggctccacttctatcaccgtcttaaactgcaaatccgcaggacgagacaagagaattatgaatcagcaacaaaaatgtggagcgacgcaatagcaaacaagcggaaacgaataggagaaaaagagaaagaaaggaaattagatctctgagatctagaattacacattgcgtgaggaatttaccggcattatgacgtcggagaaaggattcgccggtgatgaaccaaacttcgttgtggaagagaagagatctagactctccggtgagattcgtcaggtgagtctctttttttttctgtttctggttcctcactacttataatgggcctttgctttacggcccaatttattgcttactgagcctaaaaccttacctaaatttaatgggcctctgcttatggcccaatttaaatttaaatttagagaactaaagaagacatgacactaattacaagtcattcgattatgtgtcatactcgtaaaatttatcatattaatctagtagaatagttaaccacataataaccacattaaacttcatatgataaaaatatatttcaataatctccgttaaatatatctatgtataaatcacatattttaatagcaagcaagttctccaattagaatcttcatataagttaataagtaccaaaataattattagggatcccatagttaatagctttagaatatattaggcatttcaagaaaataatactcagataattaagattccagttttgctcagatacttggaatcttaattatctgaaatttaaatatttctttttaccttaacatctaattttctttttgtgtgctttacaatatcttttttacaaatttaaaatgaaaaaatggaaaattgagctggtagcaaaattaaatacaaacattagacccttttgaaaaaggaaaaaaaggatcgtacgttacgttgttatctccaaactgtggaccaaaactgcataacgtgttaaaaggtgagatagtgtaaaagcattgatcaagattcatgcaatg

SEQ ID NO: 6597 - DNA, 3000 bp, Unknown
  misc_feature (1)..( 3000): cDNA_ID_2108377_gDNA_ID_1621098_Annot_ID_55786 3000 nt of promoter + ATG
gcttgtaacatgttgaaatcaattgctgcaaactctagcaagagagggttcatttcatgctttttttcgtacacatttatgtaccatcttgcttctaatcttcgtatgctccaatggtacggcgtctctagtgctcgtttcaccatctctaatatataagtttcatcttctctgcaaatagttttgctactttccgcgacaaactcacttaaccgcttgtttgcataaattctagtctccttgagtttaaactccgaatccattgaaaaataagaagcttcgtatagagagagtaaacctttgatatcgctgtgtaaagtttttctgaattctccggtctcacttatgaaaacgtcaaaagcatctgcaataggaaatacgaataattttattatttatacgaaagaatatgaactactcaactcctttaagttactatttggtatagaaacgataaattacttgattagtcacatagttgtgactaataaaaaaaaagtagctgatttagtgtcgcgggctgcaatacgggtttggtgtcactatgttaattaaaaatggttgtttaaataaaatgaggtgatatgtaaaaaaccttgcgagacatcaaaaccatgttgccttaagagaataaattcaagtgatgtagcatgaagatcttgtgtttccctctcaatttcgccgtgttggtcatgaatttttctcaaaatatcatggatttcatgtttatagtgatacgagattccgagtctttgcagagaatcgatcatttctagctgctcaatagaaccttcaatttcatttaatgtcttcctcacctcttctttaaacaatatagctttctccgcggtttcaacttctttctatatacgtatcaagagagagcattgtaagagttactataatatactaatcaggttcgatttaaagcatatgttaaaaacaaataaagttctagcttcggcaccagacttgtaacgccaatttttgggaaaaaaaattggattttaattatcacacaaacaaaataaaaatcagaagtggtataattttaggtcatgtgttgagtctttgaaacgttagattgtcctgataacatgtttggatgaattgtgcacgtataatatgatatgtaatattacaatttaccacatatatatattctcgagcgagaggagatattgatgatcccatagaggtggacgataattggcggaacggcggtggaaggtgacagcatgggtcgaggtcgttttggagacagcgttacaaggaaaatgctgagtcttttgatgatgaacgttgcaaacaaaagctgaattgaagcatagattatgagcagccatatatttgtaaaggttaatggagctgataaataaaacacaaacactttggtggcttattttttgtcactctgtcaaacaatacacttgatgtacatatttatagacgtagaggccgataagaagttataccatttaaatcaattgttgttctgattttaaaaattactaatataaaacaaatgatttagatatctctcactttctaattaagtttttttagaaaggttgatttcctcacatgaggtatacaataaggttaattacatttgtattcatcatatttaacatattactattttttcattttttttggccaaacaatattaaaatttatgttcatcatatttaacaatgaaaatgatattaataagaaaatacacacatacactgtaatttgagacacgtttaaaacatgatcatgcctattttgtttgatataacattgaaaattaggtcataaatcgatataattaagaaaacaaagtatatctccattaaccaatgataatagctgaaagcatcacatccatcaccaaatatgaattcgattggtcactacaataactatgaaggataacgattttaagaagattaagacttcagtggacaaaattacttcatgattataccaatgcaaaaaacgaaaaataaatgattcggaaatatgacaaaatacgggccaaattctttttaagattacaacctttgaagtttgaaccagatggtttcgtatttatttgattctccatgacaaaaacaaaaaacaaaaagcgtatactctgttttgcatattcaactagaaaagtctaaaacatacttgtcgagttgttacttgttacttacgtcttagtttcggtaactctcgttgttcacaataaacatgtcttttttgctagtgatcgttgtattcatttatacttgtttgtgtcaaagccaacgaccaactatagtcgttgggacaatgattttttttttttttttttttgaatttaatgctaaattatattcaaagaaataaaacgttctttacactaaaatgcaaactgattgaaacttttatgaaaaagaaacttctctcctctaagcacgagatgcaaaccaaactctcattccatccttatacttcagaacaccaccaccactcatcgtagtcaaacgatttctgacgtttttgtctatcaaacttataagtctctccggctgggatgggctctccccgtgtcttctttggttcctttcattcctttgacaatgattttttgcatcactctaaaaaaaaggataaaattagtgaacttttaatcgatcatcatatgaaaaaatagtttacctttttgtgcagaaaatagtttactatttatacataataatgtttttctaattttgtcaaatgatgaaatatttttttgtactcaatacaagttttgttttgtgtgtgtgtctgttcgtctgaaaaagaaattaaagggccttaatccgaatttcaaagcccaatagtggaagtcttttatgggcctttatttattaattcaagtagcccaatttcgtataatataaaggtccattggagataaaaccctaatcttccactttaaatcaggaacaaacccttcactgcgccagtgttgtgcggctctgcgaatcttcgaaaatg

SEQ ID NO: 6598 - DNA, 3000 bp, Unknown
  misc_feature (1)..( 3000): cDNA_ID_2174182_gDNA_ID_1621098_Annot_ID_171239 3000 nt of promoter + ATG
ccaacccaatatccgaaccaaaaaaccaggttagggcgggttaaaattttaggaaatttccttattgggtagagttttagtaaacccgtggatatccgattggtccggaaattacccgttacccaaaaagagtattcaaaaacccaaacattaatttaatatctaaaatattaattatatttaatcgtaatattatctaattatctaagattataattataaatctaaatatgtcaattaattttggacctaaatatccaaaacaactaaactattcaaaaattatttgttatgtttgtcaaaatttagtaaaatatattcaaatataattaaatttattaaaacttaacaaatttaaaagttttttttgtttggagatccgctatctacatataaaattcccgtctctatttttttggggtatttttagggtctgaaactttttatccaaactaatacaaacccaactggatcctacccgaaccagacccgaatatttagaattatactattgggtagtaaatcataccgcatgtaggcttatattttagttaaactaaaaacttttattgtaaagatgattataaatatatgatattattttatttaattttaaatgtatagtaaactgcgagttgtatgtgttttttttgatattatttatattgtttagtgtttaaaattatacaattgtattttgattgttaattttagagtttcacctgtaatataccatcttgtattaatatcgatttaaacccgtcaatcctaggattttccagcttgtattaaaaattgaatcacatcatacacataaaaaaatctaatgtgttattaattattgtagtatataagattataaatttttaaaataatatatatgaaattgaatacaaatattcaaattatgacccactacttagtagaaacttttcttaaatctatttttgactcgttataatattttttcatgaattgaacaatttatattcgtttttaaaaattcaaattatggcatatgcaaaaaaactctaattattcttttataacgatgatattattttttcgcaaaaatagaatcatataaagatgagagctgaactataataattaataaaaaattaaatatgataatttagatatcaaatctaatttgtggattttaattggttacttttttggaattaataatgtatttcgttttttaattaaattagtatttgactttttaatttttaaagagatgaattaatttactatttaaattttatttctaatggcatacctatgtaattacttataaaaaataaggttacatttaaaatgtatttcccaaataatatggtgggattagttgatttatgtaggagtatgttatataaggtggtgcgaccaattcaataatcagtcgagatttgcaatgaatcaaatgatggaagttgtcttttacttaaaatgatggaagttgtcccccacaaacttatatactgattgctcataatatatagaaaaatacacacatactgtataaactatatgaaatttatattatattctgaaagtaatttttctagagtcttttaagctatttttcccccatcttttggaatcagtggctaaattaaaattagtatgagtagggcaaaaatcagtatatagtactctacatatacaataatcactagtgtgtataaaaaggtaatctgttagtgtttaaataaaattgcacggacagagacaatgcgtgatcggtacgatcattaaaagagaagaactaatagtgtaccctcttatattgtaaatttataatgaatcgtaccctcttatacaaaattttatgaaatggtgatttctattaaagttttttcttttcaaatctttgaaatggaaatgattggattaattaagatgtagtattgaatgtactaatacttaataatgtgatagaaggaggagaggtccaatgatggagaccatgttgatgaagcaaaaagctaaagagaaaacgtgtttgggcaatgtcttctgtggactgtggccttggaatcatcaaaattagatatatggtccacctgcatttgttatgtaaatcttccattaattaaggaatcactgtcctaagatctttttccttttctaaacattgtttaatttgaaatcgtacgcaatatgtatttatgtacaaacctttttaaatcaggtccatcgcactagtggacaaacaaaacctattgcaatgatgatatcgatcaaaatatatagtcggaattccacaagaatatttatgtctatacatacttgtatagtaacgttctagttaaaactacacacacatgacacaccagttggtatgtttggctctttttttttttttttttcgaaaagttaatttattaggttaactagtatttctttttccaaataacacgtcaagataatgtttttttttaaaaagtaacaagtaaaaatatacatctgttttttttttaacatgagttatcaacggtgtagactcatgatgtctcgactcttaactaaattaattaatgtaggatcactttttttttcttttggcaagttaaatgagtataagttcgtattattatatcttataaaatatgtgtcctgaaacctaattaaactgctttacataggtcttgagtttctaatattttattcattaactattatcattattttgttaataaatcgctttatatatgtctaatttttattattaactattatctttaattactgtaggattgatcacattggattgtttgagctaaaacgataacgacgtggacttggacgattatctaagttttatgggcctaaagcccagtatatcaaaatccgggcccaaagttaagatatgaaattagaacacgtcgtactcacataatctgacaagttcagacagcggcttaaatataaaacacaagcgagatgagagaaatccaaatgaaatataatagggataaaaagaacaaaatg

SEQ ID NO: 6599 - DNA, 3000 bp, Unknown
  misc_feature (1)..( 3000): cDNA_ID_1814899_gDNA_ID_1621098_Annot_ID_171236 3000 nt of promoter + ATG
gttttttgtttgctgagctagtctataaagttgatatttccttgttaggtgattccaaggaaagcttctattttggctctttggaaggtgttctagctcaacgttaccctaaccaatggccttctgaaggtaatttcttcctaactgtttcattaatctgttttaatttcaatctctcacggtcacggattatgtgtatgttaaaggtatcttgccatcatggaggcaaaccatggaaacttactacaagaatgtcctgtaagcagttgctctcttgtcgttcttcttcaaagtgaatctcaaactaaaacttcatacctatattctcagttgagaataggtttcaagttcatttcaacagttagatttaaaccttgatggtaggaataaatatagtctattttagccaagtacatcggtagtacaaatgaaaaattcttttcaggtcataaattgtaagtagattaggctgtttcatgagtatttcctctcttttatttgcaatttccatattactttcctggatcaacttgctagttgtgtgtttgcattcctgctttaaggtccgtgggtagaaaattgcttggcttgattgccttagcattggatttagatgaggacttcttcgaaaaagttggagccttgaatgatcctacagcagttgttcgcctcttacgatatccaggtgtgtctatgtacatcaaaaagttctggttggcttgatattaatcttaatgaactttggtcagagttagatcgtaacatatgtaatcagtggaaacttaagccacattccgggagtttgagtcaggttttgatctctgcacttgttatgattataggtgaagtgatttcgtcagatgttgaaacgtatggtgcctcagctcactcagattatggaatggtcactcttcttttgactgatggagttccaggacttcaggtcaatatctctgaatttctcgtcataatcttctattagtaaccttatgttcttacactgtctttgaactgaactcttaggtttgtagagacaaatcgaaacaaccacacatttgggaagatgtccctggaattaaagggtaagtctagcttttcttagctactagtttatgatgagaaatgattgttgaaatccggggactttctgtaaccgcagggcgtttatagtcaacattggtgatatgatggagagatggaccaatggattgtttcggtaaacttaaaccagtttacctagtcgtgagtgcggtttttatgcgttcttcacatttcgtattttcttgtaatgggtttaggtctacattgcacagagtgatgccggtgggaaaagaacgttactcggtagctttgtcttgtttctttctttctaatttctatacaaattgataaagttttgagttatttaaaggaaaagttttttgtaggtggtgttcttcttagatcccaatccagattgtaatgtgaaatgcttggagagttgttgcagcgaaacttgtcccccaaggtatttcttcttgaatcttaatccaatttaagggtgtgaggagaggcacgttacacgtttgttaaatcatttggtcttcaagtgtaaaagaataaaagtttagtccttctctcataaagatttagttccatcggtgcagattcccgcctattctcgccggcgactatatcaaggagcgtttcaggctaacatacgccacttcctagtcttatgtttgtgacgaaatgtaagaaaaaaatagtgttcaaacttctacgtaccataatgtttaattagtgaaacttatggaacttgaaaatgattagtcagtcaaagtctcaaagatagacacgtttaaaagccgtggaacttgaatgggcgtttacgtgtttggaccatactcatacacatggcgaattttctgtggtttatagggacattactgtttcaattcaaaagacaaacattttaatatttacgagaataatacggttgtatacaagtgtaattacttaactatactttgaaggaaacacaaatattaatcaagttttaccatacagttgacaagcaaatgcatttgacagacacaaaaacacaaatgaatgttgacatagaccatacccaaaatcacatttcaatatcaaaatctatatatatatatatatatatttatgtattttcgttattatttgaacctgcaaaacgcagtcaccattcgggcccttaaatcttatttttattttcttcgaaatgtgcataacgctactatacctgcaaagttggaacaaaatactattttaaacacaagataacaaaacattatcttatcttcaatctaactattttatcttctttttatcaacatgttcttcagatgcatgcatttactaattcatatggaaacacatatgggaaaaagaaaaaaaaattatccacacatctgatttaacgatattttaaattttattttagtacacaaatactgaaatacaaccactttttgtctgtcaattatcctttgttatacagcatataaaattttctatacgtagatatcctttttttcttagtcaaatatatatatgagggggaaaaaatcacattattccatacttgcgaggttttatttgcaaacaacttaatttgttttcaacattcgttgactaattaacttatattaggaatatataatccaaaatttattattttccacgtgggttttatctatgtcggagagtggatctgagaaaaagataaacccaaaatatattaattatagaaagaagaaaaaaaagagtctatatttaaatcaatttgtctttctcttcttttatctccgaaataaaaagcttaattgttcttccaactactctgcaattaaatcggtagagtgaggcattgtccttctttttctccctctgttttttttttttttttttcctatcatctctgagagttttctcgagaaacttttgagtgtttagctactagattctgaattacgaatcatg

SEQ ID NO: 6600 - DNA, 3000 bp, Unknown; identical to SEQ ID NO: 6597
  misc_feature (1)..( 3000): cDNA_ID_2108377_gDNA_ID_1621098_Annot_ID_171229 3000 nt of promoter + ATG

SEQ ID NO: 6601 - DNA, 3000 bp, Unknown; identical to SEQ ID NO: 6596
  misc_feature (1)..( 3000): cDNA_ID_2999815_gDNA_ID_1621098_Annot_ID_171224 3000 nt of promoter + ATG

SEQ ID NO: 6602 - DNA, 3000 bp, Unknown; identical to SEQ ID NO: 6595
  misc_feature (1)..( 3000): cDNA_ID_1814919_gDNA_ID_1621098_Annot_ID_171223 3000 nt of promoter + ATG

SEQ ID NO: 6603 - DNA, 3000 bp, Unknown; identical to SEQ ID NO: 6594
  misc_feature (1)..( 3000): cDNA_ID_1814923_gDNA_ID_1621098_Annot_ID_171222 3000 nt of promoter + ATG

SEQ ID NO: 6604 - DNA, 3000 bp, Unknown; identical to SEQ ID NO: 6592
  misc_feature (1)..( 3000): cDNA_ID_3090508_gDNA_ID_1621098_Annot_ID_171219 3000 nt of promoter + ATG

SEQ ID NO: 6605 - DNA, 3000 bp, Unknown
  misc_feature (1)..( 3000): cDNA_ID_2174128_gDNA_ID_1621098_Annot_ID_171212 3000 nt of promoter + ATG
acgctttgaaacaagagaagcagaatgacgatccacaaacaaagacttagaacctaaactcgccattgatttacacggatccgaaagcaaaagatcaatgtgatatccacagacctgaaaggccggaccagatacagaaggaacagagaaagttcgagaaacagcaccaataacagaaagattcctcctttcgttaatcaacaacaaatcagagctagctggttctaaaaacccgttagggttagtaaatctagtgtacaatcctctataaccaccaaaccctaaattccctaatccaatcaaaatcttaacttgtttctgaagactttctctcacaggtaacatcttaagcacaagaatctcgaaacccagtaataaccagagatagagaagatcatatcttccaaagcatcacttttttcgtcgatttaaacgctttcaccaacgaatctaaagattgatccaacacaaacccttgaaactcagagctcaatcaaatacgaattcggaacttaccaggacccacaaattctcttttcacctccttctggagaagataatgtcaaagtcacaacagaaattggctagaatccagataagtttctgaaagaagagatgacaaatttcacgaaagaaccctagccaaatctgatctttaagacaagaaacacaaaagctggtggtcaaaagcaactcgcttttttcttttgttctaaaaaaaacaaaaccagtgaaattttgggatgtctcaaaaaaaatttctgtatttgaggtttttgtgcgatgggtacagattatcagaaattcagaatgttcctctcacatctttttggatataagtgattttcagctgttggatcatacatttaacaatctcagccgtacattttctgtttttataaaatagactaataacgagaaaccgagtcgtggagattaatgggcgtacaaaagcccattagagtagcaatcaaagcccatgcatcggcatcaaattgtttttgaggatcatttgtcaattgtcaacgagtagagccgtgcataccatacaacataaagggaaatagccatagctaggccacaaaaaaaattctactacttaaaacgccacattttttatacaaattatttgatttttttggttacactaagacttttttccactaaaatagattacttttacattagaaatatgttataaagttgtaattttgtgaaaataccattcctataaatattttaagatgcttgaaaatcatattttgtcaaaataatagaataacgtttctaacgataattagaaatcataaaataatatacatgttaaaataaaataaaataaataagtagtcagtacaaaagaaagtttacacgtataacaatttgccataggcctccataaatccatcatatcagaccactctaatgtttttacttgtaaatatttgatggacaaaaacaaatgctgggcctactatagctactatcatatggatgttacatgcagaaacaaaacatgcttttctctctgaataacgaactaaacatgttatggattaggccctaatagctagtccagttaggattttaagattttccgatgtatattaagtgtcaatgtgtcatacatgagcctctaataaacacacgcccaaaatcaatagaactaactaaccctatacaccgaagtaatatagaaccagcacgaactctagatctggaaaatataaatacaaaatatcttttaaaatgttttctaaatattattgtaattatcatatgaaaaaaaaactattcataaaaagtaattatcaacatatgtaatctttcaaagatgcacttgatgtgtgtatcttgttggttagaattttaatttattaatcgataacttggaaggcaaataacagtaaaaataataatctaactgtagtaaatatctccccacacgtcattttttttatttttttttattttttattttggcaactcacatggtttgattcattgataagtcagtttcaattttatttttctcaaatttaaataattctccatttctaaaaataaaggggcaaggtattggtacgcacatgagactaacattcatacctttttatgaaataaataaaacaaaaagggacacaagaaggaacgcaagaattttaaactgaaatgattgtatctctaaattgagaaaaatcccaaaaagaattagtaacaaattaaataactaagcggtgttgttttattcggaggtaaaatatatatatggagggtatagcgtcaactcgcttttttactacattttgatttctctcccaaagttctttaatttttgtttgggtatcacatttgtagtcagaaacaaaattgttgaatgaattatcgacgactattttcactcgttggaatagtcgggattcaatttattaaaccgtcgtaaggaagctaaagatgtaaaaatgatgatatacagacaatttggctagctcattcactttttaaatgggcaaaccaatcatgaatgctagtttaatttatcgtgtgattgattttttttttatataaaaaaatagaagtaaaattgtaactttttatgaaaaccgtcgtaatcgtacgtcactaagctacaaaaatacaacaaacagtgactaataagaaaatgtagagtgatattagatgaatttaacacgtggaaaaatcatgaggaggagatgattttttctgttgcattcccttctgtggttaccagctacgataacgttcacgccctcctccacttaaattagaatgtgagaaaataaaatagcaagaaattggagatcacaacagtattgagtgtaggacatattacaaaggagacaaaatcagtcaatagtaaaaaggtatcacaataaaaaaaaatgtcaataaaaaggggccattgtatgacatgaaagaacaaaattaagtgatcatcacttctcctcctttatcgagagcttcagttttagagcaaca

SEQ ID NO: 6606 - DNA, 3000 bp, Unknown
  misc_feature (1)..( 3000): cDNA_ID_3048697_gDNA_ID_1621098_Annot_ID_171207 3000 nt of promoter + ATG
agatgtgttcttgcgacatcatagttatccacataacaggtaaacacgtcttgaatgaacttgtacgttagtagtgacctttctgtgttgtgatcgtgtgaggtggaaacagtataggtcatgctaacaaattttaggaggtattaagcactgtgattaggggaacaaaagagattgaaaatctagcattaagtttcagactatcgcctatactcaggcggttcagattactcgttttcccttgtagggggatccttaggtatcaatagcatggataagacttttgggtgatcataactaaaaacctgagcttatctaagtactagatgccattgagaccaaatcttctctgttcacacttcacatgcaacttgtgtagttagatagaagtacagcttgcagttgcactgcctttagcttctttgagtgatgatttggatgcgggaatacagtttctaagatagttttttctgagatttgttatggtataacattctggggacgtttgataggaaccactagaagaagtcaagtatatgagataacaaagcaacaaaacttcttaatggtgttatgttctaaatgagtagggaattgcaataattgagattcttgggttggcattgtcttgaagtatttaggcccacaaattataagcattttttggatggatctacttgtaatcctcaaccacccctgtcaaataccaactctttgtttggttcttgctctgttttttagttcataaagtctatatacgacatatagacatcaacaaagcttcttattttcctgatattttaaaccgggttggtcatgtccttataattttttttgtattgtaatgcctttgaacaaagttgcagggtgatcatgcacttctaaaagagagaatttttacaataaaatatcaatttgttttgttgattggcaatgattatagatgaataggttggtgagttcgtcttcttgtctgtttggttatacaactcttagggctctcaataagttatgattcctcccatgtctcattgttttgttacagttgtgtgacttgtgttatgatgatactacctgtctaaacatttgctgattccagtagtttataggatcatcatattcgcagatgaaccacttggaagtgtatgcagtttatggaaataagtagtgtatgcaattaatggaaataaatggtaatctcatgtaccgacgactagctttttgatgaaatcaaatctctagtaacctttgtgttaatggtgacacaagaaagctataaaaaaaagctaaagctggtgcttgtgaggacaacagctctggtgaagaagacaggcttgagccttttcttcttgtagcgacgaaccaacgtattgattttattttttttgccgtaaaactacaaagctgcaataaacgtcactctcaagtctcaaacctcaggtttgcttttgcttcattggttccttcttctcgttttttgtattttcagagtacagctaatttaattttcctacataatttctcgaaatcgcctctctgttaacagctgtatccaaaattttagatttaaaagaaaacaaaaagaatccatgctctctttaattaagagctgacgaatcccatcatatccaaaaccattgacacggtttcgtttcgtatttcaaagtttccaatacttttttagtaaaataagtcaaagtatttttgatgttccaaattttcaatgcgggaaacttatcctataaattactttttcgtattttaaaatcgaaaaagtatcggcttgtactggaggaggttggtgaattttataagaccatttgtcctctagcgattctctctacctaatctagcttcaatacaacatagccactggcattttatattaatgcttttaattgttatctaatctttttgtgatgattgattagtttagattatatgttcatgaaaatcggtaacaagatatagtctcttgggataaacaatgcatccctttttatcttttacaaaatccataaaacccatgatatcatacacttgtaacgaatatgtatggaatgataaagttcggctgcatgatagatgattattcaagctgcggtcggcaaattggctaggtgttgtggttcggctcgattggatgtttgattaattggttaaatgtttggttttttggttagacttcatattagcagagcaattttctaaagaaatgcagtaaaaaaatagaaaattgtcaggtgagacaataccgaagaggaatttaagttgtatttgtgtgtggagaagagtgaggtacacgtacctttctctctctcttcgacgctttaaccctgtccatgccatggcaatatcccacctggcttggactctactttcttctttgctttttttacaatttccactatttatgttttttagcgtctcaaggcttttgatatttttcctttaagttgagattatccgagggtgtggattggatatgttataaaccaatgaagttgaattttaataaatgaaacataaacaagagaagataacaaacgtaggtttaataaatgtatcatgtatggttgcatgcgaaactcccccatctcatcaatgtacaatgcagttgacttttgagttttgccaatcatcaaagactagctagacaatagtattactattacagtgcaagtttcaacatactgctgcgttttggcatatgtaatggtgttggtttcctgtctaaatctaattctttatctaggactaaaactctgcatgccactcttttcatcgctcaagccttttctttagtttcaaaataattatgtaaatatctttttgtcaaaagcataaatatctatatttgctgaaatgaaagccaacaataatttattttttaatcgtctcacaatatgtctttgctctgtcctataaaaacactcgacctcctctgcttcaaaaattcaaaaccattccttggactccactgttttattatccaccatg

SEQ ID NO: 6607 - DNA, 3000 bp, Unknown
  misc_feature (1)..( 3000): cDNA_ID_1814958_gDNA_ID_1621098_Annot_ID_171203 3000 nt of promoter + ATG
tattaataaaactatgtgctttgtatatgacttttggcagctaacatcattcgtggttataacccagaaggtatatgattttttatgtttctttcttcttctattattttctggttaatagatcagacttatcagttgagcttcttttagaaactagtcttcgttgttttagtatagtaaacgtatctgacatttttcatgggtttgtgttgttgattccaattgttgcagtcgcaggtggccatcctcttggtatgtataacatcaacctttgactatacctttttaccatttctttttttctttgacttgttttaaaaataaaaatcctcttttttttctgttcttgaatcttgcagctcatcttcgtggacttaatccagaaggtatcatcttgttattaattcgtctaaagacagacaacttcataaattgttttgattgatttcattaattgttttatcatcgtaggttgtcgtggcactgacccttttggtatgaacttaatctctccattgtgacataatttccaaatatagtaattgtagttatatgtatcaattactatgcgcaaacaaaagacttaagagatgcttactgatttatattttgtgtttgaacgttggacagatccggcgttcactggtccgaccatacgaccacacccgtcagtgttggagggatccacgagtgcttacgagacaaagcagctctcaaacggtggtctgtatctgcgaattgacatgcctggtgtccctagcgacggcttcattgtggcagtggacggcaatggtgtcgtcaccatcatgggacgagctcctgcgactatgcacgactcaagtgggcgtagttacgtatgcaaggtcgccattgtccctagaggctatgctggcgtcggatcaagataatcgccaaacatggtgtcatccgtctcactatccctccctactaattaatgaatcggctcttaattaagatcatgcttttggaattaatcatcatgtttaaaacaatattgggacatgcatatgtttgtctttttcttttggattcccgaatatttcaagaacactaattaaatggactttaatacatatgtacgtataagacgtgtatgaaaatattcactcgtatgttttttttttgtcgcactcgtatgtttttaatcttcgtctaatgcatggttaaaatgaaaataaaataaaaaatgatgcactagaaaatgtcagcaaatgaaaatagaacacgtgtcagtctagagactgtttgtcgtttctcacctgacaccgccatactctcaccttcatttactttattgaacttcgcttcattaaacatcttaaaaccctagaaccagagagagacagagagagattgagagatctcaaaaagcaaaaggaaaaaaacccaaaccgaaatcttcggccgccgaatcatcatcatgcctatccgccgccgagtcagaatcaacatccctaccagcccccgaatgatcacgcctatcacgcccatagctccggcgcctcacgctcatagtaacgatctttaaacccaaagtttacaattacttcaccatttcttaaaaatcttagatttttctccacgtgatatgcatacatttctggttttttggtgtatatgtgtagatggtttttacgctatgaacaatccgtaccaagcgaacggaccaaaagggtttgctgagttcaagtatctggaagatacccatgatctattcgtgaggcttgatttgcctggagtcaagaaagagactgtggttacccacttacccttctcgaaccatccaaaaaagctgttactgtgaccggagacgcagctaagagcagcaaacacgatgcttctaaccgcaagtatggaacctccgtggggactactctgtgactgctgtggaaatcagtaacaacattcatacctttgttggaagatggtgttttatagcctccaaactacaaaatatctaaaatattttaatcctaagtctagagaggtcttacataagatctagattacattattcaaattatctagattattctattagagtatctagatttttatgtttaaggaggtggaagatgatgatatttctagagaaaactctaaaacttggatttggccataattaattattggataattgatccaataattaaacttgattcaaaatcaagtttaactttcaacacgtgcttcgtttggtcatccttcctgtttgatgatctcgtggtgaaactttgtgtttgggtctgttaaaaatctgtttttctagagtggacccttttttcgggatagtgtcgttgtcttaaggattattatgtcgtttcatgttttagttctttggttggatatgtctcaatgacaaaacatatttggatgtgtttcaacgacacaacttatttggtctataacccactgccatttatgagtctctaaattgtttatcagtttcaaaggtcactattgaattgcaaaatgaatttaacattacttttgtcaaccaatacaataaaatgcaaagcaacgtacgacagttgtttcacaaaaagaggacaacgcgtgtcaaactaatactggtgcaaatcacaaatgcaaaagagacacgtgtccccatagtattgtcttgtcttcacctgacaactccgtcctgttgccttccctcccataaagatcccaaaaaccctaaatgccaaaacccagagagaaagcaggaaaaaactaatcccaaagtagctaaccagaaatctcagtcgaatcatcatggtcgtccctctcagagctattccttcatctcgcggtactaacatctttctaaaccaaatctcaaatctcacttacactacatttgctcttttaacccaaagtttactcctttttttggtgttgattggaacagaggggttttatgcaataaacaaccagtttcaagcaaatgggccaaaagggttcatggagttcaaaatgttggagaacgaagatatg

SEQ ID NO: 6608 - DNA, 3000 bp, Unknown
  misc_feature (1)..( 3000): cDNA_ID_2174100_gDNA_ID_1621098_Annot_ID_171202 3000 nt of promoter + ATG
tctttggttggatatgtctcaatgacaaaacatatttggatgtgtttcaacgacacaacttatttggtctataacccactgccatttatgagtctctaaattgtttatcagtttcaaaggtcactattgaattgcaaaatgaatttaacattacttttgtcaaccaatacaataaaatgcaaagcaacgtacgacagttgtttcacaaaaagaggacaacgcgtgtcaaactaatactggtgcaaatcacaaatgcaaaagagacacgtgtccccatagtattgtcttgtcttcacctgacaactccgtcctgttgccttccctcccataaagatcccaaaaaccctaaatgccaaaacccagagagaaagcaggaaaaaactaatcccaaagtagctaaccagaaatctcagtcgaatcatcatggtcgtccctctcagagctattccttcatctcgcggtactaacatctttctaaaccaaatctcaaatctcacttacactacatttgctcttttaacccaaagtttactcctttttttggtgttgattggaacagaggggttttatgcaataaacaaccagtttcaagcaaatgggccaaaagggttcatggagttcaaaatgttggagaacgaagatatgtacgttcggattgattttcccggcgttccaagagatggtgtgagggtttttcttgaccagtcgaagaaagctgtttgtatcttcgccgacgcaccaaaggaacacaaatacgactactctgaacggaactacggtacctccaccggactcgtctgcaaatgctgtgaaatctccggattcacttccttcatgtctgatggtgttcttaggcttctcctcaccaagtccaacatcactccacaacgctcctcctgcatctgtaattacctttattattcagtcacttcaatttatggaaccttttttggtaataaaaacttttgatgaatttgtgtttttctacagcgtttcttgctggcccagatttcagagaaggtactttattcgatctgtcgttttcaccaaactttctattttgatatatcgtctctcaacatttattacaaagtcttcatttttctttgggtaaaaaaaaagtcttgattttgccttcattaacgtttggaaaatcttgtcttttctaattatggtcatagatctgcgtggcaacggtcctcacaaatttccccatggcacggatcctaatggtacactcatatttcccttctccaagcttatgctatacatagcaagagtattaaataggaatcaaacactatatatagtagtatatagtagtgagattggttagtctaaatgggaatagttgttgttgttgttgtgttttatgtggagcagatccgaaattaacgggtcggatattgatgccacacccatgtgtgaactatggatcagagatggcttatgagtccaagcagcttcaaaacggtggtctatacgtgcgtgtagacatgccaggcgttcccaaagagaacttcactgtcgcagtcatgaatgggagagtgagggtgaccggtgaagctcctgccattagccacgactcaagtggacgtttctacactggtgacgttgctatgctctccactcctttcgacattcccatccgtaagatcaagatcattgctaagaacggtgtcattcgtctgatcatccctcccgtttgattccataattattaaattcgtgacatcttgtggacttctcctttagagatattatgtcgtcattttgggattaagtttttatcaactttggatatgtttcaaaaagacaatctttacgtgtgtgtctagtattagtctctaaattgttaccaatttctcaaggtctctattgatttgcattaggtaaaattacaaaaaaaattatctaagaatataaccaggagatatactaataacgtgtacaaatactatgcaacaaaacaattaagtataacttcttaaataatctttaagtgtgaaagcagataatattggacggctgtgattttggtttcaatatcagctaataatatggaccgtcagattctctttcatacatttcgtcaaaggtcaaaagtaaacatgccacgtcaggtgagaagattagatatttccatttgtagcatttccattaggtctgggcaaaatattcgttcgatccgctttgactcgctattcaatttgatttgattcgaaaaatccgaatatccgtaagattttggagcaaagcaaataggaaaatgtagtattcgtaaaaatcgaagcaaataacaaatactattttttctaaactcggatattcgcttcgaaccgtatatatatatatatatatatatatatatatatcataatataggttgtgaatttgtatatgttgggatttgggcttgtatttgtatcctttgggcatgtgtttttttttgtgacacaatttttattagataagtggaattttttaaaataaaattgtttcatattttatattttatcctaaaattgtcgttttagttttcaatccatcaaatataagagcgacgtttctgtttcctttcttcgacttttcactatttttatcactcaatttggttacataatttataacaagaaaatttctagttgctctcaatctcacactcgtaagccataaggtaagaaatttgaattatgttaaataattttttttaaaaatatttgaatatagcaaagcaaaggggatatccgacaaatatcacacaaaaatccggatattcgtatttttggatattccggaaattttcagatcaaagcaaataataaaattaagtattcgattaaaacgaatcgaataacaaatatcccaaattttccggatattcgctgcccaggcctacttcccatgcccataaagttcccgaagccactaaatgctaaaacttgctacaaatgcaaaaacccttaagcactgagaaagcttgaatctttgttggcaatg

SEQ ID NO: 6609 - DNA, 3000 bp, Unknown
  misc_feature (1)..( 3000): cDNA_ID_2174090_gDNA_ID_1621098_Annot_ID_171199 3000 nt of promoter + ATG
cctttaccagcaacaccatatcctaatctatatttgtcctcatctgcattattataacttatgactttaaatgaggtttggtttctctctcaccaatgtatcacccaatttggatgtttttaaggggtaaatttcaactaaaatgtagtccaagttattaatgttttggtagaattaatcgaaattagagacatcagaacagctaacatcaatttggattttttttttgttcgaccctaacagtaaaaaccattcatcagtgtggtaaatgtcgaaaatgtattacgattagaattgatacattcatcagtttggtcaaaaacacctatcttcgatcgatattttttttaccaaaacgaagttgatgtaaattgttggttgcaagttgagttctgaccaataaaattggtagaaattctttgaccatttgtaaattgttggttgcatgtttatactgaattaaacatttgcttcgaatattttagaccaataaaaatggtagaaatattttgatcggttgacatttttgaccgagaatagtggtcgaaaacatcttaccaaaaagtggtcaaaacttaatgaccaaaataatggtgaatattattttttaccaattttcgaccatatatttcaatctgactaacttatatacaagattggaatataagtataaatcaaaattcaatttaattcttaaatatttgattcataataacttaataaaaataaaaatataatttaaaatacacaaaaaaacaatacttttatacaagaaatcaattttaaaattatttgattaacaaattttaaaaatatttgagtttttgttttccttaacaaagttaccatgtgactaatatatctctccaatcttaagagttggagtttgaaactcttcttaacagaaaaactctttcatgaatgcggtaaatctggagctacatgtataggtatgtggaatgcatttatatcaaccttaggcacaaatagtgaatgcttcaaagcaatccaagtctttgagaacattccttccaccttgatcaaaactcactcaacattttggaacgtgatggtaacttgtacacatgctcgacaaactgagtatgggcattatcttcttgcaaggatagtcaagactctatggatagaaccaactattgaaataatggggacatatttagacggcttggctagaggaaaagtgattgatgaggcataacgagttgtcaagactttgattttcaagcctaactaggagattgctgtgagtcttttatcaaagtacaaaagccattcaacacccattgagtttgctaaacgttttgtgaggtaccttgaagagaagaaagtcaccttctacattgctggaacgacttataaggtactagacgaagatggggtggagtggaaatctaatgtcaagattaagaaacagaagaaaggaaaatccacaatccactcccattagagcagttcaaagtactatatattgctgcacagctaaatcattcgtcaaaggcatttcttaaccatgctatttgacctgaggttacgagagtaaggatataattgtattgattgttttgaaacagtgaaataaacatgaaaaagtgcagtgaaataaacatgaaaaagtgcatactcccacatatgtgccccatatgctctaacaaacttgataagtgtcatacgtagtgagatacccttatattttttttagctttttatatactattgcttacaaaccttattaatatagttaaataattagggtgggcatcggtttggattaagtaatgattttggataatgattaaaaaataattttgatttttttttcaacttcagaaaactcaatcttaacttttaaaaatgtttatgtcttttcacaactataatattttatatctataagtaaaaaacttgttagaaaacttatcttactttgataaaagattcattttgattaattatctttgttatcctgtaaattctcggttttgacattaatcactcaattccggtattttaataaattacaaaatgagttttgtgcagtgttgaagatatattctcaaatacagtaattgctttcaacccttgatttcgaaatgcctaagcttgaaatcctaagctgtccatacaccaagacctacatctccagatctctataacagtcataaaaaaacttctgcctatactttatttattagttttcatatttccatccgtttatttgcaaggcccattactgcactaggccctacattttgttagaagaggcaaagcttataagcgacattctcaatttccaactattacccttccgaactcttcacctaacacacattttctaggggtaaacgtgtcatatcgtatgcagaaacgtgatcccagcatatccggttcttctttatcctttgttggaggcaatatctacgtagacagttacctcgtacaccttcagtaaaatggacggttgagattcctatttcagtaaatagctaatatctaccgtcagattctcactgaacagattaagcatacaacgtcagctgaagtgtttagatgttaccatacaccatctgtagagaatctctgaccttatcgcataattttttaatgttttgcagaatttttgtaggttgcttatttgctttttctttcatattttttcgttaattgttgttgttatcttcaacgatagcgttgtgctctggagaagtgtttgatcgcagaaaagcttcgttctttgtagtctacaggtttgatcactgagttcttaacttcttttttggtttgattgcgatcctgtactttcgtttagattacttaaaggttgggtctttaacatgatcgactgatagatttgtgggaattttgataatctgagttccagagtttgggaattgatgatttgatttgagtgttaaatttgttttgatggttgtctgattggtgtcacctatttgttatgtgtgtgtaggcgtggaaggaatg

SEQ ID NO: 6610 - DNA, 3000 bp, Unknown; identical to SEQ ID NO: 6585
  misc_feature (1)..( 3000): cDNA_ID_2174083_gDNA_ID_1621098_Annot_ID_171195 3000 nt of promoter + ATG

SEQ ID NO: 6611 - DNA, 3000 bp, Unknown
  misc_feature (1)..( 3000): cDNA_ID_3048701_gDNA_ID_1621098_Annot_ID_171185 3000 nt of promoter + ATG
ctgtagtgctcaagacactgttctttactcttcgttcccacgtgctccgcaacctctgcccagtttcccaagccataaatttcaagtccctgaataaagacattaaaagaaattacttttcactgaaagaatcagacattatagacttcatatcagtacgataaaagaagtagtggtacctccaggagaagcatttcatcatccgcactccagtcaggacaaataagcgggaaagttagatttccctaacaaagcaaatgaaacatatattaagctttggtagaattcaaccaaaagatattttcgctaagtataatgaatcaaactctttccaaactaaaaggtaagaaaagtaaatgaaaactaaccataactcggtatgggtgatcacatttgtgaggagtgatctctgctccaacagacatacattctatacagagatcaaaatctggacagacagcacactttatcctaatttttccagtaatgtctttctggcaataatcgcagttatacttccctcctccctcagcacctggtactgtctccacaaataaaaaatgttgagtaaaagaagaatcttgacaggagaaacaaaaaaaaaaaaccttgataagtatttttttacccaaagaagtagactcaaagttctccacattagccgcatttttctttttcctcgttctgcaacaaacgcataacacgattctttcatgtcagcttcaacagtgaaaaaacaattacacagatgaaaacagagaagagactacatagctactgaaagttttcaaaagcaacaaactttaagcgatgctcattgtcccaactgaaaaatcaatgattgttgcacaaagcagatgcaaagaaacttcaaaatcaatcaatttcagcagaaattggcacaattacatagatgaagatagaggagactatagctactgaaagttatcaaaagccacaaatttgaagccatgctcattgtcccaactagagatcaatgacaattgcacaacacagactcaaagaaacttgaaattcaaatcaatttcagcacaaattggcaattacaaaagagaaatccacaaaaaccccaaatcggaaattagagtagtgaattaggaacaaacctctgagtagggtcttcgaaattttggaagttccctcgagagcgacccattgatgcccaagtagaaaattggattattgggttatgcgaaaccacagagaagaagaaccctagcgtaatgccaacatgggagactcaccggagaagatggaatgggtacttgggggggtttcgtggaagaaagatctaatcggaattcaacaaaactcggtcgaaatttgtgaggttttggatctctactaatattattcagaagttccgaccgagaagattaaaattagggaagtcgaggtaaaggaaatttctaaggcactgtactttttagattttttgggattagacggtcatgcttattactaaagcatatgacttaaactaaattgactcttataacttcaacttaaaaaactattattttttatgttaattgttgaatggtggttgagggaaaaaaaaatgaagaaaaaaaagctaagatagaccatttttattggtaattttttattattaaaataataaaaataataaaaggaaaagaaagagagtgtagaatgtttctcgttaaactatgaaatactttatacaaaccatcataatatttttctcttttcaattggttcgctaaaataaaaatttaatcatatataaaattataataaaatactaatattctttttgtttgaaaaactgtttgggtttcttcttgatggagatgtctttaatatttggttgggttatggttattcgtttttaggtattttgttcatggacattttcagtaaatgaattagcaagtaaataaacttgtataggaataaatggttagtgttgtcacacactatcggaacaacattatgatgtattttaaaatcttattgatgctaatttgaaaaattgatttggaagaaggttaagcaaggaaacaaccatataagatagtttgatgctaatttaaagtttcttattttggtcgaaaatcgaattattagaaatgtttgaaccttttttattagacatctagtgataaattttataagactcatgtcaatcgaataaaaatatcgaattgttgttttgctgaacgaataagtttgtctatattagacgcgattagttcttctaaaccacattatccaaaaaaatcgtgattgactacatggtgtaatgatacctatcataccatctcaagaatatggcatgactcatccaattaacaattgtatttgcgcataattgtaagatgtgtaaattccttttccgcttattaacggtgatttgcgataagttaattcagaagacgagtttcgattctcccatcataataggttgtactacgaaataatttcccaacatgtacacataatctcgacaaaaatccagtgatatgggtttacttgtagttgaatagatattacaccacaatgacttgtggtttggtatgtaagaaaaggcaaaagtatagtttgcagttaaaaaactgaaggaaatgatgtccttggtattaaattacgattaaacccatattctctctctcgcatagtctcttcctcttttcttctttcttcgtcaatttcagaacaagtcactacagatctgaagtgaaccaagctcaggttttgtcttctctttgatcattcctttctcagcaatataaattagagttatatcctttataaaggattttgctttttcaccaacaaaccctaaattcggtgtctcagcaagaatcacgtgattctcgttcctcttcctcacgaaacccatcatcttctatctcatttgtaagcagcgatctcaatccaaatacctttaattttatttgattccataccctaatttttgtatattccatgtcaatgaacgtttcaggagaa

SEQ ID NO: 6612 - DNA, 3000 bp, Unknown
  misc_feature (1)..( 3000): cDNA_ID_3048705_gDNA_ID_1621098_Annot_ID_171184 3000 nt of promoter + ATG
cctctgctggagttatctgattactctccctcctcttcattatctgcttctctgtttcatacaccctgattttcttctgcatatccgtgatgtaagtgattgcgtctgcaaggagcgaagccttgtccatcttggagatgttaggcaccaccgctctcaaagcgtagaatctctggttcagcttctccctcctctgccgttccgcttccacatggtttagagcctcttctcttccatttgctggttttctccctctcttcctcggcttttgctcgtcagttagatacaatgtctcatctttcccttgctcataaccatacacttgattagagcctccgatcgcttgcacctcatacgattccaatgagaaacccgtgtcatcctcggtcttcggggagaaattaatactcatagaccgaggttttgctccaccaagactcagctgtcgaccaaagattttaggagcttctttagcctgaacaaagtcagacccaccaaacactgatttcaccatctcaatcacactcttatcttctggaatatgtcttaaagaaccaagctccacaactccagaattcactggtacagacaacacagtctgaaaaccagctgacctagctaagaaagacctaaccctataataactcaagcagctaggcaaatctgcagcccaaagaggcttcccagacacataggttccagcaggaccgtacttattggtatcacacctaaaggaaaagtacaaagaagccagataaaacatgtcgagatcagtaagagctcctgatttcaccaaacgatgatcttcatctgaaccaacgaacgacaagtgaagcttgcgaagcacacgtcttttgatctcatcttgctgagagtaatcctcacctgaagcaccctttttgacacggcaatgaccatctccccagatcaagacacaaccatcagagctattaacgttggacgctagccagaaaagagcataatcccaatcagatccttcaacaacgtgacgtaacccttgttggagattggaatcacttggtggtgagacaagcttggacaaggcagtgttggaagctgaagctgttgagatgaaaaagtcgcaagcttcagagcctatggtggattcaaccatcgctcgatcttcttgattctcccaaaacttttgacccatttctcctgaaacgttcattgacatggaatatacaaaaattagggtatggaatcaaataaaattaaaggtatttggattgagatcgctgcttacaaatgagatagaagatgatgggtttcgtgaggaagaggaacgagaatcacgtgattcttgctgagacaccgaatttagggtttgttggtgaaaaagcaaaatcctttataaaggatataactctaatttatattgctgagaaaggaatgatcaaagagaagacaaaacctgagcttggttcacttcagatctgtagtgacttgttctgaaattgacgaagaaagaagaaaagaggaagagactatgcgagagagagaatatgggtttaatcgtaatttaataccaaggacatcatttccttcagttttttaactgcaaactatacttttgccttttcttacataccaaaccacaagtcattgtggtgtaatatctattcaactacaagtaaacccatatcactggatttttgtcgagattatgtgtacatgttgggaaattatttcgtagtacaacctattatgatgggagaatcgaaactcgtcttctgaattaacttatcgcaaatcaccgttaataagcggaaaaggaatttacacatcttacaattatgcgcaaatacaattgttaattggatgagtcatgccatattcttgagatggtatgataggtatcattacaccatgtagtcaatcacgatttttttggataatgtggtttagaagaactaatcgcgtctaatatagacaaacttattcgttcagcaaaacaacaattcgatatttttattcgattgacatgagtcttataaaatttatcactagatgtctaataaaaaaggttcaaacatttctaataattcgattttcgaccaaaataagaaactttaaattagcatcaaactatcttatatggttgtttccttgcttaaccttcttccaaatcaatttttcaaattagcatcaataagattttaaaatacatcataatgttgttccgatagtgtgtgacaacactaaccatttattcctatacaagtttatttacttgctaattcatttactgaaaatgtccatgaacaaaatacctaaaaacgaataaccataacccaaccaaatattaaagacatctccatcaagaagaaacccaaacagtttttcaaacaaaaagaatattagtattttattataattttatatatgattaaatttttattttagcgaaccaattgaaaagagaaaaatattatgatggtttgtataaagtatttcatagtttaacgagaaacattctacactctctttcttttccttttattatttttattattttaataataaaaaattaccaataaaaatggtctatcttagcttttttttcttcatttttttttccctcaaccaccattcaacaattaacataaaaaataatagttttttaagttgaagttataagagtcaatttagtttaagtcatatgctttagtaataagcatgaccgtctaatcccaaaaaatctaaaaagtacagtgccttagaaatttcctttacctcgacttccctaattttaatcttctcggtcggaacttctgaataatattagtagagatccaaaacctcacaaatttcgaccgagttttgttgaattccgattagatctttcttccacgaaacccccccaagtacccattccatcttctccggtgagtctcccatgttggcattacgctagggttcttcttctctgtggtttcgcataacccaataatccaattttctacttgggcatcaatg

SEQ ID NO: 6613 - DNA, 3000 bp, Unknown; identical to SEQ ID NO: 6581
  misc_feature (1)..( 3000): cDNA_ID_3048711_gDNA_ID_1621098_Annot_ID_171178 3000 nt of promoter + ATG

SEQ ID NO: 6614 - DNA, 3000 bp, Unknown
  misc_feature (1)..( 3000): cDNA_ID_2174046_gDNA_ID_1621098_Annot_ID_171175 3000 nt of promoter + ATG
gccggcaagttcagcagtgtcatttgtaggtgcgggggaaccacaggcggttctttagagtagtcctcagctccgagaagcaagttgctgtaactattctctggagattgcggagggtcaaacccagatatgctttgaatgtcttcaggaacatagtcctgcataacatcaaagtatctctgctgttttcacacgggaaaatcggaaaaggaactacaaagcctggttttttaacttgctaatcaacatagatgtctttcccattccctataaccctgatttagcagttccagtagtctctcattaaccgtttcatttctccaccaaccaactaaccaattcgaaagagaatggagttacctgaagatccaaaatgttgaaagtgttcccagcatcatctctagctaaggggagctcaggggcatgcctccactgtccatccacaatgaacctgtactcatagactcctgaaggtaacactttcatgatagtgaagtccttcccagatctctgcagccgacttctgatcaaaccccccaaaacaacaaacaacaaagatgagctcagatttgaaatgatgaaagaagccattaaatcaaaacaaacattcagctaaaaaccttgtcttccaattatcccatgatccctccacagcaatctccttgcctccatgacaccaagtgatcatcgtagggattccttgttcgttagaagcttcttcatacaacgaagatggcgattgcatccacgaaggattagggatatgaatttcatcaggtctttgaagtggaagcaccggaacctaaaaaaagacacaaactttaaaagctacagatctctctctttcatcacatcctccagattaagacatcgaatctgaaaccaaaacaaaaacctgaggagcaaacatgagaggagactgagtagctcgagggctatgaggaggagattgacccataagctcaggaggagcgacatggttaccatcagaagcagcagacatagcttcacgaggaacaaatctcagcgtcttcgtctttcaacagcagaagcgttgttactatttcggttttcttttggcgttcacgttacccatatcacacaaacaaaagcgataaaatctaatctcaatctcttccttattaaaaactctttttttttaccgcaatctgagaaaaaagaggaaacttctcaccagatctcaccacaaattcatcacttacacaacatactcgattacaaggacatgcccgggtttaaagattggtgctttttcccgtagaaattgatcaaaaagagtagtagggacggagaaattgagggcaaatttataaaaagccttcctgagagatcagaaactacaaacaaaaaaagcaggaaagagaaaacgaaaaaaaaaggaccaatctttgattcaactgaagcaagactctctactctcacacaaatttcttgctgttgttgtttgtcatagcatcaattgttgttgttcccataccactctccatcttcccccactcacattttctgctctctctttactttcatctctttgttttttctttattgcatttattaccctatagtttgatttggttgaatttaccccccaacaccccacatttggtctcagtctaatcagtggtaggcacatcaatggtcatcattctcaccaattattagatagatgttgtattcaattcattaactcactcgtttggtaatgctctatgtttcaaaagatgtaaactttgaagtggccagatttatgtttttgtggtcaatgtctttcttttcccaccagttgagtttatggctatatcaagttttctgttttggttgatatttgttttccaccactcaactattcctcatagatgatggaaacatataacaaccaagataagagatagagatagagaaggaaataatccttgagtacatatagagagagcctagcctagttagttaatatctgtgattcagagtggaagtgagattgtgatggtcttgcagtataagcctgtgctgacttgggaacacttatttcaaactaatcccaacaaaacaaacaataaaatttacatcataaagttgaatggtatgttgtttggtatataaaaaaagaggaagcaaatttaacatctttaccattcacttttgattggttcgtcttcagaatccagagacttttgttggtttggccgtatcaactagaaaaattgaacctcttatatgcgagaagtcgcttgtgttcttggaaccaacatttatcttttgtctcgtcaggtttacaaagcgcttcttggaagctgactcaacagcttgctgttaaataattacaaaggacctgtgaggaggaagaggtcaaaaagaagaaacagagaagatcaacaaagtttgacattgaaaaacatagatagttggtggtcagaagggctggattcattctttgccaaagcgtatcaacttcaccttcaggcttgttttgtgaatgttattccctaaaacagactttttttggtcttctgaatcttgttagttatgatgaatgaatcatagtatctcccttttcctctctctctcgaaatgtcaacttgttagagtggtcaccaactaagagttgacttatttacgccaacgaacttgtagatcctttcccatgtctctgtagccaacaaaaacttttatggagagagagaaatatcagatcgtggtcaaaaaaataaacactcttggaacaagtcgtgatctgaagcttctttacacgctaacgagaaaaaaagaataggtatattgctttggttcatcttcttctcttctctcaaaaaagtcaagactagattcatttgatgtctccattggatcggcaaatttatgttcgattcttgattttttttcttgatgccatatgtttagagggtttctgttgacattcaatggatttaaccttttttctgtttgtggtaggcatggacatagtgacttttgggagagatg

SEQ ID NO: 6615 - DNA, 3000 bp, Unknown
  misc_feature (1)..( 3000): cDNA_ID_2174042_gDNA_ID_1621098_Annot_ID_171174 3000 nt of promoter + ATG
cttgggaacacttatttcaaactaatcccaacaaaacaaacaataaaatttacatcataaagttgaatggtatgttgtttggtatataaaaaaagaggaagcaaatttaacatctttaccattcacttttgattggttcgtcttcagaatccagagacttttgttggtttggccgtatcaactagaaaaattgaacctcttatatgcgagaagtcgcttgtgttcttggaaccaacatttatcttttgtctcgtcaggtttacaaagcgcttcttggaagctgactcaacagcttgctgttaaataattacaaaggacctgtgaggaggaagaggtcaaaaagaagaaacagagaagatcaacaaagtttgacattgaaaaacatagatagttggtggtcagaagggctggattcattctttgccaaagcgtatcaacttcaccttcaggcttgttttgtgaatgttattccctaaaacagactttttttggtcttctgaatcttgttagttatgatgaatgaatcatagtatctcccttttcctctctctctcgaaatgtcaacttgttagagtggtcaccaactaagagttgacttatttacgccaacgaacttgtagatcctttcccatgtctctgtagccaacaaaaacttttatggagagagagaaatatcagatcgtggtcaaaaaaataaacactcttggaacaagtcgtgatctgaagcttctttacacgctaacgagaaaaaaagaataggtatattgctttggttcatcttcttctcttctctcaaaaaagtcaagactagattcatttgatgtctccattggatcggcaaatttatgttcgattcttgattttttttcttgatgccatatgtttagagggtttctgttgacattcaatggatttaaccttttttctgtttgtggtaggcatggacatagtgacttttgggagagatgatgatgcaatgtttagatggattaaagcacttagccttaattctgttgacttgttgtgatgctgatcctcccaaggttcgtcagaaccctaaggatgtggctagaggcactgtgtgtatgtgtctacccctacatttacttttactatttttatttgtcacaaccccaacaatggctttatgtaccaaatgcagttacagtgaatgagattgaagctctttacgaactgttcaagagcattagcaaaaacgggcttatcgacaaggtatgcaagaatccatagtcggacacgagtactatatctctctgttcctctacattcactaggatcctttcaaatatattgcaggaacaatttcaattggtactattcaaaatgaacacaacgagaagcctttttgctgatagggtaaattagatagacttgtaactcacttatatgagtttccttgctgtacactcatacttcaagctttgcaggtgtttgacttgtttgataccaagaatactgggattctagattttgaagcctttgctcgttcactttcggtctttcaccctaatgctaaatttgaggataagattgagtgtaagtggtcgagagagacttgaccttctttttttttgtcatatccaaaccttggatcaagctcatcttttgtctctgcagtctctttcaagctgtatgatctgaatcagcaaggttatataaagagacaggaggtgaagcaaatggttgtgcggactctagctgaatctggcatgaacctttctgatcatgtgattgagagcatcatagacaaggtgggtttggttgatctcctccattgacactaactaggattctcatatttaatctttgacaagagatgtaaaaactgattggtgtgtgtagacatttgaagaagctgatactaaactggacgggaagattgataaggaagagtggaggagtcttgtgttgcgccacccctctctgttacagaacatgagccttcaacatctcaagtaagctagccatgttatttgccttattatcttcttcgtgcgggactaacatgtttttgtatgttgtgttttgtgtagagacgtaacaaagacgtttccaaattttgtatttcacactatagtgacagacactcctagtgagctggatggatgatcagggatgtgaagaaagaccaaaaccctttacaagatcattcatacttgattcttatcttcttctccattactctattacaaccctcctctttatttttaataaatacgttctgaaagcagcattacctcacatgtttgtgtatccgcaaacttgttcggtttatcttatctgttggagtgtgcaaattgattcttttactcggcattagttttattttgttgcttcttctttctttctatctaaatttgttagttggagtaaaatccggacaaccatattttacagggaacccaaatggcgagatagttttaacatgagaaaggaaagattcatgtgaatgagaaactggttaacttgaatctcatagatcattgtatacttggacattttcccaagattagaacaaacaatactagatctctcgaaaatatcttcatcacagttgcaaagagccgtggagaacccaactcttgagctcaaaattgtatcagctagtgacgtcaaccatatcgaatatgtcacggacaaaatggacgtatacgccgtcgtttcaatcaaagacaacacaactcaacagcaacaagcggccaaaactcccattgatatataacggaggttctaatccgacttggaatcacacaccgttaagttctccgtcaacgagagagaagccacgaagcccaataattatgttaaccagtgtaacgttttttcacccacttaattttttggctgggtctgcctaacattctaggcacaagttaaagaggtgatcaatttttagaaattataaccctaatgctaacatgaatgatatataaaaaggccgcaatggtagactataatggcaacaactctgaaacaatg

SEQ ID NO: 6616 - DNA, 3000 bp, Unknown
  misc_feature (1)..( 3000): cDNA_ID_1814911_gDNA_ID_1621098_Annot_ID_55787 3000 nt of promoter + ATG
ccagactcataaaggagccccaagctcttgagattgatcgcagaggcagaactccaaggaacgaggcctagacaaccacaatcccacaaatgaacacattgagatttaagaactaatggccactgaagttgaagagaacaagagcaaaaagagttatactttgatatctgggtggaactcaagttcgattcccttctcccgtttctcttcgatctgtgtatcagccagtagaaaacgatgctaagaagaagtaccaaactctatgtaaagaaccttgccattgtggagttactacttactacattaccttcttgtcttcatagaggcggcgagcatgaagagctccaagcataaggatagtagccattgttgctccgggcacaagaaaagcattgcctacattgagtgaaacaatgattcaagctcaaaaccatagaatcgatctaattgcaatctgattggaacttcacaaagtgtttcctacagaacaaaatgctcaaaacttaaacttagaatcttttcaactgtaatctaactatgtaaaggagcttttcgaagcatatatatatatgaattacctttggaatctccggttccacctcctccggctccggctccggctccgctgctgccgccgagaggcgaagcacgagcaccggaataattcgaacggatattgttgaggaaagagctgaaggttcgacgttgactatgctgaaagcggcggagatatgaatagcgagccaaaaaatagacattttgaggaaaacgaggtttcatggcgtttttccggtggcagtgacaccgcttttgctctggggttttagggttgtttgttgactgtttgagtaaactaacaatttttcaacgacaggttaaacgacagcgtttactcctcttgacttgttgactacgttctttctgcgctgacattttatcccaattgggcctttttagctcttttatagcccaccatccttttttttggacagcagcccaccagacatttttttttgtcgaacccgaaacagagtagtttgccgtcgatgatcatcaacagtggagtgtaagcagagaaattacgccatagatcggagcgattttggagcatcgccgaagctaaagaggaattggaggtttctgtagatcggaaaacacttgttgttctctctctcgattcatcccaaagcaagattcttggatctgcctcttaagatcgatcggtgcttttgtatcctcaggtatgtgttgatacttgatcgtatctatctacagagattaatcgtatcgtagtctgatttggtagatttggaattgggaatcgagaagtttaaaaatggaggaggatagagagaatgcaaagagagtagtgtttgtaactgtaggaacaacgagtttcgatgctcttgtgaaagcagtggttagtcaaaatgttaaagacgaactgcagaagagaggatttactcatcttcttattcaaatgggtcgaggaatctttttcccaactaaggttcttcttaatcatcttctccactcacacttctttacttgattgagatttgattatgaaaattggtgtacacacacaagagatgttgttctactcttctcttggtgtacacacacaagagatgcttctcatttgtgttttttttttttccattactgatctcagtgtgatggagcggatggatcattagttgtggattacttcacattttcctcaagtatcgctgattatattcgatctgcatctcttgttattagtcacgctggttagttattgcaatagttgagcacttttacatttaatagaatcaaaaccagagacacattttcgaaatgctaggatataatgttgttgactctcactgatgtaggatctggaagtatatttgagacactgaaactagggaaaccattgattgtggtagtgaacgaagatctgatggacaatcatcaatgtgaattagctgaagcacttgaagagaggaagcacttgtactacactcgtcctcactcccttcatcaaaccttgacgaaaatggagttggggtctctggttcagtatactccaggtgatggaactcctgttgctcgcattatcgacaggttccttggattccctgatgattaaacacaacacatacatgaaaacaagtgtttagtttccaaatacaacataatatgcagtaactggtgcttttgccagtagacattgtgtcaaagatatccatcataatagcaaagcttttttctaacgtttgacagaggataatcaattttgctcagtctgtatcatttcaaacataataccaaagaatatttaataatcagatcatcttaattttattaacaaccaagtgtaaacacttagatatttgcagaaaataactactaataatctcttagaactggacatttatgttttgtatttaagttagaaataaatgctattttttattgttactgggatttggattgcaaaggggcctcgatatattccaaaaccagactgagatcaacaaaaaagcaaagcaaatataaaatttaggttcaaagcataattgtatagtctccaaaatttgcaaaaacaagtcatcctgagagagataaaagtgcaacaacatggaacctagaagatgataacagtaataataaaagcaaaaggcaatcaacggtaacgacgaaggctgagagagttgtttttcttccatgtagccctgcgagatggacggttcttgtggttgttgtgaccctttccgcggagacctctgttcttctttccctctgaggtaagtcctctgagctcacggtgcttgtgaactgggttgcagatccagttgattctcgggtcattacgcacagcattgtgtgctgggtcaaccaagatgatctcgtagtacttgtaggtcgaatcctattaaagaaaaatggacaagttaaaatatctaaccagaataatcacctaaacgaaagagtactgaaagaaggtagtaa

SEQ ID NO: 6617 - DNA, 3000 bp, Unknown
  misc_feature (1)..( 3000): cDNA_ID_1814907_gDNA_ID_1621098_Annot_ID_55788 3000 nt of promoter + ATG
aactggacacaaaccaagtttcgaagaatacatgcaaaacggtgtgatctcgagttctgtcccaacgatactgctccaccttttctccgtcctatccgaccacatctccgaccaaaccctaaccgatgattccaaaaaccactctgtcgtccggagctgtgccaccattctccgtctcgctaatgatcttgccacctcaacggtacacaatttactcgttaattagtttcttttattcttctagcccaaaacatgttcaacatatccaaatattattagtgatgaatgatatataccatttatttatgtttcacgttttgaaaaatgtgattcctttatattatttaccattcagaacattaaataatttccacgttttagaatatgatttagctatttataatacatattttaaaatatataaattcatttatttacaatagtcagcttttcagtgttaatcttgagatatcattaggttttaacactaatttgttgacaaaaaaaaactactcatagtttcatgtataaatgattcaatttttccccacacaaaaaaaataaaaataaaatcatgaaaacactaaattataatgactcacaggaggagatggcaagaggagattccccaaagtcggtccaatgttacatgtatgagacaagagcaagtgaggaagaggcacgtagacacatgcaaagtatgatcagcgactcttgggacattataaactccgatttaaaaacggcacacacttcttctcttcctcgtggttttctggcagccgccgcaaatcttaaccgcgtggtacagtgtatctaccggcacggtgatggccacggaagcccagaaaagaccaagaccgttgattatatccaatcagtactcttcaatcccgttccgttataggattgtaaatttgtatttgccgcattatagatatgtttacataattaaaaggtatttggtttgccggaaaaatgatcattttattttccaaactatttgtaattaacacaattattttttaattatatgtgcgcaaaattgatttttaatttgtcgttaacttaacaatttggtccaaaatttgatcaatgtttactagttgatatagaaacgttaaattactcgattaaaacctaataaactcaaaaaatcctaaaatttctcccaaattgaaagctaagtcattacttcgaataaaaaaaaaaaatcttcatctattcatcgtacttcgccaaaatatgcgaattcgattttattatttagctgaaattcatttattactattttctgcatggcaatgtttcgttaattttttactttcaattttattgtaattttaattcaaattataatatatgtacataatttaacaatgtgtttgataactttctctaaaattgttgtcatttattatttatacatagatatcaggaccggtttagagtgtgtgccaagtgccaatggtgcatttgtactgtttaagcaatcatggtcctattttctcaaaaatatataataaatgtccaaatccatacataagatataaacatgttttttataattagatacagggttctatttttctctgagtcggccctgatagatacatactatcagattaggcagaggtatggactatggagtaatttatgggggcacatccatccgttggtatgatcaaaatttagtataagtcttcagaaagtattttttagatgggatgaatttgcctctctattatcccaagattgaatccccatttccttcagaagcagtaaatacaaattaaactactgagctacaaattcgcgtaaagctacatgtgtatttttaatctcaaagttgctgtaattatgaaatgtgaacgaaatagaagtgacaggagcttgagtgccccatgagataagaacttatagatgtatattaatttaaactgtactgtctaaacctagacaacgccgtgacgtctttgcccacatgtgattattcgttaccacctctcttagtgtggtccaacaaaattggcctctcagttttcattgaaggcagggatagagatatacaggtagtcacatggacaccgaatcgatatttattccttggaatttcattaaggtttttcgaaccaagacaagacaagctatgcatgaaaccatttgccatgccattaacgtggactaagggtggacactgatctatctcgtacttgttattaataaaaacaaccgatttgtttttgtttttgttattatatctcctactttttgttataccatgcatgtccacacgtttttttcaatttgttacatgtccacaactttcacaaatatttttaccaaaaaaacaaaaaaaagtttgacaaatatctttagattttttttttgggcaattagtgacaaagcaagggacgttgaaagcaagaaacgtaaatgtttggatatcacaccacaccaatatgttttagccattacttctccaagtttttttgttgtgtgggaataatacttctccaagatatttaagaaaacgcaaatgcatggtcattgaattatatagcgagaaaacgtcaaaaactaaactgattaaaacagatattcttttagtaaaacagaaaaaataaaaatatcttcatatatataacctgtggtccgagacccaaaccttaaatcagtataaaatatcatagcggagtctaaagaagagttcatccaattatttaactctttagtgtaatcattagcaacgcaaagaaatgcctaaacgacaggctcaacggcgtttcactcgcaagactgactcgaaaacaccatcccagcctctggtatcccgtcgctctgcaaactatcaaccgtctctttggcagcacgaatatctcctctcgctcggtaatacatatgtggtacgtataagaatgtacatgacgttgtattaaataaaattatgtgacatatattactatttaggaaattatatatagtgataatatttatatc

SEQ ID NO: 6618 - DNA, 3000 bp, Unknown
  misc_feature (1)..( 3000): cDNA_ID_1814899_gDNA_ID_1621098_Annot_ID_55790 3000 nt of promoter + ATG
ttattttggttgtctcatgttataaacttttgagtttgactgttttcatccatcatgctgggggtgatttgtgataactagaaagtttttgtcttttattggaaaaacaaaaaaagatgatttgtcaatttcttgcctcaggtttccaccggtccgggccagagattatttccacgagcgattcagtcaaaccctcgcctcgtactccggttccgactaaaatatatgagaactgagaagctccaggttttctaaataagacatgtgtcaaatgtttgagtttcacttttgcgtggacatgaaatagctattataaaccaaaaggtgataaaacacttaaaacagtataatgtaattaggtgtattttcgattgataaatgtattaattgtagactatgatcccgtataaatttcaaatagtgtgttcatgacttgtcttgcttttcataagaattcctcaagtgtgatgaaatgccactatcaatgtatgaacattcccagctaattgataatggatatcgaacaatgattactctttgttgaagctggatgatgtacaaggagcagagaagatatatgaagagtggaaaccggaaggaccaaagctggatatgagcataccgagtttgctgaaggcatggaaatgaagattcaccaaatggtaaagtctgttagaaagaagaggtatgagatgcattttaagaagataaaagaacgtttgatctctataaggggggttgatttttggcatgggattaaaggttgagcaaatagtaaagtcgattagacaaaagaagttgaaagaacctttgaaattactggaggcgagggaagcaaacgttatggaaatggtaatgttcattaagaagaagaggtttgggatgcatttacacaaagttaaaagactctttgatcaaacttgggcagattattatggtggtggggttgattgttgcagttttagtaatcattgttggtggtctagtactcgatgtagcttggaatgagttgctcattcagcagcatctctccccacatcatatttcgaggtgcggattttaagcgacaatcctatcttatattatttttgttcgttcgtaaataggtttgagttttcacttgtcgccgagatattagttcatctatttcacttttctccgaaaaagtttctgtaacaaaagtcaaaagaaaatacatatatacaaagatatgagttctccagacaattttagtattttgttcgtatgatgatatggatgatattcaccttatttagggttgccacgttacgtttattacagttactgttgcttaaccatcggttacgattataatttttaatcgtaaccttaccactacatatagggtaaaataattactgttaattacgataataattatttgatgattacaatacggttaatattagaggcgagatcttacaaattaccttacttttaatactacttttattaaaatgaaaaagtatgttataaaccaattttcttcatttcgagcagtatacattacaacatatttagtggagaaaatacctgttttctaatgtagattttttcattgacggtatcaattatttttctgaaaatctctgtctgaacattcaatatatatttttgcattatatgcagttacaatgatattgttaaagtttttaactgcgattgatagtgcggttaactgttcggttaccatatagttaactaacggttttgatacatttacaaaaaaaattttttaaccgaactaatttatttttacagttaactgtttttatagttaaaagttacaaaattttaccagtttatatggttacggttgagaaactgtccgattaaaatcggaaatcacggttattgattagcttttggtcatgccttattgcttatgaccaatgtgggcttaatctgtgatgtgagattgaatgagcccattaaaccccacttctaaattggcaaatattttatattttaatttccaccaaattcataattgcaagcaccgtcgtatggtccatattgttggaatctcatctttgatcaatcctggcacaagagaaataagtgagagtataaagagggttagtagttgcagaaggatgtaacgaagaagagaatcaaagagagaagaagaagaagaagtaacgaagaggatgaagacgaaaagaaagaaggaaaaaggacattgggccataaattgtctaaagcccaattacagtgggtttcggtagttaaggtaaagtttagttaatgttttaagtggacttgagttgtgtcttaattaggtcaaaactgaagtagtatatatattccgatgtaatgatcttatcaattaaggaaagtaaggaagttaaaaaggcttaagcgggcaaggagaatttcaacacatatcagtcagaacgatcagaggcagagcaaattcaatttcgaaacagtgactattacgagaagcgaaatggatacgtcgcttcttcttccgatcatcgatctttcttcgccggaaaaaatctccactactcaattgattcgtcaggttcgtctcctgcttctactagtgtagaaacattgcttctcctgcttctactagtgataggattttagggaattcaattttcattttcacttgttttttcgccgataggtaagtgacgatgatgatagaactagtacctgtagcatcaattgacgaagattggtttatcttttttttttttgttgaatcgctctaattggcgttttaagattttgagtatctcaatttatggtctgtgttatttatttggaggaggtctttgtgtatagacaatctttgtttgagatatgtctctatgattgctggtgaactgtttgcttttgttacgtatgtaaggcagtcttgaacatggattcttctatgtcaggatcatgatccggaagaattaattggaaggggtttttaaggagagcaaaggcttctttaatctcccattagaggaaaagatg

SEQ ID NO: 6619 - DNA, 3000 bp, Unknown; identical to SEQ ID NO: 6598
  misc_feature (1)..( 3000): cDNA_ID_1808227_gDNA_ID_1621098_Annot_ID_55791 3000 nt of promoter + ATG

SEQ ID NO: 6620 - DNA, 3000 bp, Unknown
  misc_feature (1)..( 3000): cDNA_ID_2993912_gDNA_ID_1621099_Annot_ID_55792 3000 nt of promoter + ATG
cttctatttaaaaaaaatatagacaaaagtttttaaagtaaatttaagtaaactaataagatctacgaattgtgaaggtttatagaattaaatctcaaaattaatttataatcttttggataatttatactttatttaatagagttacatcggagttttcttcgaatatgatataaaacttctaacaatatttctatataaattttgcaattttaaactaccaacttcataataataaagtatcggaagatacatcttttcctaataatttaacaaaacaaagtttactcaaatctcaactacacacgttttcgaatttaacattgcgtatcaaattcgtcgaatcgtcaactaattctagagtaaacaagatcattggcaatactcttaaggaaaaatggatccatttgattatgttacaagtgataagagttttgaactcgttttgtgtcaaatgttccggtctccaatatgtaaaagtggaaggtttctcatgcttctcttttgtttgttccaatcttcttcctagtattgccatggaaaacatcaaccatatcgtcaaaatgacccgttaaataactaaatattgtaaaaactatttttaagttttcctttcatttcatggtaacaaatatatattttccagttatttctgtttaaagaaagtttcatttgagatctgattggtgggaaatagaagaaaaaaaactcaatctgattttaaacctttaaaagcataattcggttgatttttattttattttattctgattgatagaaactggaaagtaagatgaattggacattaaaaaaaaaaaaaatccctttaaatttgagctaattatagcaactagtcagatccttcttttttttctttgaacagaaaaagaatcgccaaaaaaagaaaaagatgtacttatttagcgaaaatatttttcgtagtaaaaaaacttctttcaatatctttgcttgaatgtgaccatttctattgcacatacaaaaaaacgactataaaaaggacccacagtgattatgaaaatcagattgacgaaaagtttgtgtgtctgattccaatcatattgatccaattcattcatcatattcgatggttgtcaaagcatatagctggattaagtggggcacaacactgaaaacgtttctcaaccgtatgatgtcatttcagcctttggttttctcaacgtttaatcggtgaccgtcaatttcttttcaatctctataatcatttcttcttttggcgtgtcactgggaccttcactgtcaatgctgaattaatctcctttaaggatttgaaggcaagaaaaatcttgttgcaactaataaaaggaatcgattttgatgctcattaatcgacctttatgaccaaaatgggtctatatgaaataattatatgatttgacaagtaaccatttgatttacaaattattcaacgatttagcattacaaaaacatctaaccatgcttaatgtatgatgttattcattttaaaaagtcgaatgaaacccatgtttatctcaatgcatgatttaataattttattatacatgcacataattctacatttttaattaattttattagtttaataataataattaattttctttttttacacttgttataggtgagaaatgaaagttatcataatacaaaacatcagtttttataaaaccaaataaaactcaaaaatcattcagacaaataagtttatggacttatggtatatgatgatactctctcaacatcctcattaacatcatcactattaagttaacaaaaagaaaaagaaaacatcattataagttattaataagtttaaatagtagtattttatattctggtacaatgtactgtttttggtcattaagtggttcaacgacaaaagtaaaactcatgcggtcgacccatgcgttagaagaagaaaatctgaaaagaagtttgaattctttaattttttcataaaaagaagtttgaattcaattcaaccgtttttgtttagttcttctttaattaactttatcactaatgtttaaaagtaaaaggtttttaaagtgtgcaacaagcgtgactctttggcctttagagtcatcaagaagggtaatcattttttttactctttctcgacaatagcaatcaaattatcattcccacttttaataatctcataaaataaagtcaatcatagttaaaatttgataaattccatggaaatgataaaaatttgattttactattgttggatgtgcaattgttcatggtaacttactaatttatatgctttattagttgcagatagtgatatatatcgaaaaatgaaagatctaattccaataattgtcaaagaggatttctaaatttctgtttgactaggtcatatattctcacgactcaacgatctaaccaatcacctacaacagaaaatttggttgaaataaaacgaaaagtgataagtccaaatgtttaaaacaaaaaaaaagtaaacaaaaggcaaaataagataactacgattagattttgttctcgccttatgaatatcctaaaaattatctattagtgatagtttgataatcatctttgactgagaaaattgatgtcacataaacattaatatagtatcaacattaatcattaatgatgcgactataattattattttatcacaatttcttagatttgataatttgtttaggtttgagagagttatatagagggggacaaagaagcaaagtttgtgattataaaattatttccattgaactaaagttttcaatagtttattcttgactttaataataataactattttgcccccagctagtcacatactcatgattgcaaaatctctctctctctctgcctctctatatattaacctttcttcttcctttactttctcatcttctatctctcaaaagaaaagcagacaactttatttgcaaaaacagagtttttttttcttatcttgagaaagttcaacagaag

SEQ ID NO: 6621 - DNA, 3000 bp, Unknown
  misc_feature (1)..( 3000): cDNA_ID_1815129_gDNA_ID_1621099_Annot_ID_55794 3000 nt of promoter + ATG
cgtttttgtgaatttgttgctgaaatttctggacatttagctagggttttgagtttgaatttctctcttaatattctgtagcaggaagatggatactccgattcaacatctcccatttccggtgagtcattaataactaggtttagttaatatctctcttaagcggccttttgttgcagtttctaggttttttctaacattttttattttgggtatttgttacagaaccaccagatattacgaattggtttcccagttatgtatatgaatcgttaccattgtcttcttcaatcaatgaaattgaaatcgaagtagatgtggtcaacaaagcaaatcctggtggtgttattgatgaatcacttccttctggtagactctcttttggatgattattgtgaatgtatgtgctattgatggatttgtttgtaactttaatctggtttggtccatttccttctcagaacctcctgatttaggtaaatggttttcgagctatgtctatgaatcgccgttgctggatacaagtgatggacttgaattgtctgttcctggagaaagtgaatgtgtaaaggagacccaaacagaaaatgagtcaccaaaaattgaaggaaatgatgtttgtccgaggttattagagcaagaacttgtctcttctacaaaggtattgcttcctatgccgtagttacatcagtaaattttcttaactcttatgcctgctcatgaattagtctccttgcaggttacagatttctctgagtcgcagtctgttctttcgggtgagtaaaaggcacttgtttgtatatgttagtgatgtttgctttcttttaatgtgttattaaagtgactcaggtttatagttagaacggccagagctgaatcttacatgttttgtttcttgttctatcagagcctcctgatctcagaaactggttttcaagctatgagtatcaatctcctcagctttcagacattcaagaatttggatttttatattctgagaaagatgagttaatcattgaggagagtgacactgaggagggaattagttccggtatatttcgaaaaattaagagcaggcaagagactgttggtcttggcaggttagattcaaatgactacaaggaaaacatagccacagacacagtaagttatgttcttgtcattactgcactttaaagtctacaagcttgccacaacatccgtagtctaaagaaagaaacttgtgtggatcactattaaatgagatgaaatccagttttcacttttcagttattttcaatggcacaattttgtgttgactttagattctgttagttcccactgactctttctcgattctacattttaggccaaggaggtttctttagacaatgcagtttcagaccaaaaaatggaaaagaggtcatcagttagattgttaaatgcctcaaagaaagatgtgaaacaagaatcaagcttcaagcaggaaccattattatgtgaactacaagaagaagcaaggtttagccccagagtttccagatacaacccaaaactcaaatcaccttcgaagaacgacacttctttacatgagttgagaccaatacatattcaagaatccatctccatgaactccaacagacaaaagtctcctccaatagaacaagaatcatatgacaaggaaaatgttcacggacaaagcaatcaaactggatttgtgacgatgaaaaaggcaagtttcagagaagcaagagaccaatgttccctgaagaaaccaaatacagaagttctggtgaagtgttcgagtagtaaagagttgaagacaaaagctggggaggataacacagaagaaagagagaaaaagagaagagttttgggagaaatgtcaaatcaactgtcctccgttgctaaagagatcgcaggaaaatggcgctgcccgcaaaagaacaaaaggaagatagttccaccattgaagcagcttcgacttgacgcatggatacacaaagtctgagtctttgagtagtctactcttcaccaacaatgtaatttgcattctttcccctctcttttgtatatcatctacatgttaatgaataatgaagttgagctgatatctaaaccgatattttttagagtgaagaaaccccgtgttcactaaatggaaccggaattgaaaatgagcctagatttggaaccggttatgtcccggtacagcatttatgtttcagataacaaagaagagttttttcggacagagcaaatcttttaaagcaaaaaggaacgctttttatttttaataatcgaaacttgggtcagagacggtgaagatgagcttcgtcaagtatctccgccgagacaatttgctccagttagctggaaaaccatctcttagccgaaattacatactccagacctgtcggactctcatcattgaaacctctccacctgaatttgtcaagcttaatcgtctatctggttccgattccggtaatttcacatttccttaagagtgatctatagcagttcgctcagtctcttagggtcgtttataccttgattttgttgtttaattgtgttcgactttgcaaactgattcttgctttactgatgatttgttagtttttttttcactggatttgcttctctcagtcatgtcatttttctcttttctttagttacttgcatggctttaaatttgttctgatcttgaagtgttttgcacattttgtttaagaacatgagttttttttatcaggggatttgaaaatgtgtcaccgtggttcttaatatacttgcttgtttactaatgactcaaactcaaaacagtatcatctgatcaatttatgatcttttaatgttttgaagctttttgaatgtacatcaacatctgttatcaacgtgtttgaacaaaccgatgctaagggaacgttacaataatgctgcttgtgtttatgatttaaaggtataatcgaggtcaatctagataggcctgtcaccaaaaatgctattaataaggagatg

SEQ ID NO: 6622 - DNA, 3000 bp, Unknown
  misc_feature (1)..( 3000): cDNA_ID_1815121_gDNA_ID_1621099_Annot_ID_55798 3000 nt of promoter + ATG
agtctcatcacacaattgtttgcaatgcggttctaacatttatccacttcatattttttttatataaaaattgtttatacgtttccaacacgtaaacacttctcattgtacattttcttttttttttttgctataatgactgaaaccatgcatgaaaagtcttctaaatagaatcgaactaaaagaaaaattacacttaaaaaaacaaattgcaatattttttggttttatttggtttaaaactatgtatgatctagaaaaaaaatattatgagcctaaagtgaattattctgattctatataaatacaaacggtaagtattaagttagaaaactaaatagtcttatgtatacaaatctcttcataattcattaaatatattgtaaattgtaatgagtattttcatatacatagactgatagaagcactttatcgttaaaattgcaaaataaaagtagttataagtgggcataaatgaccaaaatttgctaaaatagattgtttttttttttttttttttggtaggggacactggacagggagataatccaataatgaaatataaacttttgtttagatatgccgtcggtttaagtattctgataatcaccaccgtttttttgcctattccaaatttccacacattttattttcatttcttaatatttatttccttatcatttctttctctcaccaaccaacaagttctcctttctacccatttcgtctccttcattttgacgttttctttagatctgttaataatcccatccatggcttggtctagtcactagtggtgttatctctctgtgtggaataaaaagcaaggttttttaatcacttggattgttttaagatatggcaactttgaacccttttgatttgttggatgatgatgctgaggatccaagccagctcgctgttgccatcgagaagattgataagtccaagaaatctggacaggtttcgagcttgcctgctaagtcagctcctaagcttccatcgaagccacttcctcctgctcaagccggtgaggtttcttctcataaatcaatatttaatcagaaaaattcgatctttattactggagtaagctgtctgtgttattgtttggattctcttgattattcatggagttgtgttttgtcggttgaatgattgagattagtgtatgattagttttgatgctgttgactagtgagagaggcaaggagtgatgctccacgtggtggtggaggccgtggaggatttaaccgtggtcgtggtggttacaaccgtgatgatggtaacaatggatattcagggggatacactaaaccctcaggtgaaggagatgtttcaaagtcttcttacgagaggcgtggcggtggtggtgctcctcgtggttccttccgtggtgaaggtggtggacctggtggtggtcgtcgtggtggattcagcaatgagggtggtgatggggaacgtcctcgaagggcctttgagcgtcgtagtggaactggcagagggtcagtcttattctgttgttgcataatctgccattgaaatgactgtgtcaatctcataagttggagtttatcttttggataggagtgacttcaagcgtgacggatctggtcgtgggaattggggaactccaggggaagagatagctgcgtatgtaattgtttatggtttattgcatttgtttaaaaaagtatgtattaatgtgattgtgattgggaatttggactaaaagaagttttctctggattttaagtgagactgaagcagtagctggtgttgagactgagaaggatgttggagagaagccagctgttgatgatgtagctgctgatgctaacaaggaggatactgttgttgaggagaaagagcctgaggataaggtaaacagagaatagaatagaaatgctaggctcctctttactatactggtatcagttttttttattttcacttattgtttattgacttgtgtttctacaggaaatgactcttgatgagtatgagaaaatactcgaggagaagaaaaaggcacttcaatcattaactacctctgagaggaaagttgatacgaaagtgtttgaatcaatgcaacaactgtcaaacaagaagtctaatgatgaaatcttcatcaagctggtaagacatatcatgtatcatttcttcattgtcgtctattaacttgcgtcaatgattctaaacctttcctttgacctatttcccagggttctgataaggacaaacgcaaagatgacaaagaagagaaggctaagaaggtttaaatcattgtctgaattgaaacatattgtagaaatcaataagtttgcttattgatgtgtgttcctgattgtaaacaggctgtgagcatcaatgagtttctgaagccagcagagggtgggaactactaccgaggaggtcgtggtggccgtggacgtggtggtcgtggccgtggaggtgtttctagtggcgaatctggtggttaccgtaatgaagctgcaccggcaattggagatgctgctcagttcccatctcttgggggcaagtaagatccatccatgataacgtccacactcgtgcatcctcctttaggattttgtgcgaggatttactgtttactggtctctcgttgtcagatgtaaataattaggtgtcgtcgtcagtttttagattttatgcaaaactttacacttgttggtgttctttacttttgaaacagtacactcttcttaattttaccattttactcgttttgtgtttgttgttttcttatttatgaaacatgttttgagacggacatatctaatgttatcgggtttgagtctttactctgtctcctcttttctcattcgtgatcgtgttcatagatgttttagaatcagtaataatttgacatgagttatgacttatgaatgattgtcgaataacgtggttgctattacatataccaatgattctgtaggatttaaacatttttttgtgttctgtcgtaaaccatgtaaa

SEQ ID NO: 6623 - DNA, 3000 bp, Unknown
  misc_feature (1)..( 3000): cDNA_ID_3090557_gDNA_ID_1621099_Annot_ID_171311 3000 nt of promoter + ATG
ggaattgccaaaggcaggtagccaaaggccctcgcatctcatactgcatctgaagagttttcggaagtcagagagttttgctcaggttataaaatgcagcgtgccagaagacttaaatggactagaacctcaagctgtccgaatctgttcagtagtgcgcaaaatgtggaaagcatatcagtctaacatgaaaaatcttgtgctcaaggttattgctatcactattctcattatagttatagaattgataatttggctatgattcaagtgaaatttacatttgaaattactactcccaagatgctttagtcttctattttatagtaaaaatataatgagaaaacatgttttaagttttctggtttatattccacataacttactaaccagtgtaaattatgcaaatattgaagctcataccagtgcaacacacctaatgaattttctttcttctcattgcaggttccttcaagccagagacatgtgtattttgcttggaatgaggctgatggaagagactcaaaaacatacaaaaacaaagctattattaaatcgagagaactttcttcttcaagctctgtctcagatgataaaaagcttgtcaaacatagtatcaacttctcaaaaatctggagtagtgagcgagaatccaaaggtcgatgttctttgtgtaaaaagcaggtaagttcctttccatcccaatctatatctttgagcttagaaaggggtttccctgttagtacagaaaatttctgattttcttgccttctagattttatttcttttgatgacactcgaaaattttgggttctagcctaagctaagaggtggagaccaggatcaaaatcttaaacccttgtcatcaatacatgtcaataagaatccttgatttataactttatgagacgaaacatgtataattcaccccccacatcaaccgttttgaggttttctttacaattatttcctttttggctttcaggattctgaagatggaggagtttgcactatctggagacccagttgtccagcggggtaagtatagccaaaagagatttaaaattccaaaaatctagtttattatttcttaacttggttatttagtaccctaatggtgatgctgtagctgcattgagccgttgaaacttaagcagtttcgtcattgttgtttgccagattcgtgtcagtgggtgatgtagctcacgtgggtagccatcccccaaatgttgctgctgtctacaataacaccaatggagtgtttgcacttcctgtgggttatgacctggtaagtatctctctaacattttatttcaaccgtaatccgtggcatttaaccgcacagtattttcaacctggaactcatcgtatgcattaagtgctcaagcatccaaattttgagcaaacgcaaactctatcaaacctgagtttttagcatgatacatatatgtttattcacttgtcaggtgtggaggaattgcttagatgattacataagtcctgtatcgatctggcatccacgggctcctgagggattcgtctctcctggatgtgttgcagtggctggtttcatcgagccagagctcaacacagtgtattgcatgccaacgtctttggccgagcagactgagtttgaagaacagaaggtttggtctgcacctgactcgtacccatgggcttgtcaaatttaccaagttcgaagtgatgcactccactttatggctctgcgacagaccaaagaggactctgattggaaagcaattagagttcgagatgattacaggtccatagaatctgaatcgggaaagaatttgcgtttagaatgaaacttttcacttctttttttttgggcttttgggaaactattacttcatgcaacgaagtagacttgcaaacaaagagagtgtttttttgttggttttttgtttggcgtgaaaagagagcttttatgttgatattttttgtacatttgtggataaaattacttgtgctttctaggaaggatgtatctgtacaagttattattattacagaaatttgtcttagtcttaataataataagattgttagaagattttaatttataattaagaaaacagaagactatttctaatttctttttattgttttggtatattttagctcacatctttttttaatcattatatgtaaaaaagcttgaaccaagactagttggtaacatttcagagctctctactgattgagtaatttcgattactgaacagaagtatcaatatcgtgtggtgctctacacaacacaattgcgtctaatattataagattgttaggttgatttttaattattacatgttgattgttgataaagtttaaaagcctttagttgtggcgggaacgtgcaaagcttaatacacgaccaatgcactactagagcttaacgcgctactttggcgagtcaattacatcgctcaaatttacatcttgagagtaaacggcccgcgtggacggaattttaggatcaagatttacagagacgagtcttatgattcattgagtcaactctcttgcatctaaaatgagaaaacaatattttagattttgtttttgattatagaaagcaggttgatcactatgtatatatatttctctatattaccctccactaaaataactgaaaagaatagtcaattttggccataaccttctttttttaactaaaatttacgaatcaactattatttgtcggtaggagcgaaaaaccgttatgagagcatagtgctactagtggatcggtaaacaataaatgccgtaataaaaatctaaacgtcacgcgcgtgatgaaaaaacaggaagtaaatcgtcgacgtcgttattcaactaccatttctggatcacaactcccatacactcttttaaatcaaaacaaaatatctctttcctgttagagacaatggacggattgatcagaggtttggtcgactcgacgtggctatcggaggaaaccaacgccgcggcgagacgatg

SEQ ID NO: 6624 - DNA, 3000 bp, Unknown
  misc_feature (1)..( 3000): cDNA_ID_2990093_gDNA_ID_1621099_Annot_ID_171310 3000 nt of promoter + ATG
tgggtccatacaatgtcaatgtcaaatgttaccgacttggcaacaaccgtatcgcgctcagctttccccattgcagaatcttgaaacctctcttgatggctctggtcacaaaatatctgccccttgcgcagtactgtattgaattattgtgattgtcagatctttctgtctacatgtgtagactagaaatatcttcatgtgatatttatgggaaaccatgtcttgtcctttctgaaaatgatacaacataagaagagatgtaagagaaaatatcttctaataatttttatttcaaagagatatttaatttgttttggttacagataaactcgttagcttatatatctacacttatgttcacttatcacatcacaaagcaggaaaatatcttagcgacaatgacaaaccaaagctcaactgttactacacttgaatttctttagttttacaattaagtctagacgatgatactctttgaccattgagataaccacaaaaccaaatcagtttgccatatacagtctaccttcttgcattcacaacacagaaatatttctacacacgcgttaaacaagactacaaaatattagcttggccttaacccaattgaaaaaaaaaaagcacaatcactaagccctaacaaatttacacatctcatccatgaatgaataccaccaagttttaccattgtttcatagctcacaagtcacacgagatcatacgatttctaacccaaatcctagatttctaactataatgacagaaaatattgttcagaagccttagttagatatgttaaccaaattggtacaagcaacatttaaagaacagagaaagaaaaaggaaccaagaaaataaaaaagatgtgccagagattgggttctagaatatcctagatttttacaatgatgaaatctaaagccaaaacaaagaagcactaatcaaatgtagtcgaccaaataagtgaggagggtaaaaaagagaagtggggagggtaagcaagtaggttacgtggaaggaagatatcaacgcacaaaaagagaaacactcaacgttaagggaccaaccacaaatcttggatttttgctgatgcagtgtgtgaaaacaggtccacacgctttgtacttttttcatcatcggtctacaataaagctcaagtctttccatggacagagataagcaagaaaaagtattaacattgttcacctcaaaataatttaggaaaatgacaatgagatttttacctcaaaagccaaaatcaacatctacccattctttcactcgtcacaatcatgagtttcttacaatgcttaccttagagtttagagacatattctcacaaaaaaagcttgtgtctatttcaaattcttgaccgtagatgtcacaacatgcatatatcattgaaaacagagcaacacaggaaaccaagcatatgtatctagatatacttagcaagacataactatagtctttgaatcaacatagggattaatgatagagaatgaggaagctcaagattttatactcagtttcttacaaaacaaatttctctctaactgcaaaaacaccaattaggatttgaagagcgtacctgtttgagtcaatgtccaatgtcgtccccccgccttctacatttcttagcctgctgaataaaagcacaagccaaaatgagaaggtgccaaaggcgataaggatcaatttctaccattcaaaaaactaatggtgagaattagaaacgagagaaaactacttgttgaggaaatagccaaaagcgcaatcttcgtcacctgaataaagaccaaaccgtcactttcaatgagtcagcaagaaaaagagagagagagagagagagattctctataacatttgagtcgacatggattctaatgcatcaaaagtcatctccaataaacaaacacttgaaactcacatggctaatagaacaagatcaaagccttaagtattaagcattacagacactactggctaacttttgacacatgttcttaagtaacatagtatcaatatccgtgaatcacatcgaacacacacaacaagggcttaatgcatcaaagtcctgttatttccatataacaacatatttcatttacaaacagaatgcagcattcaggcagtccaaatggaaaggttgacaaaaaaatataatcttgtaactctacatatatggcagaatgtaataaccaggcaagaaaaaaacagaataaacagatcaatgagtatgatataaaaaaaagtcacaaagaatgtgccacagtgaacaagagggccatgagaagaaattttcaaagaaaatattagcattgttagaattttttgggtcaatggatctgtcagctgcttagttggaaaacacaaatcttacaggaaggaaagtccaagaaaaagaaaataagcaaagttaatagccaccacaagaaatttcatacagaaataattaaatcgttgcacttatcttcttattcaaactaaaatcaagagaacttaataattttcagccacacgaaccatgtgttcaaagccaaaggtgagaagccaaaattatcagcttatctccattaacaagggaaaagcaagactagatttaagagttctctgtaactaaaaactgcaggagtgagtaagtaaataattcaccaacaggaaaacaaaactcaattatctatagctgaatacacatgtaaatgagaatttattaactaaaacatcttcctttgtaactgatgtgacatttacaatttttcattttgaggtgtaagaaccgtgtgacaagtgaaaaggttaaaataagcaacctttgtgatattttctctccactttttgaaattgggtctccaaaccacagccaatcaatattctttataaatacaaacacacaaacagcatctttctctcaaacacaaacatatcttctatcaaacaccaacagctctattctctacctcatttctcatcataacaaagagagagaaaaaaactatg

SEQ ID NO: 6625 - DNA, 3000 bp, Unknown
  misc_feature (1)..( 3000): cDNA_ID_3090561_gDNA_ID_1621099_Annot_ID_171308 3000 nt of promoter + ATG
tcgcggttcggaattggtgttttttcctcggacttaggatggatgctaatctcttatgcttagattgtcgtagtttttttttttttgttatagattcggtcattttggcttttttgtttcttctgtattcgttgttgcaattagaaaattttcgaaaattttggcaggtcatgctcaatctaaaaccacgttggaaattgagttccatagtgatggcaatgcaatgtttggttgtgaagctactaaatggttttatttgaaggagattgcaatttacgtgtgggctttatgatcaataagagggcaatggactttggttttcactgctggataattagtgaagactttgaagttggatgatgaaaaatgtgatttgcgaatgtcaaattcacgtggatctctcgagattcaaaccaagcggcaaacatgcatgaaagaaaattctgaatttctgaacatgcgaacgtctcaacgcatttcgattgtggtttgttttagtttatttatttttaattcaacttttttttctttgttgtaaaaacatgcacatcaatttcatcaaccaactacaattttattaaaattccttttttatttttttcaatcactcagtgttaaaacacttcatcgaatctaatttctttttattttgggaaactacattgaatgatgatctttataattagccacaaatcattgtcaccgatcaccatgacaccatatatagctttaattttgtttgttctgtaccgcttgtttctgttttgtatactaaattactaaccacaatatatttccaaatccactattttatttgtttctgaaagcaaacacttagtaatatgattggctaaaacgctcctataattgtcaagaaaaggggaatgtattgcgacactaaattaatttatccacaagaactatgaccacacaactcgaatacaaaatcaacttgttcatttatgtttatcttgtgtgtaattttcaatctttatccttatatatatatatatatatgggaaaaggaactattgaatttgaagcaaactgttgagcaacacatttaattaagtaagttttacagagttattttgatcatcttaagaatgatagatataattagttaaccgaatttaatcactttaatttaatcattattacgttgtatactttgtatttggctatttgctttgttcgttccaaaactttagtatattcaccacacttcttcaccttatctcgttagttttgctttattacctttcctctttctattttttttttattgttagggtcaaagctttgttaccctttttatcattcgatatttgtatatggcctttgtttgatatagataacaattatctacattggaaagatgcgtttgcgagcccataaaaattggatagagacttgcacttttggatgatatctaaattatagaaattagaaagtcaagttgccaaaaacttatccctcaaattccattggatcggtatcgaacggtgtcgtttatatcatctcgaggcaatgctgatattagccgctttctcgctgacacgtgtccagagattagcagctcaaagaatctagtgactcatctttcctcttatcatctcgttattacattactaccctttgcttgctaatgtttctttacgtgcactggaagaaaaatagaattatcaaaccaaacgactaatgactaatctatgatgcatctaaataattacaggacacaaagttgaatattctgatttaacttaaggaggtttattattattttaattaaaaattgatcagatgactctgtctcgtctttcaaaactattacttgttgataatgatttttctctatgactaattcaaacattttctatattaaattcatactttttaagttaattactcattagggcctattattagttatatataatgaatgttttaaatatagggagttgaaattccatcttaatcatagttggatttctttagttaggtgagtttatgagtgagttttttttttttttttttttttttttttgtctttcagtttggttgttaaattgttaattatgattaaaacgattattatctaaaaatattatttattatactatattggatgtatgacctcacttcttaaattaatccaattgctacacggcaagaatcaaacaaaaataatatgtgaaaaacttattgttgtgagatcatacttaactatatagaaaagaaaatgttagaatcaaataatttaagaggataaaaagagtagttgaaataattgattgtcgatatgcgaccagtacctaaaaatattagaattatgcatgctaaatattgtctgacttgaaggttattagtagtaatagattttatgtgatatgtttgcttaaaacaatatcattaataagaattaaaatcatgacaagggtaacgtttgccacgctagtggcagacacgtagaattaaaccgtacaagcataaatccttgtattagtctcaaaaccatccgggtaaacataataaaagttcattttcttgccatttctacaagcaattgacaccattattacctagaatagtactatttaatatgagagtttaaaagacccggaattttaaattttgatgtacggcattaatgcattgaatcgtaaagtatattactcttgattattaaactaaaagtgagtcatttggtatcttaatgacgagagagatttaactaatctcacattaaactaagcttaaggatcaagtgggggcaagcgaatggcataacagtaaataaaacgaaacacgagggctttatttgacaatgcctctaccttagcttcaaaactgagctcgttcttcatcatttcctgaaaactagaaaacacagtttaaaggaacataaaaagcaactcttttgagagatcacagaaaccctaatttgctaagaaccctaatctcaatttccatcttccaaagttcagattctgtatgtaa

SEQ ID NO: 6626 - DNA, 3000 bp, Unknown
  misc_feature (1)..( 3000): cDNA_ID_2173832_gDNA_ID_1621099_Annot_ID_171306 3000 nt of promoter + ATG
aattgcttgtagaaatggcaagaaaatgaacttttattatgtttacccggatggttttgagactaatacaaggatttatgcttgtacggtttaattctacgtgtctgccactagcgtggcaaacgttacccttgtcatgattttaattcttattaatgatattgttttaagcaaacatatcacataaaatctattactactaataaccttcaagtcagacaatatttagcatgcataattctaatatttttaggtactggtcgcatatcgacaatcaattatttcaactactctttttatcctcttaaattatttgattctaacattttcttttctatatagttaagtatgatctcacaacaataagtttttcacatattatttttgtttgattcttgccgtgtagcaattggattaatttaagaagtgaggtcatacatccaatatagtataataaataatatttttagataataatcgttttaatcataattaacaatttaacaaccaaactgaaagacaaaaaaaaaaaaaaaaaaaaaaaaaaaactcactcataaactcacctaactaaagaaatccaactatgattaagatggaatttcaactccctatatttaaaacattcattatatataactaataataggccctaatgagtaattaacttaaaaagtatgaatttaatatagaaaatgtttgaattagtcatagagaaaaatcattatcaacaagtaatagttttgaaagacgagacagagtcatctgatcaatttttaattaaaataataataaacctccttaagttaaatcagaatattcaactttgtgtcctgtaattatttagatgcatcatagattagtcattagtcgtttggtttgataattctatttttcttccagtgcacgtaaagaaacattagcaagcaaagggtagtaatgtaataacgagatgataagaggaaagatgagtcactagattctttgagctgctaatctctggacacgtgtcagcgagaaagcggctaatatcagcattgcctcgagatgatataaacgacaccgttcgataccgatccaatggaatttgagggataagtttttggcaacttgactttctaatttctataatttagatatcatccaaaagtgcaagtctctatccaatttttatgggctcgcaaacgcatctttccaatgtagataattgttatctatatcaaacaaaggccatatacaaatatcgaatgataaaaagggtaacaaagctttgaccctaacaataaaaaaaaaatagaaagaggaaaggtaataaagcaaaactaacgagataaggtgaagaagtgtggtgaatatactaaagttttggaacgaacaaagcaaatagccaaatacaaagtatacaacgtaataatgattaaattaaagtgattaaattcggttaactaattatatctatcattcttaagatgatcaaaataactctgtaaaacttacttaattaaatgtgttgctcaacagtttgcttcaaattcaatagttccttttcccatatatatatatatatataaggataaagattgaaaattacacacaagataaacataaatgaacaagttgattttgtattcgagttgtgtggtcatagttcttgtggataaattaatttagtgtcgcaatacattccccttttcttgacaattataggagcgttttagccaatcatattactaagtgtttgctttcagaaacaaataaaatagtggatttggaaatatattgtggttagtaatttagtatacaaaacagaaacaagcggtacagaacaaacaaaattaaagctatatatggtgtcatggtgatcggtgacaatgatttgtggctaattataaagatcatcattcaatgtagtttcccaaaataaaaagaaattagattcgatgaagtgttttaacactgagtgattgaaaaaaataaaaaaggaattttaataaaattgtagttggttgatgaaattgatgtgcatgtttttacaacaaagaaaaaaaagttgaattaaaaataaataaactaaaacaaaccacaatcgaaatgcgttgagacgttcgcatgttcagaaattcagaattttctttcatgcatgtttgccgcttggtttgaatctcgagagatccacgtgaatttgacattcgcaaatcacatttttcatcatccaacttcaaagtcttcactaattatccagcagtgaaaaccaaagtccattgccctcttattgatcataaagcccacacgtaaattgcaatctccttcaaataaaaccatttagtagcttcacaaccaaacattgcattgccatcactatggaactcaatttccaacgtggttttagattgagcatgacctgccaaaattttcgaaaattttctaattgcaacaacgaatacagaagaaacaaaaaagccaaaatgaccgaatctataacaaaaaaaaaaaaactacgacaatctaagcataagagattagcatccatcctaagtccgaggaaaaaacaccaattccgaaccgcgaaactcggacatttgcatgattgcctcaactctaaaaaactcgaataccatcgtagttacatatgataattgaatctaaactttctttcaaatgcatattgaatctaaagatgattcattgcaaaaaaaatataatcatatgtgattcatatttcatatttcatatttcatatttcgtaagcataccatttaaaaggtttaggtttgctaaaacgacagcgtttcaattacttgaatgttataacttagaaggaaaaagaattccaaagaaagtacaacagacaaaagaagagatcacaatcatctgccatgaaagttcaaaggttccagagcggaagcgcagccacgaattgactcaccaacaacactctctcttctctttctctctcttcattattattcaaaaagattccaaatttttcaatttcacatg

SEQ ID NO: 6627 - DNA, 3000 bp, Unknown
  misc_feature (1)..( 3000): cDNA_ID_3048723_gDNA_ID_1621099_Annot_ID_171305 3000 nt of promoter + ATG
atccatatgtagaatgacagtgagcaaattttagcttttacctgttaatcatgggatttcggaagacagttctgacattcaaatgagttgtgcctttttaaggtcagacacaactcctctgtcttggctgcccctttcattgtaaaccacctgcacacagattacagaaagagaatgattcaatcatgcagaagataataactctatgttgacaggaaaacaaaatcgctcatacgttttacggatttttctgacattttatcgtaccttatcaatgatcccatattcaacagcctcagtgggactaaaatatttcgggcgtttcatgtcagcttcaatctgctccggggatttaccaatatgctttgaatacagcttgaccttgagcataacattacatagaatagagacacatctttcagataagtttgaaggtaaaagtgaaaagttgcggacagagaatgatagcatgatttgagatttgctagcatgtgcatactattaatggctaactgatgaatattaagatgtctgcaagtatatacacccattgcctgcaagttccatttatttatatctcccccttaaaagacccaaataacacacacaactggacactgttgcataatgaagatcaaactaagatattctacgtacatcacaagggtttgattctctactatgtgaattcatatcaagtttatcttctcaccatttctgtctttatgtgcttgatttctttccttgcaatttcaacatcagttgcttggccttgaaatcgagcaatgggctacaaagttaacatgcaagagaaaatatattgataagtaaaaaggtgcatgcacagaattaagaatcataaaccttagattcttccaacttgaaaaagaaaaccaaaatcttctagcagggggaaaagacgccacctaatatttaaaagaaacgatcagaaagaacctgctttatcataatagttgatgagggcaacgcagatcgatttccttttgcaccagcagtcagaagcaaagcagcttcaccccaagcattcccgacgcaaagagtaaagattggtggtttgacatacctgaaattcaaagataaggtaagagttgattgttgcattgataattggtcgttctccccaaaatatgctggatatgaaaactgtctccaagtgcaattttgaatatttgggaaagcagtttaagtatccaagtcttgttatcgatgctattacgggaagaagtaagttgaggaaagagatgaagatcaattaccccatgacatcatagattgcaaaagcctcagtatcatagcccaacttttcaccattctgaaaagggagaagataaattctcttaaaaacagtttgaacgataggtaatgatttctaagcttttagtcattcatttgaaacaaaccacagtttcaattttactattcagtatgcgttcttaatatgatggactacataatggaagcccaccttggttgtcccagtcgagtttatgtaaaggtaaataggcttttcctcgtcttcatactgaaggtaaagaaactccgcaagtatcaactcagtaactgaaggtacgagagacattcccaaatatacaattcggttcttgaacaaatatgatgccaaatcaggaggaggttgttcgtgtgcacttccctttgagaaaggtataacctgttgataagacggaagcacgaagataagaatcatataataacaacaataaacaaaagactatatgtgaagaatatagcagcctccaaattctctatcataatcataatcagagcaattgatgcatattataagtggcacacacaatcaagtgaaacctctgccacataataactcaacttcttccttaccagccaaacacacagcataatttcttccgaaactgcattatttaatcttcatactcaactctctaactaaacatgtaccatttccgatcaattaaacaacagaaatgaatgagccgtctttgctatctaattgcatatatcaatagtaactctaatccattaattcgccgtttaaagctaagtagcaaccgttggtaagattcgacccataaattttccctcaattcaccaccacagaagcataaatctcagctatagaatgaatgagcattactcccccttgcaatctaatagcctatatctagagtcaatctaatccattggttcaaaactaaggaacaccatttctcgacaaatacaatttctgaaaattcactaccacagaagcataaatctcagctatagcaacgaaaacctcaatttcaaaatcctaacagaatagggagctcgttaattaagaaactgaaaaaaagtataaattcgagtaccatagtgacaactccgcgtttaggcttggaactggaaaaatttaacggattaagcgattccgcacgaagcttagcgccgcataagtcactagagatgcttcctccggtatacggcgaaagaaagccattcgaaagagaagctctgagagatgaagatgaagaaaatctcggtttagatctcagattacgtgtagaagacgggataatcgctgacgtacgagctcgaagcgttgtgaagctcgtcgcagtcgctgctgctacctccatttcttctttgttgcagagagagagaaagagtgaaagtccctgtgaccccgaaacgataacgatctgtctcaaatcgggcttcataacattatttatgggctcaacaaataggcccaatagttgtagttttttttctctgaaaatattccggtttcgactataatagtaaccaaatcaaaccgaagtaaaaccgggaatttctcatttttcgaaaacgtataatttaatatgaggctaccaaataaataatctactggccactgcagagaatcatctgtcgtgttctgtttgttctcacttctcacttctcagatttttataaacatgaatgaaacctgaattgttccactaactctcagcaaaa

SEQ ID NO: 6628 - DNA, 3000 bp, Unknown
  misc_feature (1)..( 3000): cDNA_ID_3048727_gDNA_ID_1621099_Annot_ID_171304 3000 nt of promoter + ATG
taaaatcaatgcacagttccaatagaaagttgtattcttgcaaaactttcatggaagagagtagaatttttcatgttgtgtgacaacagtctcttaccattgagggacaaaaggagccatccatatgacatcaccagcctgaactggatacctaatttaaagacaagaagatcacataaaagttataatcatttcttctattctgtggaatatagctgtgtttgcagttttcttttggaacatgcttctgttcactttacatgaccgatgtagaaaactattgttcttggttgtgcatgtggtgtgttgctggaaagttatcaattatattcacaatttcgtttattaataatacagtgttgcgtaccagttatcacccaagcgataaatgccttgcccctccagaagcaacaaaccatgctggttataatgaacttcctgctcacattgcaaaatcattgagaagacgaaatggaaaaggaacagttaaaaaatctgcttatggtgtcaagtcaaactgttatgtaccttaacattcagaaactctccaggctgaaaatccatagtctgcagatgacagacacatcagtaattaagctttagaggtctcaaaaagcgaaaggattaattcaatcaagtgaagtgcttacatggatgttgaagtcataagcaacggacatcggaagaagtttccgcagttcaaaaacctgtaataataacaaaatatatcttcagagatgactaattttaggaactagaacttgcattacaaatgtaaactgaaatactttcagatgtattctgagaaaagtggagaacttttgcacacttacctcaccaggagtctcgagtagtggttgcttgtctgtggagccaacaataagctctgtggtgtgacttcctagatattcatacctagagatgtagcagtattgggtgactttttaagttaaaacagtagagagaactcaaaattttcttgtcatattaagggaaaggagaaaaacctccgctcgaagacaacaagtgttgcagactcaacacagtccaaggaatggtgaaagtttggaggtaggtacgcatatgaatcaacctacaggaaaaatggattatcagcagaaaatgataaaactaatggagaaatcttgcaaccatttcaccatcaaatctgggcagaacgtgatgtaaccagaagaatactgtggtaaattttcctttgtacaaatcataccgtcaatttttttgaagaactggatgtgttagtgagtgtcacagcaccctcgaccacgaatataagacttgaaaaagattcagaatattgaaaggagttaaaaagcagattatagatcataagtgcaagcatatgttaaagatagagctcatataagtaataataccgctctatgtcttgtggaggcaaacctgaacttgacatttctgcaagagacagtagaatcagctagatgatctccaaattctacgagtagatcatataaaacagcaaatctttaaacccttaatcactcgacttgttctgcgcaaagcaagaacaagtgaatgttctaataatgatgagattggtgtagcagcacactttaggacagcacactttaggacataaaggtagttcctaaaagattgactctattatcgaaagatagaagaaaataatcccaagaacttgacgttcattacttgtgagaagagattggtttcatacctttcattttcgccaagtacatgacaaaatgggaacccgttgccggtgtgatcaaatacgcccctaatgtgtttgtcctgtaaatttgagcaacagataagtgcaagagcttgccaagtttagacttcttttagctataaaatcaagaaaagtaagggaaattataagagagtcatgtaccagtcaggtaaagggctgtatacatgactttccggtgttattaacgcatgatctcgtttgtatacacttcgtgtgaaaccaggcaagtctacaaaacaacagactcataaatatttctgcttaaacacttgatgaagatgcaaatacaaaacccccaattccaaatttgattagaaaactaatctaattatacacagagagagcgaactctcagaaagagactgtatatacagaactgaagttgaatgcttccatggttatgtctaaatctaattgatcaaaagttaagagatttttgcaagacatgagccagaaaccctctcagattaaacactaattaaagtaatcttaacttttcaataacttaatctcaaaatcaatcatatacaacaagacctcgaacaattgataaaaacagcaatcaaacttaaccagcaaaagtatcaaacttttaataacacgaagctgtaagaaaacacttgccttggaggtgtgaaggagagagtgttggattcgtggctttccaataaatggggttcgtcttctcatccgattcaacaatcgaaggcgctgaacaaaacccatcatcgcttttcgaagctttaacaagacctttgataacaaataagaaagttctgattagtttcacagtatactcaaaagaacttgagaagaatctaaaagattcgtacttactaataacgatgaagacgattaagtaaagtgatcgcatttttgctgagagttagtggaacaattcaggtttcattcatgtttataaaaatctgagaagtgagaagtgagaacaaacagaacacgacagatgattctctgcagtggccagtagattatttatttggtagcctcatattaaattatacgttttcgaaaaatgagaaattcccggttttacttcggtttgatttggttactattatagtcgaaaccggaatattttcagagaaaaaaaactacaactattgggcctatttgttgagcccataaataatgttatgaagcccgatttgagacagatcgttatcgtttcggggtcacagggactttcactctttctctctctctgcaacaaagaagaaatg

SEQ ID NO: 6629 - DNA, 3000 bp, Unknown
  misc_feature (1)..( 3000): cDNA_ID_3090568_gDNA_ID_1621099_Annot_ID_171300 3000 nt of promoter + ATG
acaacctatcctttttcaaataaataatagtcccaaaagctataaaccccaccattgtctattgcattacatattttggatattttatacaaatatctacagtagtttcaaaatatataatcaatacaggatgtctacaaagggttagtagcgatatagcatcaaccaaaaataaagccatagcgctataatctttttttgtaggaatgtaaaattgtattcatccaaaacatgttttacaattgaatgccacatagagagctgataacagaaagaaagagtgtatactcctataagaaactagagtattaggaattgattttcagtgttaaatgcatcttttatcttttcacttgaaactagtttgaatttcggtatgtgttatacggaaatggagattatgcatctattggaactatgttacctcaatcttctgagctttacaatgttcacatacttaatcttctaaaatactactatattgataattcgatatctaatactctccttaactaatctagactacaaaaatcaaagaataaattgcgtataataagaatcgacttttgaatctactgggtttatgccaaccctaatgctatattggcagatgtatgatgtaaacatttaatttaataccaagttaaactatataaaaaaattgagttagctttaagctttttgccaagtggaaagtaaaaaatagtgacgatgctcgatcaattgtataattgtaataagcactctagctgcagctataaataccctactaagtctctcatctatcttcactatcttttgtgataagaaattctattatcaattcctatcatttgttaagaaaaagagttagaagtattaataatcttacaatatttatagataagataacaacaatatgaagcattctcacgttttgcttcttctatttgttcaagtcattgtccttttgcctctcctttgtctatccgacgattttgttaactctagagctacttattatggcagccccgattgcaaagcaaatcctcgtacgtattaaaattgttattgctatatacatcgtgtaccttaattctttttcattttcttagttgttgtatagacttgtacacgttatatattggtaaaagatacattggtgtaatatctcactataagccataactaattatttttgttttatatctacgtataggtttcttgttttgttttattttgaaggtttattcaaattctaaatacatatatgattgaaaacgagtccactaagtgtccattaactgcgtaattagtaatgataactttccattatgagaatatacataatatttgtcgaaagaataagaataattaattaattttttgatgatgcagggggacattgtgggtatggagaatttggaagagatatcaataacggtgaagtgagtggtgtttcatggcgactatggaacaatggaactggctgtggtgcttgttaccaggttattatatatagttatctacttatctcaatcaatatttcatcaaatattattatagtatatgctatgtcattaattactaaacttatattatgaaagaaaaaaaaacttattttatgaattataaaaaggtgaggtgcaagataccaccacactgcagtgaggaaggagtatacgtagtggctacggactccggagaaggagatggcacggacttcatcttaagccctaaggcgtacggacgtatggcgcgacccggcacagaaaatcagctctactccttcggtgtagtcaacgttgagtaccaaaggatcccttgccgatacgcagggtataatctggtgtataagatccatgagaaaagctacaatcctcattatcttgccatccttgtcttgtacgttggtggtgttaatgacatcctcgccgttgaagtctggcaggtaaatttaatcaaagatgttgagaaacttagatatatgtttttgaggatcaaaatatatagtttactcttagatgattttgtgaaacaaagttaaacgttattatatggtatgcatgtatatgtatgattttaggaggattgcaaagagtggagacgtatgagaagagtgtttggagcggttcatgatttgcagaatccacctagaggcactctcacattgaggttcttagtctacggaagcgcaggaatcaattggatccaatcgccaaacgctattcccgctgattggactgccggagccacctacgactccaacattctacttacttaattgattcacttttcatcagtgtgtttttatcatatagtatttattatggtttctgtatgcaatggctaatatatttaaataatgccctctaggacaatataattaatgatgataatataaataatcgtagtagattcatatataatttatgtattgtgtctcactaagaagattgtaatggtttgtatgagtttgattttgatggaataaatcagtactaatcaatttatcagatgatgatcaaacgtttcgtaagctttttttgtttacattttggtcagtcaagcatatatctctccctaatcaaccattttcatgaaaacaaattggcgcgatttttgttatatagataggcccattagtagtattcacaaggcccattaaaacttaatttatcttggccatcctcttcgatcgatttcgtcagttttctttgattctgggtagtaaataatcgggatcaattgtagaagagctcatcgagaaaagagagaacctaaactttaaattcaattctgtattgttctcaaactcgaacccgaaactttaaatccttccttatttgttttctggagttcttgtttagaactgttttggatttgttttttttgaggagatgctttagttaactaggtttgcttcgagctgatcgctgtgtggcataaaccctaatttcgtggaaactgtgctcttttagaaccggtccagtgagtaagggaatccaattggtgaagatg

SEQ ID NO: 6630 - DNA, 3000 bp, Unknown
  misc_feature (1)..( 3000): cDNA_ID_2107486_gDNA_ID_1621099_Annot_ID_171299 3000 nt of promoter + ATG
agataaaaagaaatgaattatcaatgatcttcggagtaaagaatgtatattaagagtccaaaagataattcaattacagaatttagcgttgtaattgccagaggcatttgctgacccaaataaagtgatgaagtcacctataccagttgtaaattaaatgctctagaatataatgaatgtcctgtaaggaccaatttcaaactgctattgagtcttaagatcgcatgaagcgtaatagaccttggttccaaatataaacatcctcgtaaaagtgaaggagcacaaaattaaaaatgaccaaattgaggaaataaatattttgatgatctcttgaagagagtgaatgatctctaaaagagacataaacatgacaaatgaaacattcaagtacttgacaatgaagagatctagctagttatgtcatgtcaaaatataatggaatcaaaagcaaatcgacgtcgtaatatatttgcatgctatgagcagttgatattatggacaaaaaggaggatcatgaaagaaagtctattgaaaagtgtacacaaagtaatgattagccaaaaatggaaaagaagaaatagacatataattataatctctagtagagatatttgtactagtagtctatgcacatgatgtgtaaaaccagtggaagataaatgagtctttatgtgaaagaatagtgaaattaatgagattttcacaagataagaaatgtattatgaagagatatattctcttgtggtggatgtaatatttttaagtatctaaagtctgacaataagagacagaacactggatatgacatttatatgaaattattgaaagatataatctctgaaggattaattatatgagaattatgttctctagaactctactcgatcgaataaaaagaaatatgtaacatgacatataatcatataaatgtatatttatgttgagtttgtcaaaatatattgatcaaactaatatttgttttgaaaatcattaaaactcgtacagagttatcataagtaatacgatgacaataatctatgataaaatatcactagataatgatatttataagtctatatgaaaaccatataattttgatcattaagattatggttattaattccaacgagatattgtatttgattgaaaatcatctccttaagaagatgtttccgagggggagattgaatgatatgcgtggatgtaccctttttccttatcatagtttttatcccacatgatttttctatgacaaagtttttaacgagacattaaagaacacgcaaataatacacttgatgaatattaagaaattctatcaatcatccaaatgaatattatacactaatgatatttagagaaataaataagatggtcaagatgaatcatctaaaagattcatgagcagaagaatgacgttgtactttatccagaaatttgttcaagagaagatttggcagacttattctcaaatactgtttattctctgccacatcttctaatcatgcagagattttactaattcatgaagctagccgcgagtgtgtatggctaagatccatagttcaccatatacaagaagactgtggtatgtatgcagggaaaaaaactccaacaattatgtacgaagacaatgcagcatgcatcgcacaactcaaagacggatacatcaaaggcgatagaataaagcacatcctaccaaaattcttttacacacacgatctacaaaagagcggcgatgtacgagttctacagatccgttcgaatgataatctggctgacttattcaccaaggcgctacctactgctactttcaagaagttagtctatcgtatcggattacgccgtctcaaagatctcgacgaatatactcataagggggagtaattgtatgttgcactctttttcccttaaccaaggttttcctattgggttttcctggtaaggtttttaatgagatagcatttcaaatactttacgagttatggtactataatggtcatcaagggggagtgttatgaataaagatggatgcccattataagacccatcatctaagcccatcatttagatgtttgtagagttttacctttttcttgtactcctatataaagaacccttttctcaatagaaaacacactcatttcttctatctctttctcaagagaaatttattttcaacggatacttgtgacttttggagactcgagaatctaaacaacggcgatctacaaagataaagagttattgagctcactatgccaagttctgaaaaggcccacttcaaattataaaggcccagtttaagcccactatggaaacgagacagaagcaaatgggtataatcttcaagtcaagcgaacgatcggtgacggtgttatcttaccgccggagccggagtttcccactctattgtaataacagatatttcgaccggagtttctaagtgaatccaaatttgttgttcttcgttgcggctccatctctcgctgtgtatttatagtcaggtcttttgagttatcccattttgcgcgatcccgtcttcaccgtttccatcttccagcgagcacatctctgttgatcgataattttgtacctagttcaggttagttgcgtaattatacttgtgtaatttctttttttggattctctctgaactgatttgctgggcgtggaccttcggttttgttcatttcgtagtcctctatgcgaatgtttccagcgtttgatctttagatctgtagttcgattgtatgcttctaatagttattcgttgtcttgtacatttgatctataatgagaactgatgcgcggttttagtcgaacgcgacatcgtagttcggattagagagtgtactaatctttgtttaacaaagatggcatttcatcttttgactgtgtgatatgtcaaacccgcagaatccataaaactagtttactttgatatgttttgttcttcttcattgaatgtttgtgtggtgtcttgtagttgtaggaaag

SEQ ID NO: 6631 - DNA, 1696 bp, Unknown
  misc_feature (1)..( 1696): cDNA_ID_3090553_gDNA_ID_1621099_Annot_ID_171312 3000 nt of promoter + ATG
aattccaagtaccagtgaactcatgagctagtagtagtcttctgaatcatgaaccatgtttctacagacattgcttagttttcttcagcaacaaagtcccgaacaaattacaagtgagacaacaaaaagcatcatgctttcgagagtcccatataatttctgagaaatgcgcagatcccaaagactaaagagagagaagaagaagaaatctcaatctcccagcttttgctgaaaagcaagtaaggccacccaaaactatacctactacaagcaaccagcagctgaaaacaaaagggataaataaaaaaagaaagcttttattaaagaaatgacagatgcccagatcttgaaaatgagtcaactaggaaaccgagtctgatgagaagaagaggaaaaaactattctcaaagccacgacttttgagaaagaaaatggaaaggtagaatcagattttcagatctcgaggtggtagatactcgagaaactaagaaacaaattatatatttcccttttgaaggttcgaactctggtctgtgtggtcattgcgctatcaagaaatctcgacctttttagttcattctgagtttgctgttcctttcttctccagctcactaggtggcctgatatagactgacctgtaaagcttaaaaatatctaaaaacataaacttttaacttttacgggtgaaatgtttaaattaaaataaatataatggttaacaacaaaaacatacaaatttaaagatcatccaatgatttttttttttttttacatacatccaatgaccatctaagtgcaaaatttatattattataattaaatattaattttttaaacataattaataagaaaaactttaataaaaaaaaaaaactaataagaaaaaccataaataaagtagtacaaaattattaaaaaacaaataaatatcatagtgatatgtttattattacttcatgcatttggttgatcaccaaaaactacatcaagtaatatgacaaactacaaaaaaaattgtgttttgaattcgtagatcttcaagatcgacaatatttttacaatacttatgttcatattttgtctttcttcagtttgaattgatactatgattttgatgatttttttttatatagatatatatatatgatctaagtatttgtcgcttatgtgattttcttttttcttgtgactagccgctatcgtctgcaaccgcaaatatttctagaaatgagattttgaaatttagcgatattgagtggtgcaaaataatttaaagtaaatttctaaatatgttttaaatgctaacaatcgcaatcgttcacaagtttgcgagttatagcggaaaaaccaatcaaaattcatgatatattatagcaacttcacataattcgtctattcaattaaattcgatcacctatttgtatataattttggttgattcagattttagttggttataatttaaaaaacttcatattttaagaaactttttgtatatgtttaactagaaatgatatattttagtaatttcggttagttcgattaatcaaaaattaggctgcgtaaatccgatttatctaattggtttatatggtataggaatttctccaccggttaaattatttttgaaacttaattaaattttggtttagttcagttactgattagttttttctttttaataataaagtttatg

SEQ ID NO: 6632 - DNA, 3000 bp, Unknown
  misc_feature (1)..( 3000): cDNA_ID_3048734_gDNA_ID_1621099_Annot_ID_171295 3000 nt of promoter + ATG
tttagctcaagctcccatgatggctccttctggctcaatgtccatgccgcctatgtctagcggcggtggaagctcggttcctcctccagtgatgtctccgatgccaatgatgactccaccacctatgcctatgactccaccacccatgcccatgactccaccacctatgcctatggctccaccaccaatgcccatggcttcaccaccaatgatgccaatgactccatctacaagcccaagcccattaacagttccggatatgccttcgccgccgatgccatccggaatggaatcttcaccttctccaggacccatgccaccggcaatggcggcttcgccggattcaggagctttcaatgttagaaacaacgtcgtaacactttcatgcgttgttggagttgttgcagcccattttctcctcgtttgaaatgattattgaattggtcagcctcgatcgttttcttgtaatttaccttcatttttttccctcaaattattagtggtcatcattttataatatttgagtttgtgtttgatgtacgattcagacatttgtttgcattatgtgcttaataagtttatcgttgactctacttgaagagagactttgtatgtgatgtaaatttcttctatctatggaacattgcattcgtagtcatatataggacataaatatggttacaacttggaaggataaataccacaaggcacaatatgatcaatacgacaatacctctcattgttagtcgataatatcgatgtatatagtcactagactcaccgatccgtaattccttttaacaaaaaatacgttattcagatatgttattttcatatatatgtgtaaaaatgttcttcctaataattaaaagagacaaaccaaagaaaaggctatatttgcaagctgtcattggaattttgcatacattttctctatatattctcattgaaattcatttattctttcattttatggaggtgtagaaatacataaaatccaaagaaaatgagaaattttcaaatatgttgaatttgagaatggaagaatatgacaaaggtgggtatagtgaataaatggtagggaatatagatatgcccgacccaagaggacagctaaaaagaaagtgacgttcacatgtctgtctttctctattgccccaaccattttccaatgtgtattagtaataacagaaatcatacatttaaaaagaactatatagaaattttattcatatatatatagcagtactagttagtatatctgcatttttttgtttttcaagtcatgttgatgatttattactttaaacagatgccgaagctttctaaagtaattacggtaaatatatgttagtcatttgtaaaaacgaccgatgacagaaagatatgttttatttcttagtatatctaacaatgttataaccgaatgatgacaacctataaaccacaatagagcactaatttaattacatgctctttgttgctggctccgtacaccggccaccacaatcaaaaccttaattgtccactttttagccacttcgaattctcagaaagataaatctaaggaagttctaggtctttcaaaggccacaaatctcgatatgttggtggtttgtgaatatgcaaatctttggtgatacgctaacttcttcaattcataatttcaataaacgaactgagaatttactgatgggtagttgttcaaagctggagtttcttccacctgctgacgtttacttggaatctctcaaggacccaaatctaaggaaatgcttacggttgaaaagtgtccgtccgatttcgaaaaccattccaggtatttttttttaagtcttacaacatattctttccggtgaggaggagaccatgttgtttttcttcccaagaaaatttaacctctattgctatgatcctaagtgtataaaaggcttgcaatcaatggaggttttaattatagtccatgggtgaataatgtcatcaatagtgataactggacaagatttttaaaaaatgccacaaacacaaaagaaaaaaaaaattgaaagtaaatgtcataaaatcataattatgcgtagtgtgcaaggtatactttggtaaaatctgtcacattagacatttacttatttacaattttgcaaattggttatttacttaaataaatgaaacttatacgcaaaataaaataaaatcctgactaagctcatatcttttaatttgttttctaacagaaatatatccctctgttagtacaccacattgacgatgtcattcattattaggaatggaaatttttcattctttcctataaaactagatgttaattaaaaaaaaaaaacaattatacggatttcttaagagatttgaatttctttacgtagattttctgtaagtagtataattcaaaagaagcaagttaaagctaatctccttgacatggattgaatttttttttgaaccaattacccgacaaggatttttttagtggtatttatagattttgccattttttatatctaaaaaatacaatttaacacattacgtttgggtttatttagttccatattttttttagggtatagtgtttgttattaagtatgtattttacaaaaaaaaatctcaagtgtttcattttttaaagttgcagaaaacgcaaaatctaaaatatttgaaggtggcaaatctaaaagatttaagtcacaaaatggcaaaatcaacaataatcctatattattttgggtggtgttgatgagccgttgacgtagaagaatagcatgtggccttatttgctataggatgtggccctaaccctaataggatgagaaatctttgctcaacttggcttagagtggaaccaaccgtgaagcatccgtctcaaaaatgtctactctatgacgtctttttcaccccaccccccccctctccacaaggcccctccatttctgtataaacttcagaatgctttcttgagaatgtttttatcttctttctatagtttcc

SEQ ID NO: 6633 - DNA, 3000 bp, Unknown
  misc_feature (1)..( 3000): cDNA_ID_3048738_gDNA_ID_1621099_Annot_ID_171289 3000 nt of promoter + ATG
gatgatgaggatgaggacgaggatgaggaggaggatgatgaggaggaggatgaggatgaagataattattggtatggaagaaactattttaacttccagaattgcttcaaattggatagagatgcacgagaactcatcctacgttcatgcttcaagaagactatggttttaccaggtggagaagtgcctgcatatttcaagcatcgagcatatggaaattccgtaaatatcactttacctcggagatctctctctcacaaatttttgcgattcaatgcttgtgtagtggttgaacctcaaaccgattcttatgggagtgtgtatgtatacttccaatacaaaggcgaacattatatccatacaatagctactgatatgacactgatgtgtaagacggatcatctggttttgtgttccttcaagttccggcagtttaaaaatactctatatccaaaggtaaaggtcttggataatgtggaattcaagtttaaagggaggaggatcaaaggatgcggcgtacaactcctgcatgtgtctccatatccggatgatagtgatggaagctctaaagcagagtacaaccaacagtctggagaaaaatgtgatgctgtagagactgagagtagtagcaagaagcggatgcgggtaagtcttttgccataatttgaactgaaaactattaaagctatctctcgattttctttttaatatttcaggaaggccactatctaaaagaatcgatagtttggtttattatacagatgacattaggaaactctgaagaagatttcaacttaccctgtggccaaacagtaacagacacaggattgaccgctccaaatctggagcttccattagggcggggagaatcgtcatcaatttcatatccatgtctggagggtgaagctttctctgttgattccatgataactaagcgacaagctaaagaaattcccatcgcgcatagggacgaagattctgaggcatcatggtaactgaaacatcttactattctgttttgttttgttgcagcataacaagacaagcaatctttattgatctatcaaataacctgaattataatgaagagaactgcagagtttcaggctctgaaacacaccaattcactgattggataatcaatctctcacagaattagagactctctctctatatatatatactttaaagactcaatatttagttataatgttgactctttgactctgttctttcttcttttataggtcatcaggctcatcaggctcatcaagctcttcgtcgctggtgcctttttaagtctccaactctagagcatggtactctgttcttacatctttgtatctacttctctaaggctttcgtataaatacatgttttgaaagccacaatttagctcattctggaaaagtatttttgacagattttgtatgtttccttacatctatggataagtttaaaagacattgaattagttaatgtttttaaattagtcctgacttttctaaaaacacagatacatctcaatgtgtatgttagtaattaattccatatataataaacttgtgcattgagagctgagactacaattgtaggagtgaactagtcattatcacatttaggatgtgaaagctaatttctctggtgcttattttagctgaattggtttgtgcaggtttgcttcagatattgtaccaattacctaataatagaaaaaaaaaataatacaccatcagtcgattccactcttttttctttcttgccgtcttacaacgaccttgtcattcccaggaacataaagggcattgcgcaactacgaggcagtgaagaattatgggaagtagccaagctgcacaaccgtgaatcctctttccctgaggttacatctcatcttacctccctgataaaactctccatttatttgattgctgcattggtttgaatataacatacatgctctgttcttctttgccaccagcatatggattcaaatatcacaaaagggttttcatcgttagcattatatatctttaaaatgtaaattagtgacaaaatgattagatagatgatcgtgtgagatgaattcacgtagagttttgtgttgttgtttcaggaattgtacgagtcaaggtacttcaaggggctggagttgagaaaatggtgtgaactcaacacaaacgcagagagtttctagacgcaattccacggccgctccttgacttcgtggatagatgtttgaccgttaacccaaggcaacgaaacagcgcagaggatgttctcagacacgagttcttccatccagtacatgaaacccttagaaaccaaatgctccttaaaactacagtggtggctgacgcactaagccaaactttaaactaataatacaattcttgaaaactaaaagagtaatttagcaaactagagagttagtgttaattagtattttcactgtattatttgaattaaaatcctcataatcgatatacttattctcctaaaccgtgtgcatgtatgtatagggaaacaagacttagatattaaacaatcataacattcttacgataaactgtcttgtacaaggacaactgataaccacaaaatttgtgttttcaaaatatctttgtagaggaaacgaatgtaagtttctgtctacttgcctagaaattgaaatattatttctgtcttgtacaaagactaagacttatcataattcagtgacaaccacaaaaattcaatcttcaaaaatatctttgtatgtagtgtaaaaaagctttcgaggaaaggaagggccgagtttctttattatttacgtctcaattgtcttgttaggagatttgattttagccacttaaaagaatatcttgtacagtaagtcttctatgcaagtcttggagggaaggaagacgaagtttctcctctctttctcacactatgtcttgctgatttacttctcttaaaaatcttcgtctcttctctgagttctctctatcatctcccatg

SEQ ID NO: 6634 - DNA, 3000 bp, Unknown
  misc_feature (1)..( 3000): cDNA_ID_3090590_gDNA_ID_1621099_Annot_ID_171284 3000 nt of promoter + ATG
gacagtagaccaatcaacaaaagtacattgtggtaatcctagtctgtgaagaaccagaaaccaaacctgttctgagaaggcacaatgaaggagtaagaagaagtcttcctttacattgcgtgtttacttaatgatcaaaaagttgattatatcaagaacttgcttgttgatcagtggcggacccactaagaaggaaggtgggtcagttgattttcatgtttgagtacactactccatatgaatcgaagagagtcatctataacgtaatagattattgtgaccgttgtaaaatactaatgtttttttttcaggaactgaaaatgtgctaggcatgtctttcaacacaacagaaatcgatgagtgtaatctcagaaatagattgtttgtaaatggacaatcttcaaaggaatgtgtaatctcacatttctaaaattttacaaggagttgtcgatcgctagagactggtgaaagcagattgtgtttacctcagggattcatttatttggcccgaaaactcagattgctatattgggatgaatatccgttgacgagtatgtgtttcaattttagggctgaaattttgattaaactcacaatggagaatagcaagcttgagaagttgtgggaaggagtctgtctggtgaggaaggatttgtcaggaagtgaaaacctgaaagaatttccagatctttcaacggccatcaatcttgaccacttggaacttaacgattgcaaaagtttagtgatgcttccttcttcaattcggaatctcaataaactgaggcggttggaaatgcaaggatgcaaaaatctaaaagttctcccaaccggcgttaacttggaatctctagagtacacctcgatctcaggggatgttcaagtttgagatgtttccctcgaatttcaaagaacatttcagagctccatctaaacgaaactgcaatcagagaagacatagattgtttctttattgggaatatctttggtctcactgaactcgtttggattgattgtccaataaaatatttaccgtctaaatgtcatgcagaatgtgtcgcagagcttacaatgccaggtagcaagcttgagaagttatgggaagtaatccaggtaacattctccttaaactcattcattaatgatgttcctaagatattttctcgacctttcttttgcttctaatatgatttgcttggcctgcaagcttgttagagtatatttgtcataaagccttttagcttcaaactagatggacttcccgctcaaattgggatttgaaatctagtaacgtaaattattttgcttgctatactaattttttcgcaaagaattgattataaactacttatttcttacaaagtatataatgattagaagaatagaacgctgcaaaaaacaccatcggaattcaaagtagcacaatctaattcaaaaatcttacctagtacattatggttgtgttccgctctgagttttgcccttcagaagaagtctttggttatccatatgaattggactacaacgatgtgaaattcaagtttgaatatcatagcaatgcttgttcttgtgtcaaatttgggcttgaccacgacacgcaaacttgtcgtttaagaggataaaaaaattcagcgtacggcatttagatgcctctccatctgaggatggtagtggtacgagcgctcaaactgagaacaaccaacattctagagaaagtgacatagtcaatgggagaagcaagaagctaaagcgggtgaagctttgaattattgaacggaaaattacatatctaactcttgattcattttcaggatcacctgcaaaatagaccaaaggaatttaatagatttgattttattatgcagattacggtaagaacatatgaagaaccttccaacttactctgtggtaaaacagtagcaaacacaagcttgacggctccaaatttggaactttccagatgtcttcttctataagtatgatactactgttatcagtttcttcaagcaaatttcatggcgatggaacatcgttgtataattccctttctccttctgaacatagattcggtggctgactgctaggaacccttcgcgtgcggcaaaagaaaaaaaccctagtcgcctctcctgtcgcaattttctcggctgacgtagcctaaaaagttatgagttctttcagggcgattttattttaaccactagaagtacagtaagtcttctatgccaggcgaagtttctttgtatttattattgtgtctgtcatcatacactacaaaaatataacttgtacagtaagtcttctatgcaagcctgcaaggaaaggaaggaagtttctgtgttaatttgttataacttgattgtgtctctcactatagtctcttgttaggggatttgattttaacctgtaaaataaatatcttgtatagcaactagcaagtcttctatgcgagtcttcaacgaaagaaaggcgaagtttctgtcttattaagttattattatgtcttaatacatcatactttgttaggaaaattgatatcaattaacctctaaaaaaatatatcttgaacaaagtcttctatgcaaatcttcaagaaaaggaaggcgaagtttctgtgttaaattgttattatatattaggtgtgtctcaccatactctcttgttaagggatttgattttaaccagtaaaataaacatcttgtataataagtcttctatgcaactcttcgacgaatgaaaggcgaagtttctgtgttatctagttatttattatcttaattgtgcctgtcgtcaccctactcttgttaggagatttgatattaaccactaaaaaattactaatcttgtacataacagcacgtttcccagcgaatataaggtactccgtttcgcacagcataagtcttctatgcacgatttctcctcttcctgcacactaatcattatgtattgctgatttacttcttttaaagatattctatctcaaactcatcatctttcatg

SEQ ID NO: 6635 - DNA, 3000 bp, Unknown
  misc_feature (1)..( 3000): cDNA_ID_3048744_gDNA_ID_1621099_Annot_ID_171282 3000 nt of promoter + ATG
gaagcgagaagcggatgggggtatcttttgacttttgattagagctgaaaattataaagctatcttttgacttttggtttgatttttcaggatcgaaacaccatagggacagactatttaatagaatcgatcgtttgatttataatgcagatgacatcggggacatctgaagaatatatcaacttaccctatggccaaattgtagcggactcaggattggccgctctaaatatggagctttcgttagggcagggagaagcatcatcatcaacatctctagagggggaagctttgtgtgttgattacatgataactgaagaacaagatgaagaaattcctatcttgtctactgattctggtaactgaagcatcttatcattctgttttactctgttttaggataacttgggatcgactatgactataatgataatgataattaactgcagatgatgaagatctttaggagaaccaaagtccgttacattatccagctctgcgtttgttttgaacatttcacttttcctgaaagaataaatgtttcagaaagccatactttagcatattctggaaaaacatctttggcattgttttgttttgtaaaaacatattctatttttaagaaagacattgaatttgggagcgtacctgcttgagtgcaggtactacccaaaatagtcttgcctttttaaaacatagatctcaatgtttatgttagtaaaggttgtttttctctttattagcaatgaataaatcagactttgggtacagaaaacaacaagaatcagcaacatttgcatatccgctgattcaatagccaaaaggcagaagcgtttttggcctaacttcggccaaagatgtaaccagcataaggaacaatccttcgggtgaaggaaagagcttttaaactttctacaggagacattgtctggtccacttccaaaccatgaagtatcatccagctatcctacgtcgatgagaaaatatgtcgctgctgttcccctatgccgctgcactctttaattatatcgagaagagtgaaagttgtaggcctgaactactcactagaacatctaggatgggaagctcattctctggggctgttcttgactgaattggtttgcttcagatctttgcatcaagggcctaaataaaacgtatggtctgatggggacgacacctttcactgctgaccctgaacagttaagatctgccttgactgaattcacaccatcacattgttaagattcctttcctggatccttagccgtctctacagcttatcacattgttaaggtaacctgaaacgtattacaactctgttttataatgaacatgggatcgaccatgactatactggtaatgacaagacgatttcttagtttttcacacaagccattttctcctgcagatgatggagcactgacaactagaaaacttttatggttccatgtccagaacagcagaaccactctgttcttacttctctctgttttgcttctttgaaaaattcgctttcctgaaaagatgtaaatataacagtcttgtcttttgaaacacacatatctctctacgtgtatgttaccaaaggttatttttctctctttaaatcaatgaataaattcggtaaagaaaaatgtatttcacaagagaattatcaacaacaaaaaagtgttggaactaaatttttaaatagcaacctcatcagcattaaatgcatcactgctaccatggcgtttcctacactcacagtaaaaaacagtgattacaacataactcagcaccaccactgccccatacatacaaaaccagcttccacccgtcctactcaccggccacaaccaccaaactcaatcacgaccctgaggtcaagtgagctagtcattgtcacatttaggatgtgaaagctaatttctctggtgcttattttagctgaattggtttgtgcaggtttgcttcagatatttgcaccaatgacctaataataataaataaaaatataatacaccatcagtcgattccactcttttttcgttcttgccgtcttacaacgaccttgtgattcctaggaacataaaggacattgagtaactacgaggcagtgaagacttatgggaagtagccaagctgcaatcgtgaaacctctttgcctgaggtaaaatctcatcttacatcccttataaactctccattcacttgattgctgaatttgtgtgacataatacaaatgctctgttcttctttgccaccagcatatggattcaaatatcacataaaatggttttcattgttagtccagaacatgatataactttaaaatgtaaattactgataaagtgatttgatagatgatcgtgagagctgaattcacatagatttttgtgttgttgtttcaggaattgtacgtgtcaaggtacttgaaggggatggagttgagaaaatgaggagaactcaacacaaaacgcagagagtttctagaaatcttcactccactgtccatccacaccacaccacacaactctagaaagctaaaagagttttttttttaacaaactagatagttaatgttttcactatattattatgtgaattaaaatcctcataattgatatacttacaaattctcctagtttctatgcatgtaagtatagggaaacaaagactgaattccccactcaacatgtttacgataagctgtcctttttacaataagcaaagaccttggacaccaaaataaatctaatattgatttaagaggcatcataacttgtagttgagcggttgaatacttgaaatcaggttttaaatgcttcattggccttggttcgaacctcattacaaacatttcgctacatttttatatttatggcctatgggcaaaaaataagaagtttccttgcgcatcccacccttaaggaccggcctcacagtaatcactctaatcaataatcactgtgtattcgatttactgtacttatcttctcctcatcatattccatg

SEQ ID NO: 6636 - DNA, 3000 bp, Unknown
  misc_feature (1)..( 3000): cDNA_ID_3090594_gDNA_ID_1621099_Annot_ID_171280 3000 nt of promoter + ATG
gtcgagtcacttagtgacttgggtcgagagatctcgtccggacttaggtagtccggatcggggcctttcattatctcttccagaactgctgcaaattggatggagatgcgcgagaactcatcttacggtcattgttcaagcctatgtccttaccaggtggagaagtgccaacgtattttcaacatcgagcttatggagattccctaactgtcactttaccttagagctctctttctcaagtattcttgctttaaggcttgcatcgtggttgaccttctaactgagggcaagagttggggtccatattgtgaggtaaatgctggcttcaatgggacactgtattgcaaatcattttttaaagatgcagacctgcggttgtgtaagacggatcatctggttttctgttccttcaacttccagcctgaagatcttccatctaaattgactttcaacgatgtggagtttaacttttcttgctccaagaggataaaagaatgtggtatacgactcttgaatgtgtctccatttccagatgatagtgatggaagctctgaaacagagtacagccaacagtctcgagaaaaatgtgatgttgtagagactgcgagaagcaataagcggatgcgggtaagccttttgacataattagaactgaaaattgcaaagctatctcttgatgttttattatattttccaggatcaataccttagtgacagactatttaacagaatcgatcctttggtttacgatgcagatgacatcgggaacatctgaagaatatatcaacttaccctgtgtccaaattgtagcggacacaagcttgaccgctctaaatatggagctttcgttagggcagggagaagcatcatcagtttcttcttatccatctctggagggggaatctttgtgtgttgattccatgataagtgaacaacaagatgaagaaattcctatcttgaattctggttctggtaactgaagcatcttattattcggttttcctctgttttaggataacttgggaccgagcatgactataatgataatggcaagacgatttcatatgttttgacacaagccatttttcctgcagatatatcacttcccttgatactagttaaatccatatgaaaatatcttgttccctgagctactcattaacacatctaggatgggatggaaaagctaattctctagggctgttctcggctgaatggtctttggaccaaggacctaaaaaaagacgtgtgttctgcgggagttactttgttatacctcataatgggaaggaaagctctcactggtgaccctgaacagttaagatctgacttgactgaatacaccatcactcggttccacttttttcttctttcttgccgtcttacaacgaccttgtcattcccaggaacataaaggacattgcgcaactacgaggcagtgaagaattatgggaagtagccaagctgcacaaccgtgaatcctctttacatgaggtaaaatctcatctttcatcccttgtaaactctccattcatttgattactgcattggtgtgaacataacatacatgttctgttcttctttgccgccagcatttggattcaaatatcacaaaagggttttcattgttagcattttgtgttccaaaacattatatatcttaaaaatgtaaattaccgacaaaattattagatagatgatcgtgagagatgagttcaggttgatttttgtgttgttgtttcaggaattgtacaagtcaaggtacttgaaagggatggagttgagaaaatggtacgaactcaacccaaaacgcatggagtttctagatgcaattccatggtcgctccttgacctcgttgatagatgtttgaccgttaacccgagacggcgaatcagtgcagaggatgctctcaagcacgacttcttccatccagtacatgaaacctacccttagaaaccaaatgctccttaaacggcagcaaatgcaatcgcagcctacagtggttgctgacacagtaagccaaaactctaaactaatattacaattgtaaatgtaaacaagaaaactttacatgaaaatattctctccactgtccacaccacacagctctagaaaactagatagtttgttgttagtgttttcactgtattattagttgaattataatcctcataatcgatatactaattattctcctaatttccatgcatgtatgtacagtatgaataggaaaaccagacttttgatattagtgaaccttaacattgttaaaataaattgaaatcttgtttctgtcttgaaccactgacagccacaaaattttgggtcttcaaaaatatctgtggagaggaaaagtagctctcgaggaagtttctgtctattttgcctagaaattatcttgaaatcttgtagaatggctacgtctcatcatcatagataaattcagtgacgactgatagccacaaaattgacttatcgttatagagtagaagctttccaaggaaaggaaggggaagtttctgtatcacataattatggccttatcttgttagggatttgatttttcaaccactaaaaaaatatcttgtacagtaagtcttctatgcaagtcttctaagaaaggaagaccaagtttacgtattatttgtcccaattgtcttgtaatgggatttgattttaaccactaaaacaatatcttgtatagtaagtcttctatacaagtcttcgaggaaaggaagaccaagtttctcctctctgttactgtgttgtattattgatatacttcaaagagttttcctttgagaaatttcgtctcttctctctcatcctctgccatggcgtcttcttgcttcagatagatatacaatgttctcagatggatatacaatgttttcgcgagcttcagtggagaaaatttcggcaaattgtttcgtggccatcttgtcaaggagctcgagctcgaccgtgaaatgatggatacatccaaagatgatgatatg

SEQ ID NO: 6637 - DNA, 3000 bp, Unknown
  misc_feature (1)..( 3000): cDNA_ID_3090604_gDNA_ID_1621099_Annot_ID_171277 3000 nt of promoter + ATG
atttcacaagagaattatcaacagcaaaaaagtgttggaactaaatttttaaatagcaacctcatcagcaacaattgcatcactgctaccgtggcgtttcctacactcacagtaaaaaaacagtgattaaaacataacgcaccaccaccacagccccatacatacaaaccagcttccacccgtcccactcaccgacctccaccacgaccctgagctcaagtgagctagtcattgtcacatttaggatgtgaaagctaatttctctggtgcttcttttagctgaattggtttgtgcaggtttgcttcagatattgcaccaatgacctaataataataataaaaacataatacaccatcagtcgattccactcttttttctttcttgccgtcttacaacgaccttgtgattcctaggaacgtgaaggacattgagtaactacgaagcagtgaagacttatgggaagtagccaagctgcacaatagtgaaacctctttgcctgaggtaaaatctcatcttacctcccttataaactctccattcacttgattgctgaatttgtgtgacataatacaaatgctctgttcttctttgccgccagcatatggattcaaataaaatggttttcattgttagtccagaacatgatataactttaaaatgtaaattactgataaagtgatttgatagatgatcgtgagagatgaattgaatgcacatagatttttgtgttgttgtttcaagaattgtacgttgaaggggctggagttgagaaaatggtgtgaactcaacacaaacgcagagagtttctagacgcaatcccacggccgctccttgacttcgtggatagatgtttgaccgttaacccgaggcaacgaaccagcgcagaggatgttctcagacacgagttcttccatccagtacatgaaacccttagaaaccaaatgctccttaaacaatacagcaaatgcaatcgcagcctacagtggttgctgacgcagtaagccaaactttaaactaataatacaattattgaaaactaaaagagtaatttagcaaactagagagttagtgttaattagtattttcactgtattatttgaattaaaatcctcataatcgatatacttattctcctaatccatgtgcatgtatgtattgggaaacaagactttgatattaaacaatcataagtacattcttacgataaactgtcttgtacaaggacaactgacaaccacaaaatttgtgtgtttcaaaatatctgtgtagaggaaacgaataacgtaagtttctgtctaattgcctagaacttgaaatattatttctgtcttgtacaaagacttatcataattcagtgacaaccacaaaaattcaatcttcaaaaatatctcttgaatgtgtctccatctcaggattatagtgatggaagctcaagtttgagatttttccctcagatttcaagtaacatcatatgcctatggtggcgttattgtccattgaagcgtttgccttctaattttaaggctgagtatctggttgaactcataatggaggatagtgaccttgagaagctgtggaatggaactcaggtactaattttttattgtttttgttgtcaatttgaaaacagaaatgtgttatgtttattgatttatttgttcaaaaaattaaatgaattttttgaaatgtttacgaacgtctgttattctctctttccttgttttcagttacttggaagcctaaagaagatgattctgcgtaattccaaatatttgaaagaaattccagatctttctttagccacaaacctcgagagactagatctttgtaaatgcgaagtgctagaaagttttccaactcctctcaactcggaatctcttgagtacctcaatctcctacgatgccccaagttgagaaatttccctgagattattatgcacagtttcagaggagaaattgacatcgaggtagcagattgtttatggaacaagaatctccctggactcggttatcttgattgccttaggagatgtaatccaagtaaatttcgcccagaacatctcaaagacctcacagtgagatgtaacaacaagcttgagaagctatgggaaggcgtccaggtaattcatacgtatattatatattgatcaagattcaataagagattcatccgtacaaataaggagaaaggcctagtattgggtatgtgctacaaggagttgggccgaacacatgagaagtctatggagagcttctagaaagagtgaaggcgcacaaatatctcttgtagccgttgaagaggactcacgagtgtctttagcgacatggtcaaccaaggaccagtcgctctcaccatcaagaccaaggaacctcttctctcatgtctctttcagtcttacgttaattgtaaacggtcatattccctttgtgtgtctttaaatacattgtaaacacacaaaggttactaactaattctatcaatatgatttggtcattctcactcatataccaactctcttgttcttcataattctcttactctttgctacaattccgcatattctttcattatatacaaggacaactgataaccacaaaatttgtgttttcaaaatatctttgtagaggaaacgaatgtaagtttctgtctacttgcctagaaattgaaatattatttctgtcttgtacaaagactaagacttatcataattcagtgacaaccacaaaaattcaatcttcaaaaatatctttgtatgtagtgtaaaaaagctttcgaggaaaggaagggccgagtttctttattatttacgtctcaattgtcttgttaggagatttgattttagccacttaaaagaatatcttgtacagtaagtcttctatgcaagtcttggagggaaggaagacgaagtttctcctctctttctcacactatgtcttgctgatttacttctcttaaaaatcttcgtctcttctctgagttccctctatcgtctcccatg

SEQ ID NO: 6638 - DNA, 3000 bp, Unknown
  misc_feature (1)..( 3000): cDNA_ID_3090615_gDNA_ID_1621099_Annot_ID_171274 3000 nt of promoter + ATG
gcaacactcacacatcgactttgattccgacgaagccgctctcagtttctcccgcgagaaaaaccaacaaagaacatctcagaaaccttgagaacgttcttagaacttcgtcaaactctatagatcatatcgaaaatgtaacttctcgtcaagagaagacgacgaagaatacatcgacgtcatcacttctcggaggtttgaatttggcgcgaatatggcctcagatgaaagcagccgtcgacgaaatgtcgccaaagaatctgaaacggctccaaaggcttctctcaaagtcatccgaggaacgttcgccgaagagtaaactcgggtctaaatggcgggagctacacgggttaaacaactgggccgggttgttggatccgttagacgagaatctccggcgagagcttgtccgctacggagagtttgtacaagcggcttatcacgcgtttcactcagacccggaaggttcgccgagacacgtggcgttacctgatgggtcatttaaagtgaccaagagtctttacgccacgtcatccgttcgtttacctaaatggatcgatgacgttgcaccggatctccggtggatgactaaacagacgagctgggttggttacgtggcggtgtgtgatgatccgagagagatccgacggatgggaaggagggagatcgtcatcgccctccgtggaaccgccacgttgctcgaatggtcagagaatttcaggcccaatctcgtttcaatgcctgagcccaaacccgatcaatccgacccgactcgacccaaagtggaatgcggatttaatagcctctacacgacgggtgaccaacacgcaccaagcctcgccgagtctttggtcggcgaaatcagccggctcgtcgagctctatgcaggagaggagctgagtatcagcgtaaccggccacagcctcggcgccgcaatcgcgcttctcgccgccgacgacatcgccgagcgtgttccacacgcgcctccggttgcggtgttttcctttggtgggcctcgagtcgggaaccgtgagttcgcggatcgtttggattcgaaaggagtgaaagtcctccgcgtggttaacagccaagatgtggtcacgaaagtccccggaatattcgccgataacgataaacaggggcaaagtcgtaataacgggagaagtccagggggtattatggaaatggtggagaggaacaatccatgggcttactcgcatgtgggagcagagctccgtgtagacatgaagatgtctccgtacttgaaaccaaacgctgacgtggcgtgttgccatgaccttgaggcgtacttgcacttagtcgacgggtttttggcatctaactgtccgtttcgggcaaacgcgaaacggagtttaaggaaactgttggatgagcaacggtcaaacgtcaaggttttgtacacaggaaagtctttaagacttaaccgtacttttcatgataacggagatgttttgcctagtccgtcgtcttcatgagctttgatttattaaagaaaaaagatttgttctcttttaatactttttaagtatttgtttattttttctaattaccaaaaaaagtatttgtttattttgctataattattatttactttttctaagattaagatattcattattggtggggggaattatttatttatttgtttgttatgatttctttgtcgccattggtgataataaaagattaaaaagttgtgcaatttagactttcgcgtttgttttagcaaatgtgatttttgcacaaaaaattgtaaatagaataaaatgaaataaatgtcattggttaaactattagataaaaaataagttttgctagagaaaaaaacagaaaataacataatctatgtgtttaaaccttaaatttcaattaaaatggtactgattaattattttcatatatacataggaacacttgaatatatgaactgcaaaactatgtttttttaaagtgggactaaatgaccaaattttattaaaacgacatatggaagactagtatgttgtaaccaacaatgaacaataaccaatactgaaataagttattgtttgtttgattttagaattgttacatccggtacgacgaagtctgaatcatcataagagtctggatcatcatctgagtctcatcacacaattgtttgcaatgcggttctaacatttatccacttcatattttttttatataaaaattgtttatacgtttccaacacgtaaacacttctcattgtacattttcttttttttttttgctataatgactgaaaccatgcatgaaaagtcttctaaatagaatcgaactaaaagaaaaattacacttaaaaaaacaaattgcaatattttttggttttatttggtttaaaactatgtatgatctagaaaaaaaatattatgagcctaaagtgaattattctgattctatataaatacaaacggtaagtattaagttagaaaactaaatagtcttatgtatacaaatctcttcataattcattaaatatattgtaaattgtaatgagtattttcatatacatagactgatagaagcactttatcgttaaaattgcaaaataaaagtagttataagtgggcataaatgaccaaaatttgctaaaatagattgtttttttttttttttttttggtaggggacactggacagggagataatccaataatgaaatataaacttttgtttagatatgccgtcggtttaagtattctgataatcaccaccgtttttttgcctattccaaatttccacacattttattttcatttcttaatatttatttccttatcatttctttctctcaccaaccaacaagttctcctttctacccatttcgtctccttcattttgacgttttctttagatctgttaataatcccatccatggcttggtctagtcactagtggtgttatctctctgtgtggaataaaaagcaaggttttttaatcacttggattgttttaagat

SEQ ID NO: 6639 - DNA, 3000 bp, Unknown
  misc_feature (1)..( 3000): cDNA_ID_2993912_gDNA_ID_1621099_Annot_ID_171269 3000 nt of promoter + ATG
tgcaagtcttggtgtcgtatgagatctataatgtaatcgttaacaaagaggggatatttgatcataataatggtccgtcgatgtcctcctaagttggtaaatcgtaactgccagttttcaccagactctctattctttagaaaacagaaaaaagtaaatgatttaggaggttactctcttttttactatgtacttattatcttgggttcttttggcgtcgtcgttatttacttttctatggagtactaccgagtacaaataattggagaggagtcatgcatgattattgattagagaatgaagaaattaaaacccaaaactggaagtccaaatcagacaaaagcacctgtggcccacaaaacaattgaggacgatattacgtgaaggacaaatggtcatttgacggacacacctttcttttgttagacgcagtcccgttcgtggtagggtcagatccacgtgaagttcacatgctttccatgcaccgtttgggtcatcctgttggtcccgctttattaactagtctatttcctctattaggaaaattcaattttcgaaacaaaaatcaatcaaaacatgtataaacaaactgataaaaaaccacacaaaaaatatggtgcttttctgagggtatatatattttttgttttcgtctgatcttatattttaaatttggattttatattcaaattttttgtatattttgtggtcataaattgtccaagataacaattcgtgaccaaaaaaaatatatgtgattattttacagaaaacaaataattaccaaaaaaaaaatcatatcttccaaataaaatgtaagagaaaataagaagattatatatgtgagaactttatgagctaaataaaatgaagaaaagtcatagtttagccgcgtaggaaatcattcagaattcagaaatatggctcctcgctaatatttttcttttaaaggtaattgtttttcaacctaatttgagagcaatgtatatcgataggtttcacattagcttatttcgctcacatacatgattgtgcaaaaaaacagaaacgatcgttaactaattatctaagaaagtgacatttcaaaaaggctcatttcaatatagagttgccttcttcatgacatgaccttgatatgataaattccctaatgtaatgaatcaataaaacgaacttatagaacggtagaaattacgtacgtgaggatttatatcatctattaattaattaattgacaacaaaaacagaaggggtagtgttcacgtgcatgtcacgcgggtaatggtgtggacacacgagcctcgtacggtgtaaagaaggagaacagagagagtcgcacgagccgcacgtgggatgttgacttgtcgattagcttaaggggtatgtccatatactaatgattaagtacagtcgaatgaaaacatgccacgagccctagatctacatgtttattgtggttttttttttactcagtcacatccacatgattaatattggtccctgatattcatcttatatatttcacaagtataacaatcacccaaacattagtttttcttaaattgttttacggtgaaatgtttcactgtttcctctatgaataattaactagtggagtggaatttattcatttatcatatccacataattcatctttattttcatttgtgcatataatatatatcctttaactttctcatgcttaccatttaggctttttgtcttcctcaaccttcttaaactttaatatcccccttaaaaacagatgaaaatagtctttcctcctatgaattttcccaatcactttacaaattattaaaggtcttccaattaacctggtttcctaataatgttgagtgtaatcctttcacaagcttttcttaagaaaatgaaaaacaatcatatatgtacaatactagagatatataatgagtcatgactcatattaatcgcggtttttgtaatatcataaagctttctactttaggcttgacagtgatttaatacagtaacatatcacataaatatgagaaatggaggctctttaattaggcctttacaatatacatatatattagaaatagaaagaaaagaaaaaaatcgaccgacaacaagattggtgaagaaacgcaataattgaaccattaagtacagtctaatacccgcagaaaatattacaccacctactcttagtggcaatgctgtactttaacatattgtcgagacaaggagaccaggttgcgtgaaatcatgtagatgatgatgcataaacaatcaccaaagttcaccctatgaatccaagcccttctagcttagtggctatgatcatagccgacatctcatacagtcacattccatttcggagtaaatcatgcgatgaacaaaatttagcttgttctcattacaagataacaaattggatactatatatcaaaaaattgtgagtgttaggatttggatcaaatctaactattagagaacgataatataaaaaacatacatgatttgaagtagtttactataattttgatagatttagaatttggaaatagagaacgattatagattttgctagtagaatttggaaaaagaaatgctattaaaaaacagaatatattctttttgtttaacattttattaatataacaaaccaaaatatagtttccgatattggccagaatatcgtcgggctacaaaaccggaaatagacattacggataaagcttaatccgtattttcactctatttcgcgtttaatactttgtttgtttactattaagatcaccatactatataacaaacaaacaaaaaaggtcacacaactacaataaaatgctaacaagccgaaagtgtacggcagcagtgtgtaatcgaataagtatcattaaagaaggccatgctcgattcattactctataccattccttaatatattagtattacatgggcaacaacgaaacaggataaaaaagagagagtgatcagtgatgatggatggtc

SEQ ID NO: 6640 - DNA, 3000 bp, Unknown
  misc_feature (1)..( 3000): cDNA_ID_1815117_gDNA_ID_1621099_Annot_ID_55799 3000 nt of promoter + ATG
tagtggattaaggcattaagctgtccaagttgcttgtattttcttttcattttattaattaaaaaaaaagttcaactatttattgactaataataatacgtgttaaatggttatcggtttaaaatatgggccataggcccagacttgaagaaaaacttgaaacccaaagttttatttttacttgttttctttctcagtgaatatctcccaatcaagcttcttcaattttgcttgctctctctcttacacggccaatcggtgttttcgcagctttcaggtttgtctcaatctcaaattaaatcggagtcaagtaataacaattgataaccctaattgtttcaattatattgtaagatttgaaattttgcagtagatccggaatcgtattctagttctggaatcgttgatctcgatggaattttttttaagatttcttcatacacatttggttcaaaagatcacataattttattttaatttgataagtatgatgattctgctaagtggcattggataaagttttcatttttgcaatacgtctaaacttgtctatgtcttgaatgaactctctgagttgcttaaaaagtcttgtgctttctttattacacaggcctcaatacaagacattctatataagcatattgcagaagaggcggttctaattgttgcatggagttgaacaatatgacgtagggaaattctaatttaggggaggcctcagagtttgcactaacttcataatcagctctggacgttgttgattgtatttgaacaagaatgtgtaggcagaattgtcgcgcgaaatcctcaccggaggaagtgatttcaactgatgagaatctcttgatatattgtaaacctgttcgactatataacatctttcaccttcgctctctaggcaacgtatgatttggccttcctctctcatcattttagcttagtaatctttcatctcctgtgtagatcacccactaatagtttgagtttgctaagctgattatggtctgactcatggcgagtgtgtgcttcttttgtctcctaatgttatttgaacttgttgtttgttgttgcagccatcgtttctgccaagatgcttgaactacaaaattggggcaaagcgcaaaagaaagtatgcgtttcttcttgaatgtagttgccacagtgatatgttatttatcttacttctaatatggaagctgatgaactatttatctttgttgagtagatatggacataatgaatggtttcttctttgttcatgctatacacttatattttacaaaattgtgttttgcttaggtcaagatctactgggatggtagttttcaactataaggattgtaataatacattacaaagaactgaaggttagtctttttctgttcttcgacaaaattcgatgtcaatgtctatgtttctctagatgatttgttatttactatttttttctgtattgtcacgcagttagggaggattgttcttgtccattttgctctatgctatgtggtagcttcaaggtgggcaactattacaactgaggtttcttccggggcctttcatatctaacactgtgaaatgctactgccgtttaatgctatatactttcactgtttggttacatatttttgtgtttgttgtttgtcttcttgctctttttaaactgctgagtgtgtgcttatctgagaaaacatgttccagttcgagcttacaatccattgtcttgtgtctatgcaggggctgcaatttcatttgaattcatctcatgatttatttgaatttgagttcaaggtatgtggttttatggaatttcttgttttgcctatgccgttagtaatgaggttatagttaaaaaagggtctttcctattgtagcttttggaagaataccagacagttaatgtttctgtaaaacttaattccttcatatttgaggtcagttactttaaacttggttaattgggaaatcctatagctggtgaaaatttggtttatattccatccttatttgtactaggaagaaggaagtgatgatgataaatttgagcccttctctctctggtaactctcagaaccccttgattaaataccttaatagcagtaactccttgcttttcttgtcagtacttctctataaatccaaccacaatgttttgcagctcgaaacctcgtaagcgtagacaaagaggtggcagaaataacaccaggagacttaaagtatgctttttaccgttggattcacccagtttagctaatggcacagaaaatggaattgccctgctgaatgatggtaaaatcacatcttcttctgtggtattcgttgtggcttagaacttcattttacagaagaagatacaatgtcctgattgtttagtttttgtacttctcctcgcattcttcttgtgagggtaatgttaccagaactgatgtacaaaattaatggcatgctacaggaaaccgtggtttaggatatcccgaggcaacagagcttgctggacaatttgagatgactagcaacattccaccagccatagcccactcttctctggacgctggtgctaaagttatattaacaaccgaagctgtggtccctgctactaagacaagaaagttatctgctgagcgatcagaggctagaaggtttgttcatcatgacaccccgtcatcataattaccatacctgttgttacaaatgttcttcctattatggataagtgtttactgtactgccatattaaccgagaaaatttcttccagccacctacttcttcagaaacgccaattctatcattctcacagagtccaggtgatccaagttccttcacctacttcttaggcattttctttaaattgctcatgatgatatcttatcaaagcatacttggtttgttctcatctaaatttgtattttgattctgtatgtatcaacgcaaaaaaattatgtccatgttgtctccgttttattgccactaaccaaaaactgcatgtttcttgtgacaagcca

SEQ ID NO: 6641 - DNA, 3000 bp, Unknown; identical to SEQ ID NO: 6637
  misc_feature (1)..( 3000): cDNA_ID_1815113_gDNA_ID_1621099_Annot_ID_55800 3000 nt of promoter + ATG

SEQ ID NO: 6642 - DNA, 3000 bp, Unknown; identical to SEQ ID NO: 6636
  misc_feature (1)..( 3000): cDNA_ID_1815101_gDNA_ID_1621099_Annot_ID_55803 3000 nt of promoter + ATG

SEQ ID NO: 6643 - DNA, 3000 bp, Unknown; identical to SEQ ID NO: 6635
  misc_feature (1)..( 3000): cDNA_ID_1815097_gDNA_ID_1621099_Annot_ID_55804 3000 nt of promoter + ATG

SEQ ID NO: 6644 - DNA, 3000 bp, Unknown; identical to SEQ ID NO: 6634
  misc_feature (1)..( 3000): cDNA_ID_1815089_gDNA_ID_1621099_Annot_ID_55806 3000 nt of promoter + ATG

SEQ ID NO: 6645 - DNA, 3000 bp, Unknown; identical to SEQ ID NO: 6633
  misc_feature (1)..( 3000): cDNA_ID_1815077_gDNA_ID_1621099_Annot_ID_55809 3000 nt of promoter + ATG

SEQ ID NO: 6646 - DNA, 3000 bp, Unknown
  misc_feature (1)..( 3000): cDNA_ID_1815069_gDNA_ID_1621099_Annot_ID_55811 3000 nt of promoter + ATG
aacatatcgagatttgtggcctttgaaagacctagaacttccttagatttatctttctgagaattcgaagtggctaaaaagtggacaattaaggttttgattgtggtggccggtgtacggagccagcaacaaagagcatgtaattaaattagtgctctattgtggtttataggttgtcatcattcggttataacattgttagatatactaagaaataaaacatatctttctgtcatcggtcgtttttacaaatgactaacatatatttaccgtaattactttagaaagcttcggcatctgtttaaagtaataaatcatcaacatgacttgaaaaacaaaaaaatgcagatatactaactagtactgctatatatatatgaataaaatttctatatagttctttttaaatgtatgatttctgttattactaatacacattggaaaatggttggggcaatagagaaagacagacatgtgaacgtcactttctttttagctgtcctcttgggtcgggcatatctatattccctaccatttattcactatacccacctttgtcatattcttccattctcaaattcaacatatttgaaaatttctcattttctttggattttatgtatttctacacctccataaaatgaaagaataaatgaatttcaatgagaatatatagagaaaatgtatgcaaaattccaatgacagcttgcaaatatagccttttctttggtttgtctcttttaattattaggaagaacatttttacacatatatatgaaaataacatatctgaataacgtattttttgttaaaaggaattacggatcggtgagtctagtgactatatacatcgatattatcgactaacaatgagaggtattgtcgtattgatcatattgtgccttgtggtatttatccttccaagttgtaaccatatttatgtcctatatatgactacgaatgcaatgttccatagatagaagaaatttacatcacatacaaagtctctcttcaagtagagtcaacgataaacttattaagcacataatgcaaacaaatgtctgaatcgtacatcaaacacaaactcaaatattataaaatgatgaccactaataatttgagggaaaaaaatgaaggtaaattacaagaaaacgatcgaggctgaccaattcaataatcatttcaaacgaggagaaaatgggctgcaacaactccaacaacgcatgaaagtgttacgacgttgtttctaacattgaaagctcctgaatccggcgaagccgccattgccggtggcatgggtcctggagaaggtgaagattccattccggatggcatcggcggcgaaggcatatccggaactgttaatgggcttgggcttgtagatggagtcattggcatcattggtggtgaagccatgggcattggtggtggagccataggcataggtggtggagtcatgggcatgggtggtggagtcataggcataggtggtggagtcatcattggcatcggagacatcactggaggaggaaccgagcttccaccgccgctagacataggcggcatggacattgagccagaaggagccatcatgggagcttgagctaaagagaaaggaattaaaaccatagacaatgtgagcaagaagaaggcttgtgaagagaaagaagaggccatggctatgtgtgtttgtgtgtggaatagtcgtttatgtaaagtgatatatagacagagatatgtgtgagagtagtaaaagaaagagtgggagagaaaagtgaaggttctttgtgctatttggatatatattagagattatttgttttataattttggatcgttggatacaatgtgtgacacgtatcagtcgatggataggtatgagatgctgatttattttcctccacaaattggaaagaaaaaaaagatgaaaactccaaagttgaaatctcattgtaggtacagatagaatagtcaatatatatggaaatggaggatattatgattacaatgccttttatatttattcttttaaagacatagtggaaacgatcaatcggattcacgggatggtttttaaggggccatatcaaatttattagaacaggtcattactgatgttagccattcatatgttagaacattaatgttcattttgttttctgtaaatttaacagaaaatttatgataaccatatcaagatattctataatattatcaggagaagacaaaatttacataggacaagataaaagagcataatgctatgttacaaaacaaaaaacgaaaaacaaaagggaccatttgtgttgtatttagtcacacagcctgatttagctccacggccaatattatgtccgcaccaactaaccgacattttggttaccccataccatttcctttgtctctcacgagcactctttggccatcatttactatttatccatctttacattataccatcacaaatgcacatgttccatatatgatataaccatccatacatagtcatgcatgcatgtatatatatattttatgggattactttcatttgaaattgacgactaatgttgttttctgtaaccatgaactccagtttttctctttgcatgttataaattgaacttctagagcatcaaaaacattaggtaaccaataatagtatttgagaaggttattcaaatatatagttcgaaatgcagcaagttttagcatcttgaataattgcattgttctaaaaattatctacaagactacaatcaatgaaacatttccaggctatatgggctcatttaaaatgggcctgtagacgcatgaggccgtaaataatccagctggcaaagaaatgagcgggaacatttttatgtacaaaatcctcgaaacaaaacatcacacgtaccgcacgtgccattctcccgctccttctccatttgccccccaaatctcaaattctcaaatccctagcttctctctctctccctcagattcacagcatttgcaatg

SEQ ID NO: 6647 - DNA, 3000 bp, Unknown; identical to SEQ ID NO: 6632
  misc_feature (1)..( 3000): cDNA_ID_1815062_gDNA_ID_1621099_Annot_ID_55813 3000 nt of promoter + ATG

SEQ ID NO: 6648 - DNA, 3000 bp, Unknown
  misc_feature (1)..( 3000): cDNA_ID_2107486_gDNA_ID_1621099_Annot_ID_55815 3000 nt of promoter + ATG
aagaagaaatagacatataattataatctctagtagagatatttgtactagtagtctatgcacatgatgtgtaaaaccagtggaagataaatgagtctttatgtgaaagaatagtgaaattaatgagattttcacaagataagaaatgtattatgaagagatatattctcttgtggtggatgtaatatttttaagtatctaaagtctgacaataagagacagaacactggatatgacatttatatgaaattattgaaagatataatctctgaaggattaattatatgagaattatgttctctagaactctactcgatcgaataaaaagaaatatgtaacatgacatataatcatataaatgtatatttatgttgagtttgtcaaaatatattgatcaaactaatatttgttttgaaaatcattaaaactcgtacagagttatcataagtaatacgatgacaataatctatgataaaatatcactagataatgatatttataagtctatatgaaaaccatataattttgatcattaagattatggttattaattccaacgagatattgtatttgattgaaaatcatctccttaagaagatgtttccgagggggagattgaatgatatgcgtggatgtaccctttttccttatcatagtttttatcccacatgatttttctatgacaaagtttttaacgagacattaaagaacacgcaaataatacacttgatgaatattaagaaattctatcaatcatccaaatgaatattatacactaatgatatttagagaaataaataagatggtcaagatgaatcatctaaaagattcatgagcagaagaatgacgttgtactttatccagaaatttgttcaagagaagatttggcagacttattctcaaatactgtttattctctgccacatcttctaatcatgcagagattttactaattcatgaagctagccgcgagtgtgtatggctaagatccatagttcaccatatacaagaagactgtggtatgtatgcagggaaaaaaactccaacaattatgtacgaagacaatgcagcatgcatcgcacaactcaaagacggatacatcaaaggcgatagaataaagcacatcctaccaaaattcttttacacacacgatctacaaaagagcggcgatgtacgagttctacagatccgttcgaatgataatctggctgacttattcaccaaggcgctacctactgctactttcaagaagttagtctatcgtatcggattacgccgtctcaaagatctcgacgaatatactcataagggggagtaattgtatgttgcactctttttcccttaaccaaggttttcctattgggttttcctggtaaggtttttaatgagatagcatttcaaatactttacgagttatggtactataatggtcatcaagggggagtgttatgaataaagatggatgcccattataagacccatcatctaagcccatcatttagatgtttgtagagttttacctttttcttgtactcctatataaagaacccttttctcaatagaaaacacactcatttcttctatctctttctcaagagaaatttattttcaacggatacttgtgacttttggagactcgagaatctaaacaacggcgatctacaaagataaagagttattgagctcactatgccaagttctgaaaaggcccacttcaaattataaaggcccagtttaagcccactatggaaacgagacagaagcaaatgggtataatcttcaagtcaagcgaacgatcggtgacggtgttatcttaccgccggagccggagtttcccactctattgtaataacagatatttcgaccggagtttctaagtgaatccaaatttgttgttcttcgttgcggctccatctctcgctgtgtatttatagtcaggtcttttgagttatcccattttgcgcgatcccgtcttcaccgtttccatcttccagcgagcacatctctgttgatcgataattttgtacctagttcaggttagttgcgtaattatacttgtgtaatttctttttttggattctctctgaactgatttgctgggcgtggaccttcggttttgttcatttcgtagtcctctatgcgaatgtttccagcgtttgatctttagatctgtagttcgattgtatgcttctaatagttattcgttgtcttgtacatttgatctataatgagaactgatgcgcggttttagtcgaacgcgacatcgtagttcggattagagagtgtactaatctttgtttaacaaagatggcatttcatcttttgactgtgtgatatgtcaaacccgcagaatccataaaactagtttactttgatatgttttgttcttcttcattgaatgtttgtgtggtgtcttgtagttgtaggaaagatgaacaagctgttggaatatgggagaaaagctatgttctatgtgagagttctctccggctatgaagaaaggagaatccggagttacaggttgcaactcgaaaagcgtatccagcaggtttctttctcaccatgcctctatctaatttcttagcataaatggtagaataagatgataaaaccctgctttggactatagttggtcgcataaatttgaagaaccctgtctataaacattattacccttgtttttattcattgttaatggaagtcaatatgtgtacttctagtttatgataattgaataatatctataaattagaaaagcttagtacttattgtacattgtgaagactgctgaaataagatcttccttacattatagtttcctaatcgtatagacttctgtacttgtgacttctagcttctagcttgggttggtcatggacctcatggttacctttttatctgatcaaacctctggtcctgcaggctaaccaaaggaaagtagagataaacagacttccagagcagattgtattatctgaagtccgccgtatggttgaggag

SEQ ID NO: 6649 - DNA, 3000 bp, Unknown; identical to SEQ ID NO: 6628
  misc_feature (1)..( 3000): cDNA_ID_1815046_gDNA_ID_1621099_Annot_ID_55818 3000 nt of promoter + ATG

SEQ ID NO: 6650 - DNA, 3000 bp, Unknown; identical to SEQ ID NO: 6626
  misc_feature (1)..( 3000): cDNA_ID_1815035_gDNA_ID_1621099_Annot_ID_55821 3000 nt of promoter + ATG

SEQ ID NO: 6651 - DNA, 3000 bp, Unknown; identical to SEQ ID NO: 6625
  misc_feature (1)..( 3000): cDNA_ID_1815032_gDNA_ID_1621099_Annot_ID_55822 3000 nt of promoter + ATG

SEQ ID NO: 6652 - DNA, 3000 bp, Unknown
  misc_feature (1)..( 3000): cDNA_ID_2990093_gDNA_ID_1621099_Annot_ID_55823 3000 nt of promoter + ATG
gattgtcagatctttctgtctacatgtgtagactagaaatatcttcatgtgatatttatgggaaaccatgtcttgtcctttctgaaaatgatacaacataagaagagatgtaagagaaaatatcttctaataatttttatttcaaagagatatttaatttgttttggttacagataaactcgttagcttatatatctacacttatgttcacttatcacatcacaaagcaggaaaatatcttagcgacaatgacaaaccaaagctcaactgttactacacttgaatttctttagttttacaattaagtctagacgatgatactctttgaccattgagataaccacaaaaccaaatcagtttgccatatacagtctaccttcttgcattcacaacacagaaatatttctacacacgcgttaaacaagactacaaaatattagcttggccttaacccaattgaaaaaaaaaaagcacaatcactaagccctaacaaatttacacatctcatccatgaatgaataccaccaagttttaccattgtttcatagctcacaagtcacacgagatcatacgatttctaacccaaatcctagatttctaactataatgacagaaaatattgttcagaagccttagttagatatgttaaccaaattggtacaagcaacatttaaagaacagagaaagaaaaaggaaccaagaaaataaaaaagatgtgccagagattgggttctagaatatcctagatttttacaatgatgaaatctaaagccaaaacaaagaagcactaatcaaatgtagtcgaccaaataagtgaggagggtaaaaaagagaagtggggagggtaagcaagtaggttacgtggaaggaagatatcaacgcacaaaaagagaaacactcaacgttaagggaccaaccacaaatcttggatttttgctgatgcagtgtgtgaaaacaggtccacacgctttgtacttttttcatcatcggtctacaataaagctcaagtctttccatggacagagataagcaagaaaaagtattaacattgttcacctcaaaataatttaggaaaatgacaatgagatttttacctcaaaagccaaaatcaacatctacccattctttcactcgtcacaatcatgagtttcttacaatgcttaccttagagtttagagacatattctcacaaaaaaagcttgtgtctatttcaaattcttgaccgtagatgtcacaacatgcatatatcattgaaaacagagcaacacaggaaaccaagcatatgtatctagatatacttagcaagacataactatagtctttgaatcaacatagggattaatgatagagaatgaggaagctcaagattttatactcagtttcttacaaaacaaatttctctctaactgcaaaaacaccaattaggatttgaagagcgtacctgtttgagtcaatgtccaatgtcgtccccccgccttctacatttcttagcctgctgaataaaagcacaagccaaaatgagaaggtgccaaaggcgataaggatcaatttctaccattcaaaaaactaatggtgagaattagaaacgagagaaaactacttgttgaggaaatagccaaaagcgcaatcttcgtcacctgaataaagaccaaaccgtcactttcaatgagtcagcaagaaaaagagagagagagagagagagattctctataacatttgagtcgacatggattctaatgcatcaaaagtcatctccaataaacaaacacttgaaactcacatggctaatagaacaagatcaaagccttaagtattaagcattacagacactactggctaacttttgacacatgttcttaagtaacatagtatcaatatccgtgaatcacatcgaacacacacaacaagggcttaatgcatcaaagtcctgttatttccatataacaacatatttcatttacaaacagaatgcagcattcaggcagtccaaatggaaaggttgacaaaaaaatataatcttgtaactctacatatatggcagaatgtaataaccaggcaagaaaaaaacagaataaacagatcaatgagtatgatataaaaaaaagtcacaaagaatgtgccacagtgaacaagagggccatgagaagaaattttcaaagaaaatattagcattgttagaattttttgggtcaatggatctgtcagctgcttagttggaaaacacaaatcttacaggaaggaaagtccaagaaaaagaaaataagcaaagttaatagccaccacaagaaatttcatacagaaataattaaatcgttgcacttatcttcttattcaaactaaaatcaagagaacttaataattttcagccacacgaaccatgtgttcaaagccaaaggtgagaagccaaaattatcagcttatctccattaacaagggaaaagcaagactagatttaagagttctctgtaactaaaaactgcaggagtgagtaagtaaataattcaccaacaggaaaacaaaactcaattatctatagctgaatacacatgtaaatgagaatttattaactaaaacatcttcctttgtaactgatgtgacatttacaatttttcattttgaggtgtaagaaccgtgtgacaagtgaaaaggttaaaataagcaacctttgtgatattttctctccactttttgaaattgggtctccaaaccacagccaatcaatattctttataaatacaaacacacaaacagcatctttctctcaaacacaaacatatcttctatcaaacaccaacagctctattctctacctcatttctcatcataacaaagagagagaaaaaaactatggaattgacactgaattcctcgagttctcttatcaaacgtaaagatgccaagagttctagaaaccaagaaagttcctccaacaacatgacctttgcgaagatgaagccgccaacatatcaattccaagcaaagaactcggttaaggaaatg

SEQ ID NO: 6653 - DNA, 3000 bp, Unknown; identical to SEQ ID NO: 6623
  misc_feature (1)..( 3000): cDNA_ID_1815028_gDNA_ID_1621099_Annot_ID_55824 3000 nt of promoter + ATG

SEQ ID NO: 6654 - DNA, 3000 bp, Unknown
  misc_feature (1)..( 3000): cDNA_ID_1815024_gDNA_ID_1621099_Annot_ID_55826 3000 nt of promoter + ATG
ttggatttcaatgaaggtttctgttgtcatcaatctggtggagttgtgtttgtatgctgggacagcaagagatacaccgttggctgctgtacaggtacgcttccatgtaccatgttcatttcatttgtcatatttatctaggagtatttagtattattttgtcctttggagctgccacagctgatacatttaagagggatataagtaataccaactagcgagaagttgggggcatatgcatttgttaagttctttcttgaagaaagccgagggtagaggatccctttgcatagatacttcatgcggaattgcctcactctggaactggttccccaaaaagatttcaaaattgttgatccgctatattgatatggatttattcaaatcagtcttttgtgaaattcctttctagttcctgggattagtcatgtgattgttcttatgggaccctacatcttctctatttctttggctccattttctgttctcgtgatctattttttcctagggattttaaatcaaagggacttcatagcagaaacaacctcatggcacatagttaacatctaaacaatttttttcgtatatgcttatagatctctggtggctggcttctctacaaatccaatacacacgatgagggtttccttactgcaacattgaagggattcagtgttattgacaaccgtgaaggaactgaaaaagagttcagactggctgtaggaagacctgcagatttagattttggagattcacattctgtgactgataaaaatcagggtttaactcagtcacatgtaaccacggggagtgatattggaccctttccttcgatgctcactcttgatgcgcaatttggtcagttgtcaacttttgtttccgtttctattcaaaggccacagttgcttgtagctttggattttctactggccgtagtagagttttttgtccctactataggcagtgtgctatcaagtgaagaagataaaaaccttaatatggtcgacgcaattgtcatggataagtctatctacaagcaacaaactgctgaagcgtttctttctcctcttggtcctttgatcgctgaagatgaaaaatttgataactttgtttatgatggtaatggtggaactttatacctgaaagatagaaatggaggcatcctctcttcacctagtatagagcctattatatatgtaggaagtgggaaaaggttgcaattcaggaatgtagtctttaaggtatagaaattctatattcaattttattactcggtgttagatcttaaatttatttctgttgtccttttattttgtctcacttttttcatattgacacagaatggccaagttttggattcatgtatctctttgggagcatgcagcagctattctgtttctagagaggatggggttgagttggaagtatatcataaagccccacaacaagactctgagaggaaggaagatccggtttctcaatctcccagcaccacaacagagaggtccacggaaatgatcattgagtttcaggttcttatagtggccaactttcttctttgtatgtgcataataagccaaggaaaaattcccctttaatgtttgaagctcgtttctactgttgcaggctatcggcccagaacttaccttctacaacacatcaaaagacgtagttaaaactccattactctccaacaaacttttgcatgctcagttggatgcttatggcaggtcagtggtttctctgcgattgggaactgaaatttaagcatgattagttgcataaaaattgatcagccttgcacagctgttgttcatatttctatgtcattcctttgtcttttttttactggtacagggttgtcataaagaatgatgaaattaaaatgagtgctcatacgttgggtctaaccatggaaagtaatggagtgaaaattctggaacctttcgacacctttgttaagtattcaagtgtttctgggaagactaacatacgtctttcagtttcaaacatatttatgaacttttcattcagcatcttgagattgttcatagccgttgaagaagacattttatcatttctaaggatgacatccagaaaaatgactgtcgtctgctcagagtttgataaaattgggaccataagaagtatgtagagttatttgttgaaattttatcagttcatattgtttttgttacctggtacttagtacttatattgcatgcagatccctgtacagatcaaatatatgcattctggagaccccatccaccccctggttttgcgagtctcggcgactatttgacaccattgttagtctactattctaggatatactatttacgcaagagcctttgcaagttaattaattggtatattacatggcagggacaagccaccaactaaaggggttcttgtggtcaacaccaatttgatgagagttaagaggcctttatcattcaaactgatatggtcacctttagcttccgggggattaggtggttcttcgatggatgacaaagatgaaagagatagttcatgttccatttggttccctgaagcaccaaagggttatgtggcattaagctgtgtggtatcaagtggaagtacaccgccttcattggcctctaccttctgcatcctagcttcttctgtttccccttgttctctcagagattgtgtagctatcagctccacagatatgtacgctgctatgaacctttcacttttacttttacgagtagctcactttctatacacatggacaagatgcatgcacaaactaaaatatatggggatgtatgttcccttgtgtagacatgtgcaaacatgcttactatctccttttcctgacatatatcataagttgttttttgcttgtgtctatgtgacttatatgcggaagtctcaaatgaaaactggattttataactccctcttttagggttctatttatttttcttttcttacccaatacataaatgattccattgtagtatg

SEQ ID NO: 6655 - DNA, 3000 bp, Unknown
  misc_feature (1)..( 3000): cDNA_ID_1815016_gDNA_ID_1621099_Annot_ID_55828 3000 nt of promoter + ATG
agaggaaaaaactattctcaaagccacgacttttgagaaagaaaatggaaaggtagaatcagattttcagatctcgaggtggtagatactcgagaaactaagaaacaaattatatatttcccttttgaaggttcgaactctggtctgtgtggtcattgcgctatcaagaaatctcgacctttttagttcattctgagtttgctgttcctttcttctccagctcactaggtggcctgatatagactgacctgtaaagcttaaaaatatctaaaaacataaacttttaacttttacgggtgaaatgtttaaattaaaataaatataatggttaacaacaaaaacatacaaatttaaagatcatccaatgatttttttttttttttacatacatccaatgaccatctaagtgcaaaatttatattattataattaaatattaattttttaaacataattaataagaaaaactttaataaaaaaaaaaaactaataagaaaaaccataaataaagtagtacaaaattattaaaaaacaaataaatatcatagtgatatgtttattattacttcatgcatttggttgatcaccaaaaactacatcaagtaatatgacaaactacaaaaaaaattgtgttttgaattcgtagatcttcaagatcgacaatatttttacaatacttatgttcatattttgtctttcttcagtttgaattgatactatgattttgatgatttttttttatatagatatatatatatgatctaagtatttgtcgcttatgtgattttcttttttcttgtgactagccgctatcgtctgcaaccgcaaatatttctagaaatgagattttgaaatttagcgatattgagtggtgcaaaataatttaaagtaaatttctaaatatgttttaaatgctaacaatcgcaatcgttcacaagtttgcgagttatagcggaaaaaccaatcaaaattcatgatatattatagcaacttcacataattcgtctattcaattaaattcgatcacctatttgtatataattttggttgattcagattttagttggttataatttaaaaaacttcatattttaagaaactttttgtatatgtttaactagaaatgatatattttagtaatttcggttagttcgattaatcaaaaattaggctgcgtaaatccgatttatctaattggtttatatggtataggaatttctccaccggttaaattatttttgaaacttaattaaattttggtttagttcagttactgattagttttttctttttaataataaagtttatgtcgacaattgataaacaacacagcaacacactgcactgcaccgtcatcaacagcagatatttttatattccttttacagagccgaaactctcccccaagtcattgagtcatgactatttcacatttccaaccgcctcttgcgtgctcttgaggaaacgatcctcatgcctctccttcgattccgtttctagtccgatcgaaatcgaactctttgagaatttcattctcttctcacgattattgattttacatttgttttttcccttttacggtgagaattttgatttgcagagttcaaagatgttggaagatcaggtagcttacttgttacaaaggtacttggggaactatgtgaggggattgaataaggaagctcttaagatcagtgtttggcaaggttagattgtttctattttctcgctgattttgtgtaatgtccggatttgagtttaaagttcaaatgtgctattgagtagcgattttgagttgtgaacgaatgtgagaactggttaggttttgtgtgctgtgattgactgcgatttatggaattgggttctcttcgagttatattcgggtagctagctattaaacggagaagtcaatagtcacacttctggatttttgagtttagtgtttcttttttcaggcatgtgttgggtgttttagttgatcggaactgttcaatttcccgtgtggcatattacatgattaaaatgatgtaggattgctgcttgctttcaggctttatagcttcttcgctcatggtttatcttggtttgtgctggttgttcacttataattgcttagttacttctcacagttgttactaagaacagatgattaaataaaaagaaggttttagcatacccatgtcaataaatttgcttttattttttccatttggttaatatagcttgtggtttaacttgatttcgcaggagatgtagagctgaaaaatatgcaactaaaaccagaagcacttaatgctttgaaattacctgtgagggttaaagctggatttcttggatcagtcaaactcaaggtgtgttttgtgtgtgtgtgttttcttatatatatcctatctaacctaaacaatatctacttgagtgcattagttatcttttcgtttttctattccatttgctcacgagtagtatttcacttgttttcatggtctctatcagtcatcttactcaatgtcatacaatatttattgtttttattctgggactaagtttcttcattgaattcatcttccaatagttttataaactcagttagacccattttttgatatgtttaaaaatcatcattttaggtaccatggaccagacttggacaggaacctgtagtggtttatctcgaccgaatttttgtattagccgaacctgcaactgatgttgaaggacttagtgaggattctatccaggaagcaaaaagaaatctaatacgggtgagataggtcgctcatattatgaccatattccatttatcttatttgagttattgaatcaattttctgtttgtggtaaccaggaaatggaaactaaattagttgaaagagctcgtcgactacagacagaaatggtgtggctagtgctacttgctcgtactagataacgtagcgaataatattgtactaaactaacaaccgtattttcttattctcttcaaagaacaaatcatggatg

SEQ ID NO: 6656 - DNA, 3000 bp, Unknown
  misc_feature (1)..( 3000): cDNA_ID_1815276_gDNA_ID_1621100_Annot_ID_55829 3000 nt of promoter + ATG
aaacatatcaaaaaatgggtctaactgagtttataaaactattggaagatgaattcaatgaagaaacttagtcccagaataaaaacaataaatattgtatgacattgagtaagatgactgatagagaccatgaaaacaagtgaaatactactcgtgagcaaatggaatagaaaaacgaaaagataactaatgcactcaagtagatattgtttaggttagataggatatatataagaaaacacacacacacaaaacacaccttgagtttgactgatccaagaaatccagctttaaccctcacaggtaatttcaaagcattaagtgcttctggttttagttgcatatttttcagctctacatctcctgcgaaatcaagttaaaccacaagctatattaaccaaatggaaaaaataaaagcaaatttattgacatgggtatgctaaaaccttctttttatttaatcatctgttcttagtaacaactgtgagaagtaactaagcaattataagtgaacaaccagcacaaaccaagataaaccatgagcgaagaagctataaagcctgaaagcaagcagcaatcctacatcattttaatcatgtaatatgccacacgggaaattgaacagttccgatcaactaaaacacccaacacatgcctgaaaaaagaaacactaaactcaaaaatccagaagtgtgactattgacttctccgtttaatagctagctacccgaatataactcgaagagaacccaattccataaatcgcagtcaatcacagcacacaaaacctaaccagttctcacattcgttcacaactcaaaatcgctactcaatagcacatttgaactttaaactcaaatccggacattacacaaaatcagcgagaaaatagaaacaatctaaccttgccaaacactgatcttaagagcttccttattcaatcccctcacatagttccccaagtacctttgtaacaagtaagctacctgatcttccaacatctttgaactctgcaaatcaaaattctcaccgtaaaagggaaaaaacaaatgtaaaatcaataatcgtgagaagagaatgaaattctcaaagagttcgatttcgatcggactagaaacggaatcgaaggagaggcatgaggatcgtttcctcaagagcacgcaagaggcggttggaaatgtgaaatagtcatgactcaatgacttgggggagagtttcggctctgtaaaaggaatataaaaatatctgctgttgatgacggtgcagtgcagtgtgttgctgtgttgtttatcaattgtcgacataaactttattattaaaaagaaaaaactaatcagtaactgaactaaaccaaaatttaattaagtttcaaaaataatttaaccggtggagaaattcctataccatataaaccaattagataaatcggatttacgcagcctaatttttgattaatcgaactaaccgaaattactaaaatatatcatttctagttaaacatatacaaaaagtttcttaaaatatgaagttttttaaattataaccaactaaaatctgaatcaaccaaaattatatacaaataggtgatcgaatttaattgaatagacgaattatgtgaagttgctataatatatcatgaattttgattggtttttccgctataactcgcaaacttgtgaacgattgcgattgttagcatttaaaacatatttagaaatttactttaaattattttgcaccactcaatatcgctaaatttcaaaatctcatttctagaaatatttgcggttgcagacgatagcggctagtcacaagaaaaaagaaaatcacataagcgacaaatacttagatcatatatatatatctatataaaaaaaaatcatcaaaatcatagtatcaattcaaactgaagaaagacaaaatatgaacataagtattgtaaaaatattgtcgatcttgaagatctacgaattcaaaacacaattttttttgtagtttgtcatattacttgatgtagtttttggtgatcaaccaaatgcatgaagtaataataaacatatcactatgatatttatttgttttttaataattttgtactactttatttatggtttttcttattagttttttttttttattaaagtttttcttattaattatgtttaaaaaattaatatttaattataataatataaattttgcacttagatggtcattggatgtatgtaaaaaaaaaaaaaaatcattggatgatctttaaatttgtatgtttttgttgttaaccattatatttattttaatttaaacatttcacccgtaaaagttaaaagtttatgtttttagatatttttaagctttacaggtcagtctatatcaggccacctagtgagctggagaagaaaggaacagcaaactcagaatgaactaaaaaggtcgagatttcttgatagcgcaatgaccacacagaccagagttcgaaccttcaaaagggaaatatataatttgtttcttagtttctcgagtatctaccacctcgagatctgaaaatctgattctacctttccattttctttctcaaaagtcgtggctttgagaatagttttttcctcttcttctcatcagactcggtttcctagttgactcattttcaagatctgggcatctgtcatttctttaataaaagctttctttttttatttatcccttttgttttcagctgctggttgcttgtagtaggtatagttttgggtggccttacttgcttttcagcaaaagctgggagattgagatttcttcttcttctctctctttagtctttgggatctgcgcatttctcagaaattatatgggactctcgaaagcatgatgctttttgttgtctcacttgtaatttgttcgggactttgttgctgaagaaaactaagcaatgtctgtagaaacatggttcatgattcagaagactactactagctcatgagttcactggtacttggaattaag

SEQ ID NO: 6657 - DNA, 3000 bp, Unknown
  misc_feature (1)..( 3000): cDNA_ID_4254729_gDNA_ID_1621100_Annot_ID_55831 3000 nt of promoter + ATG
aagatactatacgtgagattcagtttctttctcatgcgtatgaggatcattttctgcataagatttgtatctagttttgaagcaggatcagcatgtttactggactgaataaattttcaatgtttcaggagaactatggtaaagccgaaccatcaaacgttgctaaggtgaaagctctctacaaagagcttgatctcgaggtttgccactaagcattaactcaaaccctttcgttagttagaccaagtagaataagagaacgtaattattgcttatgaaagtagagaacatgagagatgtgatatatatgtaacaaaatctgcgtttgatcttgattattccatagggagcgttcatggaatatgagaaggaaagctatgagaagctgacaaagttgatcgaagctcaccagagtaaagcaattcaagcagtgctaaaatctttcttggctaagatctacaagaggcagaagtagagacatactcgggcctctctccgttttattcttctgacatttatgtattggtgcatgacttcttttgccttagatcttatgttcccttccgaaaatagaatttgagattcttgttcatgcttatagtatagagacttagaaaatgtctatgtttcttttaatttctgaataaaaaatgtgcaatcagtgataaattgatacttgttaatgtggcaaaaattttgtgtcacatgagggtgcaacagaaatttggaaggacctgaggctgtttgagcttacatcaccttgcaaaatcgaaacagggtttggggaatctggtcctatgtcaaattagggaccattgttggagaagaagaattttcaaggacatgtgtaacagatagctccaggaagcacttaagaagttacaatagataaagacgagaagattagtggaaatgaatctatagtgatgatcacaatctaattgatgataaccgatttgagtctcatcttagacagtacattgacaacaaaggtaccatagttttagtggttctgattttctaatatagaccccaagaagatattacagagataacactggttcagcttttcagcttaacaataaaatacatctgaccctatatttatgcaatttctccgtcctatatctactatatcgctaaataatgtaacactgaaaaatttccctaatctacattgtgagagtccagatcaatagtccaatgcaaatgtggtagatagaccaccttgccattggctcagtacttgacgataagcctatatcagtaacacccacaagaaatcgacagtcaccaactgaaggatctaggaaggtgaccatgccaagtccatcaaagtcacagctcttttcatgttgcatctgcatctgatagtaactgttgaaagcgtatgagatattatctttttcaccaagctggctgcacgagcccccgtcgttgagcgttgtgcaatctgcttcactgcaagcaagcctgaggtggtcaccaacttgggtcatgtctcttgatgggtgagccacacaccaccttgaaggaaggtactgcacattttttgcattcttgagtcctctgttgcctagtcctaagttgagacgatacttggcctgtccatcgaaagagaagattccccaatgcctctcaaagttaccaggcagtgtgcttttcgctccttcgtcaagcaaaccgaaaagatatacatccgcaggaggagatccaggcctgagcggtgttcctttgttgctcaacacatggctaatgagcccttgattaaaaacccgggctgctgtgagattagcaccaactgctccatctgtaggccaaccaatctcaccaataactataggcatttgaccatatccaagcttggtgagagcagcaacaagagtgtcaaagttcccatcaaatgcattatagtaagtgttaggcccatccggaaccggatgactactcccctcaaaaaaggcatagtcttgtggaaaatccgagttcccatagagactaaggaaaggatagatattaaccacaaaaggagagccattggagttgagaaacgaaaccaattgagtcataatctgtgtaagctcaggccggaacatcccctgagagggaacattagactgatacgcatctgcgttgcaaggaaccaccaacttcacatagctagctagatttgctctaaccaaagattgttgcaggttaaccatagttgggactacatagttctgaaactgaccaccgtaaccagtcagaaacggctcattccctactgcaacatacctattcaacagatatattggtaaaatcctctgcttaatcatagcttaaagacacatatactctgagagaaaagatacctaatatcagcaccgtttttgcctatgaagcgagagagattttgctggacaaacaaatcagaattgaaagttgagagcatctcgttaggaatgccgatcattacttggattccagtacccattaacgctcgaagcgcatctggattcgcatcgaaaagcttcaccttggtgatcttgtttgctttgaggagatccaccactgtggaaggtctcatcttgtgaaatgacaacgttccccagttcacgccgattgcagattccacctcatgggagacgagaagaagggagagggcaaagagagctacacctacaccgcttcccatctttttcactgagctctctctcgggtgcaaagatagcaactttttaaaggttacagctttatttttataaacagactgcatgtcgttttctatttaaataaacgtcaagcagtgcggttactaaataggaaacgacatagagattgaaatttggcgacaatacaggttgatgcatcgctggatttgctggaaaacaaaccgtcaatctccgtctttatagagaaaaaaagattctcttctcttctcgttctcatcatcgtcttaaagaaggaattcgatttttcgcctgaacctgcggatttttcgattcttcaaattcaatg

SEQ ID NO: 6658 - DNA, 3000 bp, Unknown
  misc_feature (1)..( 3000): cDNA_ID_1815270_gDNA_ID_1621100_Annot_ID_55832 3000 nt of promoter + ATG
taaggattgaaaagaaaaagaagcagaaggagttaccagtatcaccgatgatgatatacttaaatctataagcataagacattgaagtggacgaatctgaatccgtaggttcagacaaaaacgaatcccttcttctcctgatgggtaaggtcaagaatccgacaatgtcttcacttttaacgtttttgaatgtttctatagagtcttagaaacttctagattgtgtcacttagagatttggtgtctcaccattgggatgattgtacaatgattggagattgatgagtctgttgtgaaggttgatacgtgccatttcttttcttcttaaataaggcaatagcctcttatttggggtcccatgatttggatcaaaaaaaaaaaaaaaaaggtcctttgataaaatttaatatataattaataaatttcaacataacaaaaagtacaaaaatatagaaaattaaaaaaattatcctctattatttttctagttagctaaattaacaattttaaaaataaatgataatcaatttttagtgattttataattttaatcataaaatagataaagatctaacaaaaaaaagtttaataatgattggcaaaatttagttaaaaatcttaatataaattttgcctcaggcctccgaataacttgtcatagcccttgtaagttgtaagataaaacagtttcttttgtttgtgactttggctttttgttccttttctcaatttgcatgtctttctggtccaatattatgattgcttgagctcattttacccccttgttcaatttcgttgtcgtctgttctggttcacactcaaagacggttggttttccagcaaatccagagaaatatcaacctgtattgtcgaccattgcaaacttgctggcgtttcagtatttggtaggcttttatttgaaagacaagacagcacgcggaacaaaagccaatagactctagtaaagaagaagaagaaatcatgtgaaacaactgcaaaaacctagacacgaaatagcgggaaggagggctttgttaaacgagtaaaccatgaaagacatggaaggcatcgttcatcatgacaaaagctaaagggattactttatttgttgtataacacggtaaatggaaccacatgcagccaatacaattttctccacaaacactgaacttaccttcatgatatgatttatatccttactaccttttccagtacaatgcaaatgggctacattcctacctccattagatccttacgcaaacacatcttaatttttagatatatgaataggcatacacgtgtattgtcaaaccgttccaaaaccaaccacaacacagtcaccaaatcgaattccaaaacgatttacaactatagaaagaagcagagacatttttgctatatcatatgtgatcatttttacataatgacatagacatatttttcccatctcagccgcagcaccctcctccttgcgaggttgatccatctcttccacctgatggtcctggaattcctccatatccaactttgattccatatgactcatttgacacatcaaacacaccatcttgaatcttcttgtatattgttgcagctgtcttaatgaatgcctagcaaaaaatcacaacaccagtcgaaatcatgttaagtaattgggtaattggcaaatataccacattggaacgtatgggggtttacctcctcaacattctgagcagtcttggcagaggcctccatgaatataagaccgtgctcctttgcaaactgctctccttcctctgtactcactgcccttctgtgagcaagatcacacttattcccaatgagcattatcgtcatatttgcatttgcatgctgccttgcatcttctagccagctagctagatggttaaatgtctccctcctgcaaaaaaaacggaggtaaaaaatatcgtaagtgtcttgactgaaacagttataaattcaaaaacacaaatctaattctggttcagatctttaggagtcgaactccaatctagaaaagaagaataacgtctagttactacttacacaaaaaaaataatttgcttccctgatcaactctacttttgataaacatacagaaagaagcaaatgatttaccttgtgatatcatagacaagcaatgcccctgcagctcctctatagtatgaccttgtaatagacctaaaggattcttgaccagcctgtcattacagagagatattagccaagacaaaggatatgaaacttcagaatagccaagtcgcctagtcaaagaaaatcaaagcatatatgatgatgtgcacaaaccaatccaggtattcatgaaaacaagatagagatacatcatgaaagttgaagaagtaaggagaaagagaccgtatcccagatctgaagcttgataggtttgttatcgatggtgatcatcctagccccaaattcaacaccaatggtaaggtcatgcaccggctgaaacctcttgtcggtgaactgaagcagaagacatgatttccccactcctgaaaatcagaatcaatatacaaaaatcaacatcaccaaagcttctctcgacccctaaatccactaaaaaaagttggatatgacacagattcagatcaattcgcttttcaattttcgcaacgaaacatatataggttttgatcatctcaattccaaatggattgaagaaagataacgtagcagagaaggagttaccagtatcgccgatgatgatatacttgaagagataagcataagacattgaatttgaagaatcgaaaaatccgcaggttcaggcgaaaaatcgaattccttctttaagacgatgatgagaacgagaagagaagagaatctttttttctctataaagacggagattgacggtttgttttccagcaaatccagcgatgcatcaacctgtattgtcgccaaatttcaatctctatgtcgtttcctatttagtaaccgcactgcttgacgtttatttaaatagaaaacgac

SEQ ID NO: 6659 - DNA, 3000 bp, Unknown
  misc_feature (1)..( 3000): cDNA_ID_3593723_gDNA_ID_1621100_Annot_ID_55833 3000 nt of promoter + ATG
gatctcgactctgctcaacgaaaggctgctgatttaagggttaaactagaatccatcaaacattcaaggaaatgtgctatctctaccaaacacaccatgaatcaacggttagaacaacttcaatctgaaaaccaagaaacagagagcacaagagaggattacattttgattaccgcggagctgttcatggcgaaatacgagctcgcggaattaaaacaacagtttaacctctccgtggaagagagactagctgaacttcagagggcagaggaagcagagtgtgcgtctatggttaactccaacaagatcaaagacatgtcgcatgacatagcggaaatgcgtgatgctgctgagcgacttaattctgatgctgcaaggaaaaaagaggaagaggaacagataaaggaagagagtattgccttgagagaaacttacgtgtgtaagaagctagaagctaagcaaaggctggaggatctcaagcgagattgtgaccctgagctaaagaaagatattgaggagttaatggagatatctaccgaaaacgagaggttacaggaggagattaaactttctggcgagctcaaagaggcaaagagtgcgatgcaagaaatttatgatgaagaaagttcatacaaaagcttggtgggttcactcactgtggaattagatggagtgcagagagaaaacagagaattgaagggaaaggagaaggagagacaagaagctgaagaaggagaatgggtagaagcgagtcgtaaagttgatgaaatcatgcgtgaagcagagaaaacaagaaaagaagcggaagagatgaggatgaacgtggatgaactcaggagagaagcagcagcaaaacatatggtaatgggtgaagcagtgaaacagctcgagatagttggaagagcggtggagaaagcgaaaaccgcagagaaaagagctgtggaagacatgaaagtccttactgagaagaaagagagtctaacacatgatgagcctgacaagaagattagaatatcactgaaagagtacgaagaattgagaggaaagcatgaagagtcagagagaatggtacagtttaaagcgaaaacggttgcggctcagctggaagagatcaatgagagcagaatagaaggggaaagaaagttggaggagaagattaaagagatggaggagttaaaagctgcgattgatggcgcgttgcgaaaagcagagattgcagaggaagcacacagtattgttgatgctgaactaagaaaatggaaaccacaagacttgtagcagatataaatatgctttaggttgtttagggaactactagaatgtccataccaatatgtctttagtgagagattgatgactattcatatatctcatttcaacagtaaatacatgaactgcattaacatggaacattgctttttttcttcttgtttggatgtgaaattggacaaagtactaaactagaattataaaagccaaatacttattattatgataaatatcaaacacacaaaaacagtaagggactagatggaagaagcaaacacacaaaaatagtatacgtcaacgactcaaagggagtaattatctctttgtccggctggttgatttagagttgcactaagcttggagcataagaagaccacacaagtgggcaacaatacacgtaggggtcaggttttacgagatcgggagcttcccggagagtcgcggatttgaagtatccgtcttgtccaatgatgtaagctgtcgggtagcggcggtttcggttttctactcttgggttaaacaagtctgaattaaaaaatacagcgactttgttctcttcgtcaataaagaagctcccagcttcatcatcgaactgacaaccagtgggtggttccatatccactgacaaaaacatgctccaggacaccgcagtgggatcgatcttagtggttacccaaatctcccatgtttcaaaccgctgatataacaccgcaagctgatcatctctaacacaagatatagccacagtttccaaaacatcagagtgaaatggcagaggaagacgcggtccaaacctctctgtagtaaaatcaaaacagagtaaaaacttttcaatctcatctactacttcttcttcttctccttccacaattatcttctcttgagcaagaaaataagtgtttccattcaaagacacgctctgttgatgaaacggtatatggcagtcgggactgacatcaagaaccctccatgaatcagagctaaagtcgtagatttcgtaaccaaaaaggtgccctgtatcatagttcatcaagattttgtagttgtggttattgtcatatccgagagcgtaccattcgagtttgttaaacctttttcttggtttgataaaccttgtttgccctaaataaggattccacactagaagcctcgagttgtccttaccgacgcataacaacaaaccatcgcattgaaggactttagatacctcgatttgatcaagtttagcaatttgctttatacatggatcaacaaagtcatgttcgttgtttcggattccttggagatcaaacttcattgaacaaaccctagaatccatcatcgtgaatcccataaactgcttccttgctgctttaaagaaaataccttctttggataaagcgttccacattttgcaagtacaccgtactgaaatcaaagatgtcatcggaaccctagtgagaatctcccctaccaaatctggtgaaagatcagacattgtcgtcatcctttgaaactctgcaatacaaaattaggggtttagagttgtttaaaaatgttttccccatttcacgtacattttatatactgtacttctgagataagcaggccttagacggctcaattaaatgggccacaaaaagcccatttaaagaacgtcacgtgacgcgatataagcatgatccgaggaacacacttaaaacaatcaggttccacatttggctttgcacaccttccttgatcctatcaatg

SEQ ID NO: 6660 - DNA, 3000 bp, Unknown
  misc_feature (1)..( 3000): cDNA_ID_1815259_gDNA_ID_1621100_Annot_ID_55836 3000 nt of promoter + ATG
cgctgctgggaagtcgtggaactgggatgaacttttggctttgactccacagttggacttgaaagaggtgctggtggaggctgctcgggcagtcgctgatggggatttcgctacagcgtatggattccttgatgtcttggaacagatggtgtcagtctcaggcagtccgatccaacggctaggcacttacatggcagaagggcttagagcgaggcttgaggggtctgggagcaatatatacaaatccttgaaatgcaatgaaccaacgggaagggaactgatgtcttacatgagtgttctctatgaaatctgcccctactggaaattcgcgtacacaactgcgaatgttgagatcttggaagcaatagctggggaaaccagagtccacattatcgattttcagattgcacagggatcacaatacatgtttttgattcaggagcttgcgaaacaccctggtgggccgccgttgctgcgtgtgacgggtgtggatgattcacagtccacctatgctcgtgggggaggactcagcttggtaggtgagaggcttgcaactttggcgcagtcatgtggtgtcccgtttgagtttcacgatgccatcatgtctgggtgcaaggtgcagcgggaacatctcgggttggaacctggctttgctgttgttgtgaacttcccatatgtattacaccacatgccagacgagagcgtaagtgttgaaaatcacagagacaggctgctgcatctgatcaagagcctctccccaaaactggttactctagtagagcaagaatccaacacaaacacctcgccattcctgtcacggtttgtggaaacactggattactacacagcgatgtttgagtcgatagatgcagcacggccacgggatgataagcagagaatcagcgcagaacaacactgtgtagcaagagacatagtgaacatgatagcatgtgaggagtcagagagagtagagagacacgaggtactgggaaatggagggtcagaatgatgatggctgggttcacgggttggccggtcagcacatctgcagcgtttgcagcgagtgagatgctgaaagcttatgacaaaaactacaaactgggaggccatgaaggagcgctctacctcttctggaagagacgacccatggctacatgttccgtgtggaagccaaacccaaactagattgggtaagttatagtgatgatggttacttgagtggataaagaagagcacaacaaaaacacatctgtcgctgtaaattttttaggatgtgcaatgatgttttaagttgtaacacaacctaagttatatatgtatacaaaccaaacctggtggttgtttttctcttgtaaattgtcatgtggttgtgggtgggttgctagtaatgaaatataaccaaaacattgattaggtcattttatgatcttcttctatatataccggtataagtcaactggcggctgaacaaaggtcgtgaggtaacaaaatatgagacaaatctacaggtcagattgggttctgaattctgataaggtcttaaaaaggagctcaccaacccacaaaaccatggattgaacaagtacaggtcattgccttcattttattctttacttttctaaggctcaagcttcctttattgcctttaataacaatatactaatgagtattttgcactcagtaacaaaattcaggagagtaattttttgccctaacatgttacttttatgtgttaagagtttagaattttggatctatgattttagtttttgttagggaatcatattcatataaataaaatattgccattgacttaattgttgttattcacctaatttctctccaaatttggtcatttacctcagttgattctatattatacttgctaagtgttctttgtctaattctctatcattgtttgatttaataataaccaaaccttaagacttggaagcaaagaagagagaaaatcccaattaatttttaataattcaaagagagatattgagtgacttccactaatacaaagaaagcttggtttgtgcaatattttgcggttaagctattaattgctgaggcaacaccttttcacactttgctttccttcttccaagttttcaacttttctttcttactctttctattaatcaaactgcaacacaaaaatcatttggataatacatgtttagaagatgattaagctttagttttatttcaagattatcataattgttatctgttgttacctacattcatataatcttatcaaaaacgataaagacaaaaaggggatacaatataggtttttattataaagaaacaggaaagaaagaaaagggttttcaccaaacgaaattagttcaatcatttaaattatctttatccttatgattagtgtctttatatctgtcatatgctgcttctccttccaacttcctttggattatattctcttctctttattttaatttccatttgtggtagctgttttattttttgtattttcacgccgtgtccctttaaaataatattaactacaccactaatgttggaacatgaaaaacatgaatgaggtaattatgatgatgaaccaaatgttaaggacaagctcggtgtaactaagaagataattagtgaaacagaacaagtcaataacttgtaagcatttcagaattgaaaataaagataagggaggatgaatatgaatttagtaaatgggtaatgaaagtgaaagaagaagagggaagggttggttactgtctcaagggtttgaaatggagacggttgcttgagaatgaggaaaaagagttagtaagtttttaactctctctttctctctccctctctctttttcaacgtcaattcctttaaggaatggcctctctctctctctgaaagtgtgtgtgtatatattaaacgactccatttctcctctgcttagaccaaaactcatcttctatactgcaacaaagaaggaggagccgttgagactacaaaatg

SEQ ID NO: 6661 - DNA, 3000 bp, Unknown
  misc_feature (1)..( 3000): cDNA_ID_2107285_gDNA_ID_1621100_Annot_ID_55837 3000 nt of promoter + ATG
atatcaggaattcagctcaggtagccctgatggattggctctggaagatttgaatccatgcctaactccttataccaagaagaagcccaaggtagttgcttcttagccttgagagacaaagctcatgttattggttcattagctcacaagataagatgtgaaattaagctttgatatgtcctgcaggagtatgagagggttgactcagcagaagagagtttatcagggagaagcactataacaacaacaggcggtaaagtcaaatcgagttcaagaagtgtaaagatgtcaaggagctcagagggaaaggcagggcagagatcagaggagagcaaaggatggtatagaggtgggaggatgttttaaggtgaaaaaaagaaaatgcctcatataaggtaatcttgttccattttttccacttgatgtacaatgtctcttgctcttcaacctccagagagtagtatgatttttggtaggaaccatctggagccatgatccacgattgagttgaataagagaagagtgttgttatatgtaaaatagaagtctttcaaaataagttaatggtgtacttagtaggtgaggagagaatatgtgtttccgttgcatcccttcttctcacttgatgatctcattgattaaattatcattagtagtgttgtttattagagagtctagagatgatgttgatactccatccctttcttcaagatacatgctttggcattttcaatatttgcaatatcattaatattggtaaattgggagacaaacattaaatttacattactcattttcctttccctcctccttattactcccaatttttttttttcttctcatgctcaatgtctccctcatttctgtcttagtttcctccataagtatgattatttgtttactatcaattttgacatcctatttttgattctcaaataaacattaacctccaacacccaaaatttcatcacaaagatgtcacttttacatttatgtatggaggttcaagtgatgaactagacatttatttaccactataattaacacgatttagatctcgttaattaccaaagatacaataaaaacaattttcagagataccaatatattttaattattctattaacaaagttttcttttaaaaagaacaacattataacaaaaacttttcccattgatattccgaaaattaactctaatactataaggatattaatgaatcaactaatggtgtatgtatgtactaaagaagaaagcaaagagagtaaccgtgtgtggtgggggctcatgatcgttagttattacgtctcctactcttacgtaggcctttcctctgatctctttctgaataattgtagcttcaccgaagttgcttgctttattatgctctagctcctttttaggaccaaaaaagggtactgacaaagtgaacgaacacagtactcctgtccacccagaaatattataaaaattaatacaatgggctctccctttgcaatattcttcttagaaatttcaatattgtacatcagatttaagaacttctcatagatagagactagagaggagtgggcaactaatattcaagttttcctttgagggaacatatttacaaacatctgagatacaaatctgttttgtaaaaactgtttcatgtttgtaagaattttgtgtttgtacataaataaagaagatgccatctctacaaagggaaagacaattccatgcttttacatctcattctcttctttctttactcttttacttcttttgaaaacacaagaaagataaaaaaaaaaggaaaggttaataaagtatttgtttcactatttataattttatatagtctgtctcttctctggtaccaaaacacaaatcttttccatgcaagtcacagtttttgtatccattatctcatcaccttgtttcaatattctaactaaaaaaacaaataagttcaaagggacaaaagacatgtgtcagttagtcagaggatattgggaggtccacgaacgtccttaatctttggatttttccgacttacgagatattatgtgacgcaaacgcgtttctcctctttttttacgattatgccatcccaccaccgtacaaatcccctacgcgcctccacgcgtcgcttcctcactcccgtcttttccacacacgcgctagtcggaatatcttattggattaactctatgaattttcatatgaacaatatttataacatttttttatttggtattaacattatataaacatgatatttgggaaaagtctttcgtttgaaaaattcgtacgtgacaactaattttgtttttttttggatggtgaaagaattatcttggatttgaggcacacacttttgtttatggaatctaaaactagataggtgcacactatccatattgccatcattgttgtagatttgatctttgtgcaacttttacttgtgtatacatcttaatttccgcattcaaagattttcaaaaccactgcgatcagtttcatccaatcttatatcaacaaacatgcattggaaattttttacattaacaataagtcaaaccattttgaaacataaacctataaaacttgacaatatgggaaaaataaaggacaaaatattctaaaaattgaccaaattatagtcttaaacattaatttcaacgggactatttcgaaaccgtttttaaaagccgaagtcttattaaatacaaacgaaaaaattaactttgacattgggtatattataatgcttgtcgataaaataaagtgttttttacttaaatgttacatttattttagtatgctccataagtttgatatatcatgttatccttgttaattataaatgttaagcttgaatttgttgatgattccttcctaatttttttttttatgatgtaactgactaacaagtttttttttgtttcttaactaaccagggggttgatttaatttatgaagttaacataaaaaaaaaattacatgaccatg

SEQ ID NO: 6662 - DNA, 3000 bp, Unknown
  misc_feature (1)..( 3000): cDNA_ID_1815251_gDNA_ID_1621100_Annot_ID_55839 3000 nt of promoter + ATG
tgaggtttccaggattactatcaggctttatgggcttcgttgttttggttaagtaggagatttggatctgacaatggctttcgatgaaattggcttgttcgatttgaattctgcggaggatgatagatctgagtgaatcgaggaggttacggatgatctagaatcgtaggaattgtagcgagacgccattattgatggaaggttcaaaaaagattaggatctgtgaatttgaaattgaggaagaagatgaagcagagggaatttggtttttctgtttccaatgtcccactctcttcttttcaaatttcgtattctctctgttctaaaacggacttttcatctgtattgggcctaactatgggctttaaaagtttaacggcacttttgtgtttatttgaattttgttattctgtttattcaaataactaaatactaatgagataattaatcatttgctctagaaaattagaaccagcacatatctacacttttagctttcctttcatttttgtgcatttttttcctttctaatttggacttttgttacttccttcttttttcttaactgtaaaatgacatatacaaagtgaagagactttcatgttccttttttggggggtttatggacgagcattttgtatttttgtggacagtaaataatagcgaagaagttggcgttgattgaggcaggcataaaggaaaagatggaatgaataatgaagttggctttggtccatattgtagaacccaaagcctaataaccgtacactaagcccttacatacatgaaacgctgaattgtcattggtagaaaaggaaatggaagagtagtagtaaggaattatatcagttaataagagttgtaatgtgaatagaacacgtaactggactagtatgcatgtgtatgagaagttcaaatctttaactctcacaatatcgtcgaagacaattgtttaggataagatagaaactaaatgagcatttaaaatttaaagaaaaaagggaactgtagagttgccttggcaggaggggaaagcattatcatgaagaatctggtctacaagaatgggaaatggacagatgtatctgttcaccaccaatccatcttcataactcaagtggtccctttctctcgacccatccacgtctccttcatcacaagtaagaccaaattaagccaccatttggtgtctgtcatcttctctttaatgctctcttttgttctttctttataaacacaacaagacatgaaaggtttttgggaacttgtctgagttccaatgcggctgctgctatcatctgatccccaacccgaacttacgtctacatgtacctctcatagttgcggctggaagccttactctcattccaatgactttgctgccaacgcgttcctccttctcatcatcctcttctgttctttcatatgcgtcctctctctccacgctgctatccgttgttgcctccgtccagtcctccaacatgtccctaagcccgacccggaccttgaggccacccatccagacgctcccccgacacttgtctactccccgggcctaaacctagcaggcaatgaagcagagtgcatcatttgtttgtctgaattccaagacggtgacaccttacgcgtgttggagagatgcaaacatggattccacgtttattgcatccagaagtggctctcctcatcccattcttcttgtcccacttgccggacaaacatcttctcctccccacctcaacttcactcacaaagcttaccactaacgagtacaccttagtcagatggtagctagttcctggtcttgcccactttttttttatctttattttctttacaacttcacaccactatcatgttttacaagttagtttattttttacctttctccttttatattccatgaaatttgcacagtctaaaattgatatgaagtcacttttgtgaatcatcatttacaacgtataacaaacaaagaccaatgtgtaacgaagcaataacaatacctcataatatagagggaccaaaggctttatttaatgtcggagttcaagatatatgaggtcttgactggtgttaggtacgttcccacttgttggataagataaagaaaagagttgttactagataagataatggataaatatagaggatgagaaaaaaaaatagaagtggaatgacgacgactcacattacgagcattaactccattgcccattggcatggaatgattctagctagcagtaggagaaaattccaagtgcgtgcaaagttcttcaatgaattcctagaccccctaaccagagtcatggatgcaatactggaaaggcaagactatgctcgctgcatattttcaggttgctgacatgttcaagctcaaaacacaatcaagcgatgaagttagaggagaagatgattgaacaactttgatctggtctcaaaggtcaaagccatgcaatatctcctcgtatgtactacattgttctagatagcctaatgatgcacatcgtgagttatgttaaaaaactatttttagaaaaagttactgagagttctggacaaaaagttcagggtaatgatatttaaggtgacaaaaggtaggagatgttactattcacaaaaaaaaattaaagggttatcttgtaatgcgacttgttcatgttagttgttgacaaaaaaatagactgttgtagattatttgttatgagggtaggagtaggatcgtgtagtggagagacgaacacgtaagtagaaagaaagagccttgttattagattagagctgtgttaatgtgtgaacgcaaccaacagttcgtttttgaacgagtctaactagagacaagtcaaagcttatgactttgagtggacactggacagagctagtaacttctttgaagattctgaacaattttataacatcaagacacgactctgtcgctctctctctccatagaagaagacgaagaaatagaagaatcgagagagtgagacaaatctagtg

SEQ ID NO: 6663 - DNA, 3000 bp, Unknown
  misc_feature (1)..( 3000): cDNA_ID_2106051_gDNA_ID_1621100_Annot_ID_171353 3000 nt of promoter + ATG
ctctaatacctgaattgtagataatgattacataaaaaggcgtttgtggaacagcaaaaggaatcagaagtattggcaatttgacaagagaactaacacttgtcacagtagctcttgaggcagcatttgcttgccagtgcagcatctctcatcacttctttacacaatgggcattttaattcaggaggaaattccccgactgatcgtgttgttgatgtcaatccctccatttccttctcaaacgcatccctaaatttgtcaattgacataagtgatcaacattactaataatttatgtgaaggtactaacaaacaactcgccatgttaatttagtgacaacgtactcgtttggttttaaaactgctactgcgccacttggcaaggagtaagagccatttggggttgccatcagcatcgacttggggataccagtaggtggtttaactctcttaacatcaaagttaggattaccgtttgtggagcagtgttgaataaaatgtcctgagacagaaaatgatgttcagaacattcatttctcggtaataaccgtacacactcgagacattacttaaccaaattaaaaatatataaagattctctaagtcagtcataccagaaacattgcaccgatggcaaacatagcctggtggcggtgttgtcctctccattcctactcaaacaaatacaatcagtctctatatcttacatttcaatgaaagagcaaacaaaatatttggacaataataattaacagaacatccgagtctcaaagctaaatacttggggagactgaagcatataagtcaatcatatacaggaatataattaccaaaaccgcggccacccatccttccagccatacccctcccataacctctacccgggccaaaactatctgcaccttgtctgtaacatgaaagaaaaatacgaatgttatgcaaaatgtatgtcaagatctcatttagcatgctaatgtccatcagttcaagaagattacttactgatgccagtctagtgctggagtgtcaattaatgcctttagcttggtttcttcatcatcagctggtgcagaatcatgacataggttattagaatggactgctggggcatcaggaattgaatacaaatcattcccaaactcatcgaattcatcttcaacctataaggtagattaagttgtaaatcaatatttgtgtagaaggattccatgccaataaaaactgagaaagccaactcacgggagatgcatcagcagtaataacattgttcatatcagcttgaacgttttccactttatcctcgactctcggcctgcaaaatgtagtcatttacatcatgacacatgggaatctggtataatttcacacaactaataatgaaatgcgcagcttagagcgaaagaacacaaagattgaacaactcagttgagaaattaggtattaaagttatagagaaattactcttctctggtaataattctgatgcgagggcgtccagggacccggcgaattagcacagaagtattttttggtattaacattgcttcatccagatattctgaaattgcaaaaaaaaaaataagtatgaaggccaccacatattgcaactataccaacagagaatcgtagttaagggtttctttctaatgattcacaaccacaaccaatcaagaacagtagtctcagaagtaatcacatttaacatataagctaatacagtacgcaagaacttcacttttattttttttattcaactaacaaggaagtaccaggtacataacatccattttactgaagcagttagatactgaacaatccatggccagattaacagtgctaaatgtgattacttcggaagaaagccataaaccatggaaattttgacaaagcaagtaataaccatatattttgataagtgaatactgatcacaatcagaccagaatccaacctagataacaacaaaacacattgcacaatatcttctaggtgaataggataagaaggaggaagacaaaccttcattagtttgggcattagagatgacaatgtcaaggtctttaccacttcccaaatgcttagtttcgtaaattttttctttgagtaaaccaactgttataaaaggaccatccatggagatggtatcataatccctcgcactcttaaacttgtaatatattgccattggaattaatctgataatgaataaaaatacaatctgtattactaatttattaaaacacaccagaatctactctctttgaaaaaaaccttaacccaggccaaaaaaatggaggccagaaagttgatttccaaaacaaaaacaaaaagtaattacaaaatatgattctttacttctctggttggacttcaacaaaattcgacagaagaaacctctcacgcgctcttcaagacgaaatcaaatcaacgagaatttcccacaaagctcagaaacgaaacgagaacgcccgtgttggattgaatcgaatacatcgcagggacaatgctcagatatctccaaacaattgaatcactggcttcaattcagaagctgaaactctccaagcttcgaatcgaggaaatagaatcgaaaccaccgcggtatccctgatgattcacggtgaaattgcagacgatctcgagagagaattagagaatctttggcgtttgatggatatatgaaggagaaaccgatggatatcgcagaaacacgaactctagggtttgaagaggaatagagaactatcgtaaccgaatccaaaagactcttcacctaattctcttgcgttttggctccttttacataaatttataatgggccatacagttcaattagagatgttttatgttgtagcgaaggcccaatacataaagctaacggaaaaaggcccaataagggctttctttgtctgatggaaaccctaattcccatggagccatctatttaaagcacaaacctaattcgaagaaagaagtgactgcgacgccggaaaatcgcaatg

SEQ ID NO: 6664 - DNA, 3000 bp, Unknown
  misc_feature (1)..( 3000): cDNA_ID_3048780_gDNA_ID_1621100_Annot_ID_171352 3000 nt of promoter + ATG
atcttcatactctttttccactcctttcaacaaaaatagttaaagatgtatttcattatattatcaaatgggaattgcttaagtaatgttcatttcctaaattatacaccattttatggtcatttacccaaattgcaaaaaaatatctttgagcagccagccatatcctccgaaagcttccaagtttaatttgtacaccacaaaaagataaaagaaccaaaaaagtaacatcttcttttccagatatggtctgtagtctgtgctattttgtaaatatgactccatactagatttgtgtccctcaccaaatcggtctcatcctagaaacataccatttgcacacaaattattcatacagatataaccgtacaatatttgagataggccccatcgacgtcgtttagctcaaagcaagaagggagagagagagtcagcgagcttcgttaatggcggatgttaaggactcagtgattaccaagtacggaatcgtagggattggtatgatgggaagagaacatctcatcaatcttcaccatctccgtgaccaaggcctcgccgtcgtttgcatcgccgatcctcaccctccttcacagctcctggccattgaactcgctcaatcttttggatgggagcttaaggtattttgaatttaccagaacaatcaaccttaggagttaggacttacttagagcggacccttttgctgtgttttctatataatgttctggtgcataattgtttgattcctagtctttgtacttgataaaaaaatttcataccttgattgtggaagagcttaggatttgagatttttttttactttgttgtggttaaggttttctcaggacacgaggagttgctcaagagtgagctgtgtgacgttattgttgtctcttctccaaatatgactcatcatcagattcttatggacattatcaattattcaaaaccgcatcatgttcttgttgagaagcctttatgcaccacagttgcagattgcaaacaggtcttttttctcttcttttctgtttggtaccaaattgatcaattcatccaactttgtctggaatcaggttttggaggctgcaaagaaaaggtcagatatggtggtgcaagttgggttggagtacagatacatgccgccagttgctaagctaatagaacaagtaaaaggcagagactttggtaatgtcaagatggtagcaatccgagaacatagattccctttcttggttaaggtaggcttaaacaagatgggactatgtgtagtgtttacgcttcacatttttatatgattgctgagagaacacatcactaggtgaacaactggaatagattcaatgtgaacactggagggaccttagtggagaaatgctgccacttctttgatctaatgaggctctttgccggtgcaaatcctgtctgtgtgatggcttctggaggcatggatgtgaaccacaaggatgaagtttatggtggaaaggtacatttttatcccaagttacactcaatcaacgtattgcgagtttcatactagatgtttctctgttatataggtgcctgatataattgataacgcatatgttattattgagtttgacaatggatgtcgtgggatgctcgatctttgcatgtttgctgaaggaagcaaaaacgagcaagaaatttctgttactggtgacattggaaaggtgagttcctttgaaatattatgggccatttttgtgtgtgtgtgtgcttatttatgcgcttagtgtgataggattttaggtttgatatgaaaaaaacagagctgggtgttctttcttttttattgacttctctgaaccattcgacgttattcccaagagtacataatttccatttattcccaaatcacatggcatatctacatgctcttgcatatagatggaagatgagcataaagtgttctcaagactatttctttggagttgttcatatgatccatgagttttgagttttgtcaatatgtccttttgctttcttttcaactgacgtggcaagcatgttgcagggggaggcacttgttccagagggtatagttcgatctggcagtcgtattggaggaagagaacacgttcaaacaataaaagcagaagatgaaagaataaagtaagctatatttatctacatatcgtcttacactcttaacaatgtattatagtctcacatcgcatcacacgatgttggtttattcagatatgaagggttgcatcacgggtcaagttacttggaacacctcaccttcttatcagcaatcagaggtgaaggaatagcagctgttgatttggaagacggattgatggctgttgccatgggagttgctgcacagctctccattcaggagcgccgctatgtaaccattgacgaggtcttgtgatttgtgactgtcagataggtaaataaactaaaatagaacctttgtattattaccgttcaaatgtttgccatacaacactgtttattgtaagaagagagtgatcatcaactgttgttataagataagccaataaattgaaatagcaacttatttgtactgcttggcaatggaactggatcaaacagcccctcaatttctctacaatccggataatagaaacagattcaaactctgttgaaccaaaataaccgaaccaaaccaaattttaatttggtaattctctaatttttttgtttttaatgttctttggacaaatataaaatataaaaatgtcgattgaaaattgaattaattaaatcggaaacaaagaattaatccaacaaatgtatatgtttgattttggctggatttcacaaaccaagtaaattgaaccggaaaccctcagcacagtttggtcattgaagccggtttaccaaattaaaatcggcgtggtggagtccaaaccgattgatagaattcacagtggcgcgcttttgccttcattttcggaactcgtgtacctttcactcaattttcaaattctgatctgtggagcgaaa

SEQ ID NO: 6665 - DNA, 3000 bp, Unknown
  misc_feature (1)..( 3000): cDNA_ID_3048784_gDNA_ID_1621100_Annot_ID_171351 3000 nt of promoter + ATG
gaagtctacttcggtctgaaaaccggacaaggtcttttggagttcaagtgcaagagcaagattcacaagcagagatgggttgatggggttcagtctcttctccgccaagtaaattgctttgaggctgccaaatgctcgctgggatctctgaatctcactggtcacacgtgatgcaggatcctgtatatatttgattatattcatatatataatatccaaatttttgctgttgtgaggtatttgcaaaacctggcaatgtaacctcagaagacttttggataaaacaaagcaggttgttcaaatgatcacaacaagtgttaggaacattgctatgtacagaaagacatcagaagaatgatgaatctcaattgaactttttatttccaatgattcagtttctatgaagagtcaaaaaattgtagagaagtggtatgtatatttttgtttgagtgagaagttcatatgaagaatcacgtgagagacatgtcagagatattcatatagaccgtattagaatacgacagtcctttgtgtcccataaggcaatactcgcagttcgcagtaagattttatagctttcatgagacactttttctcaaggtcctctgatttctggacaaagctcctcaaattgtctcggtgggaaactctctcaacctgtaaaaactcaaattgagacgcttctgaagaacaatgcaacactcaaaacaaataaactagttgggagatgaatcaccatttgctcaatgataggacctgaatcaagctcctctgtaacaaagtgagttgttgcaccaattagtttcacacctgcatcaaatgcctaccaatacaatctagtaaagtaagagacagggacgaaaacttgagacataaggacgagctaaatataaacctgtttcacgggatttcttcctttgaatgatggcaagaggccatgatggatgttgattacatcttttccataacctttcaagaagttaccggatagtagctgtcaaaggaaacttttccagtaaacatcatccgtcaatataataactaatgctaagaaatatcttttgttaataaagctgttcctgcaaagaagcataaacacaaagcaagaacagtctgaagagaagatttgattcattttggcgcaaacaaagtgtaatgagactattcaagacaaagaaaacgagcctaggatggaacttaaaagctgatatacctgcatgtatctagcgagaactagaaaatcggtacccttaaccaattccaaaatctcctcttctattttattctgatcggttgttggtaaataatgataagagatgccatgcctctggagaaacctcataacatgggtgtttggagctctttcatgattactgaagacaccaaatattccggaatcactagtcataactaatatatccatttagttcgttggaagagatatatgcaaaccttatcacacatgttatatcaacgggaagttttccatcctgccatttatgtaacatttcaaccagacaatgatcctacaatacaaaagaatcacacaactccaggaaaaagaaggcacagaataaaaaggatcttctttatgacataaaatttacctgtttcgacagtagaagagctatcttgtatttggggtctaaagagggcactcgtactactgagctcaaagcactaaacttttgtgcaatagtttgaaaatcttcatccatctgcctcctcggccattttactggatcaaatataaactcactgcccaaagaaattaccttttcatcacaactaaacccaaaaatagaaacttttaactgctccaagcttttagtattcactttaaagacattgattcagaaagaatctattgaagtaacatcaaaggtaagatttttcaaatgggaaaattggaaactttaccttctagagtagaagacgttcttgttctcaggaaccaaaacatcataaccaagaatgttacctcctttagcagcaatacaatctgaaagtttcgctacaatcccaacgacatcctaaacttcaaaaagaaaaactggattcagttagattaggaccaaaagaaattatggggagacatcaatgattattggattcatatacgtaccggacaatggaagacgtggaagccgggaatgagaagaggtgagacagaggaatcgagggactcgccgtgaaattgagaagatttaaaggaccatttggtaaatgatctaaaagctgtggcggagagacatgaggtggtggagactcttcgtatcattgccgctatttcttgtcgcactcttttgaatccgactcatccgtcgttataaacattctcacctttttatcgttagattatgtgtttgttattcacatatcattctgaaattttagagcataaactcaaaactctacaaaatagagtgacttcactgtttacttcgtcgtattaaaaaaagtttattatattttccaaattgagcaggaattgtttttgataaaattctcatttttatacatataataacaacttttctaatgaaattattttatcttcatactctttttccactcctttcaacaaaaatagttaaagatgtatttcattatattatcaaatgggaattgcttaagtaatgttcatttcctaaattatacaccattttatggtcatttacccaaattgcaaaaaaatatctttgagcagccagccatatcctccgaaagcttccaagtttaatttgtacaccacaaaaagataaaagaaccaaaaaagtaacatcttcttttccagatatggtctgtagtctgtgctattttgtaaatatgactccatactagatttgtgtccctcaccaaatcggtctcatcctagaaacataccatttgcacacaaattattcatacagatataaccgtacaatatttgagataggccccatcgacgtcgtttagctcaaagcaagaagggagagagagagtcagcgagcttcgtta

SEQ ID NO: 6666 - DNA, 3000 bp, Unknown
  misc_feature (1)..( 3000): cDNA_ID_3048788_gDNA_ID_1621100_Annot_ID_171347 3000 nt of promoter + ATG
accgactagtggacccacccagtagatccatatctgagagaagtcaccactgacaacagctggtccaaatgacctggccgggttcatggaaccaccgctaaagggacccgctgcgaggatgttggcaccaacgatgaaaccgatagcaattggagcaatggtcccgagtgaacctttctttggatcagccgctgtggcgtagactgtgtagaccagagcaaaggtcaccacaatctccatcactactccttcaatagctcctaaaccggccgctactccatgagtcggtacgctctgcataaccgggaaataaacacattctcggttaatccatataccttttaaaatcaaactggatcttaagaccggcataacattttttagtcacggtcgtttggacaaaacagtcataatcagaaataacacatgacttaaataaatagtattgaataaattacgaatgtttttgtgtacctcgccattggtaacgaagacgaggaggagacacgcgacgatggagccaaggcattgagcaatccagtaaaagaaaccggttattactgtgatgttgccaccgacggcgagaccgagtgtcacggcggggttaaggtgtccgccggagatgttggcggctatggaaacaccaacgaaaagggcaaaggcgtgagccacagcgacagcgacaagaccagcggggtccaaggctgcatcggatgtgagcttggcaaaagcaagagcagagccaacgccagcaaacacaaagagaagagttgcgataaattcagacaagtaagccttaagagatgctacactaaaggagtcacccacacttcctatctcaatcttcaccattttgatccgacaaaataactctgtttttcgactttggttgattacaagttatttctatttgtgtggttttgggcatactaatgcttgactttatatatagcaaagagccaaacgaggtaatgaagttgttggtcccactctacgtggcctgtcacaattggatgccgcccaaaccgccaattatttagactattcattttcttttgaattttgagggttagtgacatcgaagatgattaaagacaaccaattggtataatgctatgaaaatgatggataaggtatttcataatatgtgaagataagagtgttctgttgtcatgttaatatcctgcatttaaactaatgttgtctcacaccaattatgatagatggtcgtattcttttatatctatatatattttttttggttacaatttgtattttttagtttgggaggtgctaaacgcctaaaatattaatagggattaggagttaattcatgtaccaccgctgctttgtttggagttggtgtgtaagagatattggcatatacatgtaataaaattgcaacaaacagaaaacttaagatcttagaaaagtgatccaaagtagtggtgacattaaataaaaatttgcagagaggatggttgtttataatactttctccgccccatgaattttaaaagtaatatttttagtatatggtttatggatagttttttattatcatgaatttaatttgcagtatagaacaacgaagtggaatgctcaatcctagattaaaccgatccctgacaaatgtttttccacccactaccgcttaaaagttgaaaattattccatcccagtaaactgatattatgaaccaaacgtccaaactcaaataatcgatctgaaaatgaactatattttttttaaaattatgaattcatttttcctattcaaaatattgaattcgaatccaaactaaacaaacagaaagaaaaacctgattttaaatccaattttgttttcaagttaaataaacatttgattaaaacttgaagtcgaaccaataccaatacgaaaccgtaccaaaccatctatggtacaaatactatcattcataaaccaaaataccaaaaaaacctaacagaaaaaaattataaagtgggcctaagcccatataaatatcccaatggattccttttgatctgatggtccaaaagtccaatccgtcaattgcctaacacacaaaagcctctatctattagttagtgagtgacatgtctcttctctaattttatccttaagacactttccattttgtttagccaaccaatcatcttcattacactaatcagtagtcaatagtcatttcaacaataaatcttctaacttttaccacagtcacgtcaaacaaaagttgttttcttttacctcttggtcatttaattttcttttaacggaactctagccagtaaattacactaaattttaacgtacgttaatttaaaagtaaaaaacctttcgcgtctttttgtttaagttcaatattagccacacgatccagaaaattcgacacgtgtcactatggattaagcggcatcagtatccatctttattttctctccaaatatttatttaattttgggctttacttaaaccagactcatttcatttgccgaggaaagcgaatataatttatcgggcatttctctcccaatctgcttcactcgccaaacctcgtttcttcgccggaaccctaggtcacctccgtcagtttgaattttccggtgagtttaacttcttcgctagcgtttcaatttatcattttaagaaagttcactcttttaggttttcgtgtgcccttgaattttgagaaggaagagattttataattgacgcgtatggttttgttgttggtggagcagtagtagatgaacgtgcgattaggtaacagttgaggtctgacggccaggttttcttgtcaccgaatggagggaggtagcgtctccatacactcttgtgtcggtacttttcgctttcctactgttttactccactcgacaagaaaatgaccagagtcgcttctttaaatatgtttcacggttgttgtgttatgcttttgtttcttttggttgtttgatgtttatatatgtctctgatttcaggaataaactcatg

SEQ ID NO: 6667 - DNA, 3000 bp, Unknown; identical to SEQ ID NO: 6659
  misc_feature (1)..( 3000): cDNA_ID_3593723_gDNA_ID_1621100_Annot_ID_171331 3000 nt of promoter + ATG

SEQ ID NO: 6668 - DNA, 3000 bp, Unknown; identical to SEQ ID NO: 6658
  misc_feature (1)..( 3000): cDNA_ID_1815270_gDNA_ID_1621100_Annot_ID_171330 3000 nt of promoter + ATG

SEQ ID NO: 6669 - DNA, 3000 bp, Unknown; identical to SEQ ID NO: 6657
  misc_feature (1)..( 3000): cDNA_ID_3048799_gDNA_ID_1621100_Annot_ID_171329 3000 nt of promoter + ATG

SEQ ID NO: 6670 - DNA, 3000 bp, Unknown; identical to SEQ ID NO: 6656
  misc_feature (1)..( 3000): cDNA_ID_2123126_gDNA_ID_1621100_Annot_ID_171328 3000 nt of promoter + ATG

SEQ ID NO: 6671 - DNA, 3000 bp, Unknown
  misc_feature (1)..( 3000): cDNA_ID_3048752_gDNA_ID_1621100_Annot_ID_171388 3000 nt of promoter + ATG
ggaaacgaaggacggcactagattgatctggtaagtagtcaagtactgctcttttacggtgtacgtgtcagggtatgccaagtactgggacacacgtgtcattcgtgtgaatctatagagaatacattttttattattatagagaatacattttttattattatgacatttatattattataattatacattctaagttagatcaataacttagagcatctcaattcgtttctcaaaaagtattacttatttaacattatggagaaatgttggggtgattttttcattaaagattttaggttatctgaagttatttactcttataaaagactcaacggaagagtgacaaaaagaaataaactcaacaaggcaccccattgaaaacaaaaccgggcatgaatgatcattagcacccaaaaaaaaggttttgttaagatacataagcaacaaattagtcattcatacattttaaacaaacttattgtttatgtttgttttcttaatacttggtcgttcaaccactacagcattttatacaaatatatagtgaaccaacgaatgtaatacattgtctgattcccttaaataataattaaaaatcaaccttataaattcaacatttgttttttcttgctatggcaacacattcacatactagaccgtatttcgtcgaggaaaaaaaaaactcaaaataattggtactgtaaacaaacatcacagcattttgttcacacattcctggtataagtttcactaattatacaaattatacaaattatcgacgattaataatcatacacatatagtcatagatgataggtttcttaagaataataagaacgtaaacaacggtccaatagaggcaatggcaatgacacgtaaataagcagcttaagaaaagggaattgggacctcccaatcctatgggctaggaaatatggggccacaggatttatgcagttgagaaataatttacatttaaaaatgcagagaaatgacaggagagaaagagagcgacgaagcagaatctggaaatgactcaattgagggaaaataaaatatttataacaatttaaaatggctgagagtgacgtggttccatagatatttagacatattattgaaaatgaaaaacgtcgtgaccagaaaaaataataagcagcatcagaattgtataataataattcactggagacattacacacaactaatataattgttgaaggcgcttcatattatgtatcattgaaggctaatttatcaaataccgaactataaaactttgaaattcttcatattaaagtatggagtgaaatttattcgaaactcatattaaaaaaaaaaaatacaagaagaagactttaaagggacaggtggggtaagactttgggaacttccgagccttgcgcaagtgtacgacgtttactagttttaataatcgcttacacgcatcctttaggcgcgtgtttcacacttcaaggaggctcctttgttattattgtttccaaggaagtccaacaacaattaatgtatgtttagttgttgttactggtattgtttaaccatggagtattatcaaaaccaaaccctgttctcacataacataaaatcactccatcaatttccatgatgtcagatgttttacatttcttacacatataaaatttttttgatgacatagttgtatacttgtatcttttcgttttttccatttgaaatagcactcactaatagaagtaaataacgaaatgtcatgagacttttggcatggaaattgcaaaacattgttttttaaacctgatattcttcctatttacaagttaaaagtgtgaggaaaaaatggcgaatttacatgttaaaatcaaattaagcttttgattgacaagctaaaaagcctaaaagtaattttgatttttgaaaatgttgagtgcggagtcgtcacagagcttttttccaaagtctttgcaaaaacgtcattcatcacaagaaataaagaacctaaaaaagggagaaaacgacgtcgtatatgttctattaataatttaaagtgttgtccttgccaataaagaaaagacacaagtggtggtggtctgtgtagatattacgtaacgcgcaatctcacgcgctcgtggaccccacgatccaatgactttctttaacgtccaagtgcggatgggacccatgttttatggaaccgtttcgaagattttctttgcagtggtttttgctattacgtttatgccctttgttcttagcttcaacaacaatattgccattttccaaagaattttattccagttttatactaattgatagttataataataccgtctaggttaatgatgttattaattctagtagtattgattagacaacaaatcttagtgttatttattttagtgttttttaagatcataaaaaaaggtgtagcttataatagcatatattatacatagttgatgtgggtcaatgacaatgtaatttaactgaaactttcttatgaaaatcaagtttgtttctagtcattgtctttttttttggccggttttaaattttaggtatttttcgtatatctatttttcttagattaaaatttgattcaatcgttttggttcagttttgcattgctgtttaagtcactagatattttttttctacatagtgtttctatagaaaagagccttacactattatacacaagtgaaataagtaatttgattcataagaaaatgcttaattatatactagtggctcaattattcctcttcataatgtaatggttaggtagttaaaattattaaagaaattcgattaaggaaaaaagcggtattgcaaaaacaagaagccaatagattctctctcttaaccagaatcaaacctgtccttctctattcctataaaaaccaaactccatcttctcacaaatctcctccacaccaaacctctctctctatctctgtccaaataagaacaaaaaaagacaagattcagaaaaaaatg

SEQ ID NO: 6672 - DNA, 3000 bp, Unknown
  misc_feature (1)..( 3000): cDNA_ID_1027047_gDNA_ID_1621100_Annot_ID_171385 3000 nt of promoter + ATG
gaattggcttttgggtttctctggctgctaagtattttctgttatgaaataatgacagttttgcctgcgggatggagcaatgataaccatggtgggagagggggaatgggacgtggtcgttggtcaaatgggagaggaggacctgggcttcttcctcggcctggaccttaccctggacgtggtggtaatcgtggtggttttggcgggagataccagaattatcagcgtgatgaacgttttgtttctgagcttaagctttcgaaaagcaaagaaacgttggctagaaaacaaaccaactttcaggaggtaatatatatcaaggaatgctgttttaactactacatttttatggttatggtaacgcgtttcgaattgcttgatattaacagccatgtgagcttacttgctacagtcgagtagaaggtggagaagtaatctacgatgaccaaggattggtgaggcgtttggtgttatagttcctttagattctctcttttcttcttttgtcatcccattgaactatttaattgatggggtatatgcagacctttaaacataccaactatcacagcttatatgtatccactttgttcttgtttcccagaggcttttcaaacgtcatattggtgaagagattggagcggatttaaatcaaggttatgatacttttattgagaaaaaaggtaatgcattagtggcactagtgaactattagcatgtgtaaaatgaagaattgtgatatattcagctgattagtcgttcttttgaggcagatctgggctctgagggctttggtgaccttcttggcagtattagagcaaaaaacatttcgctggacaacattcattttgtggtatgaagtgcggatgtatatatgtccatttcactgtcaatttattactttgaaagaggttatcttaatggtgtcttttatttttgcttttttggacagacttttcgtaataatctaaacaaggtaagtgagatccccaacagttatttgatctctatgatatcaaatgaatcactctgtgcacattgtttcattctttcagatattgggcgctgcttacaatcggcatgaaccgtgggaaatgggcgtccataagagaaatggaaccatatatctagatgtgcataaactgcctgaaaggccgcagagtgacttagatcgccgcaggtaatcttcgctttaattgtatttgcggattggagtgattctactagttttattataaatggtgctaaagaatgtctgtgtagaagacaatgctaatgttttgaaaaaaatgggtcataaagagtttataacactgctctgcatattttgctactaataaacttgatgttatgtttccatcagatgttactggggttattgttttgaaagccttgctacggaagatccaggaagagcttatggagaagaaatacatcatgtggatgcaaatgttgaattttgttctgttgtcaggactaaactaggagctcaccgagttatgatgggtgctgaaatggactgctgtgatgtatctgataagggaaaaaggttttacgtagagttgaaaacaactcgtgaggtatgactcttgctatagttttcctaataagctcgtttgttatttcagcttctctctttcatttcacacacatacatattggccagtaatgtccctactgtttactctccagttggatgatcgtaccgttgacagatttgaaagagagaaattgcttaaattctgggtaagtatgatctaacacgggttacatatatcttctttgtttctccattcttgtttagacttaaatggttttaacatgctgcagatacaatcattcgtagcaggagttccatacattgtcgttggatttaggtatgaatttgccaaccattctaaggataaactcaaaaagtctaaacctttcgccatttaagcaaatcagttcaagataacattaccatatcccttttcatcttgatgtagagatgatggaggaagactagtacgcacagagagactaacaacgagagatattgcgcatagagccagattgaaaaactattggcaggtaagtgttatcagttctcattacagacatgaatgataagaaacactaatgaatttgggaactagggaggagtgtgcttggcatttgccgatgaagttctttgctggctatacggcactgttaaagaaagtaagttcattttttgttacgtctacatagaacaatggaagaagatcttttaaatttacatttcccaacaatgtgttttgcagacgaagattacatacttcagttcgtgcaccctttcatgagactagagcttcttcaagctcaatcttgtcctgatgccatcactaatcatgttcaccttctacaaaatcctgcatcaccaccaccaccacctcagtaactttatgcttctttagtggagtcataaactgtaatacttagggttcaaaatcaaatttgaaatgaaggtttagattttggatttcttttgtaacattttattaaccaaaaacccaaacattgaaaaaggaaaaaaaattgtgattcaaagattttaaactgggtccaagcagaaagcgagtctaacatgggccgggtctgttttaaactgggtccaagccttctaatcttatcacgtgagcgtcacgtgctctctttttctctctctctctctctccctctggctgacgaatcaccggagaacccaatttgtttcattcctttcccgttttgcccttccctgttcttttattcttttcttatctacaaaaaaaacttcgagcaagaacaaaaaaaaaaaactgtccatgtaccacaccatgagattagttgtcagatagatattcgcgagacgagaagctccaattaaaaaccctagagctcatctctctctccaggtacggccttttcgtttttggctttcaccggcgtggatctccggtgacggggagattcggaatttcggagagattttagatc

SEQ ID NO: 6673 - DNA, 3000 bp, Unknown
  misc_feature (1)..( 3000): cDNA_ID_3090678_gDNA_ID_1621100_Annot_ID_171384 3000 nt of promoter + ATG
tatgggatagacttcaggagaagaaaaaaaaaaaaaaaccggaaattgttcgggggattgaacccgacgtgaatcgaacacgcaaccttctgatctggagtcagacgcgctaccattgcgccacggatccggatgttattatgttgcatttataaaattataataccgtagtatacgcaaattaaacaaaacattttgaggacgcgttcccaacacggccggtgaccaaagagtcaatttaagcccgctttaaagatatcaaaatgatataaaactctaattgatcgagttaacggcaggagaatcaaagctactaatcataatcaagaaatttaatatatatacgctattattattgttttgaacgataaacacgtggtctggtcgtgattaaggtcctaattatgtcaacgtttgcctgccacattgcagaccgaagtactaattccacaccgactggtctacgacatatttaattcataaacacaatactttataattaaattgattcttgtagagatttggcttcatgatctgatttatttagttaataaccatttcaacagataattacagtttagagcctttttccagttgtcaagagtgttatggttttaaaatggcaccctgtaaatatcacatatgttagtggatttattttaccaaagaaacaaaaaatgttaatggattaaaaaacttgtgtttttttagatagcaaaaccaaaagaagatatggtgaccactaacacgatcagtcgaagacaaatgtttcccagactttattattggcgtttccattttgcatattagtcaaattatggagcatcgcaaatatctaataaactaactatataaaaagttattataatacagggttaccaattccgtatattcagaatattcctaagaggtgccattttgactaataaaatggacggatctttgatttattccggaagtgaatggatattagaagaaacaaaagaaattttgaatttcttgtccaaaaaatatttttcccattcttagtatacagaaacatagaaaatatcgtgtatgcttacgtaacaatcaagttgtaaaaagaaaaaaagacagaagataaatagtacagaatgaacataacagaaatcaatctatggaattaggtacaattaggttcggtctaactgaaattacatgacgacagaaaaaactgaactaaacgccgattctattaacttccaaaactgactcgtctcacacgcgcttactatgattcacacgtgcgaatatgccatcatataagcgctactaaaattcattccaaaggaaaaagaaaaataaataatcgatctcaaccgtccgatcatccatcttgccatcaccgttcaccaatcttcttcgtctcctctctctttctctctttttgctgtttctagctcctctctctctggatctcgccggcgaaccgtttctcttgggtggtgagtgttgcttcttatttttaagaatctttttcttttatttccatcgaatttcgtttttttgagtttgatttttggcctgtggaattctcgatgtttctacattgatcgtctggtttcgaatcgtgttttactggtacaattttgattccatctccgtatcttatggattcgaagaactttgtgttttttttttctttcttcattgatgctactttgctagggtttacacttttttcttccatggtaaaaaaatttgagcaaagttgttgagattcttctagactgttttcaattttacgtttcacaaagatttttttagatgatttgtttctaatgaaatggcattgtttgtgttctgtttccatatgtgtagattttgaaaatatgtttgtgatgattgtgcagtaaacagtagcaatcaagctatagaatctcagatatcgctgaattagctgttggattttatccgccttttcttcgttatccggggctcgggtataaggtttcatcgtcttatttcatctgtaaatgggctgcttccactcaaaggcagcaaaagaatttcgaggacacgaagaccctgttaagcttgcctctgagacagcttgtaagtttactcgcgctataagtttaaacctcctctagattcatttctctcaaagctgcatgttcatttgttttctgatatgagatgagaatcatcagttagattcaaatcattctttctctgttcactgatttagtttatctccggtttggatttttttagttttgtgttttggagtctttgtctgcctaacaatttctagtaatgatccttcaaagttggttaacactctatctcatgtttcttgttaccaataccatcaccttaatcttgttccttaacttgtcaagacgagttctctctccatgcaaattctaaatgtgaattattagtctctttgtttgtttgtttgtttgttcctggtaattctttgttttgatctcgtagtgttgcttgtttttttctcttttccagttagtgtgagtgaggttgaagcattatttgagctattcaagagcataagcagttcggttgttgatgatggtctgattaacaaggtacaaagtttgtttcttttgacccaatttggatcttttcatgaccccatcgttgtatctttttgttctttacgctattcatctacagtatttttcaacttagttgactttatttgagcaataattattcttccatgacgatatgtctgttccatattgcatcgattcaatgtatcgtagcccttaatgtttgacttgaacttaacttattttattgattgctttgattttgaattttgaagccttcatggcccaccttgtttatgttgttttttaatcctggcttcacatgtatgcaggaggagtttcaacttgctttgttcaaaagccggaagagggagaatatatttgctaatagggtaaaatcttaattcttcaggcttttacaagattcatcttctggaagagtgatctaaaccaagataat

SEQ ID NO: 6674 - DNA, 3000 bp, Unknown
  misc_feature (1)..( 3000): cDNA_ID_3090684_gDNA_ID_1621100_Annot_ID_171382 3000 nt of promoter + ATG
acattaagggctacgatacattgaatcgatgcaatatggaacagacatatcgtcatggaagaataattattgctcaaataaagtcaactaagttgaaaaatactgtagatgaatagcgtaaagaacaaaaagatacaacgatggggtcatgaaaagatccaaattgggtcaaaagaaacaaactttgtaccttgttaatcagaccatcatcaacaaccgaactgcttatgctcttgaatagctcaaataatgcttcaacctcactcacactaactggaaaagagaaaaaaacaagcaacactacgagatcaaaacaaagaattaccaggaacaaacaaacaaacaaacaaagagactaataattcacatttagaatttgcatggagagagaactcgtcttgacaagttaaggaacaagattaaggtgatggtattggtaacaagaaacatgagatagagtgttaaccaactttgaaggatcattactagaaattgttaggcagacaaagactccaaaacacaaaactaaaaaaatccaaaccggagataaactaaatcagtgaacagagaaagaatgatttgaatctaactgatgattctcatctcatatcagaaaacaaatgaacatgcagctttgagagaaatgaatctagaggaggtttaaacttatagcgcgagtaaacttacaagctgtctcagaggcaagcttaacagggtcttcgtgtcctcgaaattcttttgctgcctttgagtggaagcagcccatttacagatgaaataagacgatgaaaccttatacccgagccccggataacgaagaaaaggcggataaaatccaacagctaattcagcgatatctgagattctatagcttgattgctactgtttactgcacaatcatcacaaacatattttcaaaatctacacatatggaaacagaacacaaacaatgccatttcattagaaacaaatcatctaaaaaaatctttgtgaaacgtaaaattgaaaacagtctagaagaatctcaacaactttgctcaaatttttttaccatggaagaaaaaagtgtaaaccctagcaaagtagcatcaatgaagaaagaaaaaaaaaacacaaagttcttcgaatccataagatacggagatggaatcaaaattgtaccagtaaaacacgattcgaaaccagacgatcaatgtagaaacatcgagaattccacaggccaaaaatcaaactcaaaaaaacgaaattcgatggaaataaaagaaaaagattcttaaaaataagaagcaacactcaccacccaagagaaacggttcgccggcgagatccagagagagaggagctagaaacagcaaaaagagagaaagagagaggagacgaagaagattggtgaacggtgatggcaagatggatgatcggacggttgagatcgattatttatttttctttttcctttggaatgaattttagtagcgcttatatgatggcatattcgcacgtgtgaatcatagtaagcgcgtgtgagacgagtcagttttggaagttaatagaatcggcgtttagttcagttttttctgtcgtcatgtaatttcagttagaccgaacctaattgtacctaattccatagattgatttctgttatgttcattctgtactatttatcttctgtctttttttctttttacaacttgattgttacgtaagcatacacgatattttctatgtttctgtatactaagaatgggaaaaatattttttggacaagaaattcaaaatttcttttgtttcttctaatatccattcacttccggaataaatcaaagatccgtccattttattagtcaaaatggcacctcttaggaatattctgaatatacggaattggtaaccctgtattataataactttttatatagttagtttattagatatttgcgatgctccataatttgactaatatgcaaaatggaaacgccaataataaagtctgggaaacatttgtcttcgactgatcgtgttagtggtcaccatatcttcttttggttttgctatctaaaaaaacacaagttttttaatccattaacattttttgtttctttggtaaaataaatccactaacatatgtgatatttacagggtgccattttaaaaccataacactcttgacaactggaaaaaggctctaaactgtaattatctgttgaaatggttattaactaaataaatcagatcatgaagccaaatctctacaagaatcaatttaattataaagtattgtgtttatgaattaaatatgtcgtagaccagtcggtgtggaattagtacttcggtctgcaatgtggcaggcaaacgttgacataattaggaccttaatcacgaccagaccacgtgtttatcgttcaaaacaataataatagcgtatatatattaaatttcttgattatgattagtagctttgattctcctgccgttaactcgatcaattagagttttatatcattttgatatctttaaagcgggcttaaattgactctttggtcaccggccgtgttgggaacgcgtcctcaaaatgttttgtttaatttgcgtatactacggtattataattttataaatgcaacataataacatccggatccgtggcgcaatggtagcgcgtctgactccagatcagaaggttgcgtgttcgattcacgtcgggttcaatcccccgaacaatttccggtttttttttttttttcttctcctgaagtctatcccatacggcccaatcatactaagttaagcccaagaaagcccttatcaataattctaatttcccccctaattatacgactagggtttatctgtcctaagccatgaaaattatttgaaagggtttaacagagagattcctcgtaacacttccctctgtactaatttcaaattcgtttacgtttcttcatctattctggctgcttgcagccaatttttttgaagttcgaagcttcaattgaaatg

SEQ ID NO: 6675 - DNA, 3000 bp, Unknown
  misc_feature (1)..( 3000): cDNA_ID_3090698_gDNA_ID_1621100_Annot_ID_171375 3000 nt of promoter + ATG
tacctttttcactgactttgcttctctatttgttcaaattctcgttctcaacatggtaagttcttcccttaaacccttggtgagttcattgttacctctaatgtctctctatctaatacaatttcgtcttattttgtgcagtttaggaagatgaagaaaggaagaaaagaccgaagaaactgaaaccaccaaatcaaagtctacatagctcagagttttagtcaaatcactctttttacttctctttgactagtctctttgctatcataaaaacttcagattgtaaacgactttgtactctactctggctctggcctttactgtctaatatcaaatttataacaaaaatgcaagttaggagaaagtcataagtgtacatgtttcaagaactattccaatgtttggtcaaatcttatgttctatttggatggtttaaaatgagtaaacaatttgatctacagtttctagtatgagtgaaaattaagatattagggaaaatactagagactgtaaccacactttttgtctatgagtctatcttacattagaaagaagctagttgatatttgatactaaaataattttctgctaatggacattgttgccatagtagttgtgttgctgttattattagcgtatgaaaatgaaaatgggttttgtaaattgtgatttgtaagcacgattggggcatgactttttgtgtttgacctctaatagcactccaattctcatcgtcttttctcagccgttcgatcatacctccatcattttgcctacacctctcacaccatttcattattacattaccatcgtttcttttaaaaaaagaatatatagatcagagatgtgattggcatctgaatttctggttacactattttaaaatttggtaagactactcttcaattcggtctctgacacattattcttcagttttcgtaactaatgctccataacattttaccaatcacattagattatatcgtttacttaagaaaaaaaaatagaactatttttgttttcttgtgtttaagataaattttttggagtaatgctatcactcgataagttaacttggttcggtttatttacgttgaattgagaattctttattggtgcattacactatgtacgaaaccaaagaaaagaaacacaaagaactaaagatctcaatacatatactactagttaaatgcaaaagaaaaccgaatattataataaattacacgtataatataatgtatggtgttgatatcgcattagttccctaatcacattcacaaattaccaaagaaacataagtaggacccatgttttgaatatctttaactaaatcaaacggtggagggaggagttgtgtccatgatcgtcatggtggacggtgactttacataccatttctttctttttaactttgttttttttatgacacatatttatcaataattttagtcttttctttgttataagaaaaatatatataccccacttaacaaaacttattctaccagcatagtattgtcacacatgtaaaaaaataagcaaaaataacctaatctcttaatctagtcgttgacaaaactttagtatttgctaagttataaataaataaacaagaacccaattataaaccttattcagcaaatccaaaggcatgaataaatctaccaatcgttacggtatttaaaataccgtattgtactatagatttatactttcacattctgtcgacacattattttttcttgcacaacattttttttttattatatttttttcttgcaaaacatgaacaatattattgacaaagagtgtatgtatcttatatagtttttttttgatgtagttaataattttagagaaaaaaagcttaccagtgcttttttcttcctcatttttttttcatagtcattaatatttataattgtcgttattatatttattatacatgttggaaatatcaatagtaaaacaaacaaagaaagaaaagtctatagtcaacaagaaggatggaagcattaggcataagcaataatattcctcctacccaaaataatactcctataacttttatattaaatctgatagtcatagatctcatttcttgttaaactaattttctaaaatgaaatctcaaaattttatgaaaggatgctgaaacatttactttcaaaaataacaaaagaaaacaaaatgaaatgaaagtggccattttatgtcgactaaaaaagccattttatatgatgtcaacaaataaagccattatatgctgaagtaattttttatttttttttatctaaaatgaaattgaaaggaggaaaaaaaacatatttcttttttatgtaaggaagctgaaacaattaatttcatcgttacataataataatgcaaatgaacaaaaataaaaataaaataaaaagagagaccattttattattattattatacacaaacagtttctcgctctaaaccctcaaagttgttctctctctctctctcttctcctttttcacagccatttattagattcctctctcacaattagtctcttctcttttctattggattgttgtattagactgatagctcaaggaacccaaaaaacaaaaaccaaaaaagataacataaattatcttcttgaaattgttctctttcttgctttgattttttcaattttcttatactgagtttttgtatttctgtaaaatttgcttataggagactttctgggtatcttggcttcaatttgcagaaaaccaaaaaaaaaaaaaaactttttttctgggtttttttccttagcagagaaaaggttcttaatagttttaagactctggttttgtatattccaattatagctgaatattaaacacaatttataaaacttaaatttctttccaaaaaatctcttctttttaagtctataaaaattgcaactttcttctgaaattattcatttttgaaaaacacaaaagaaacaaagagagagatagagatattatg

SEQ ID NO: 6676 - DNA, 3000 bp, Unknown
  misc_feature (1)..( 3000): cDNA_ID_1815172_gDNA_ID_1621100_Annot_ID_171373 3000 nt of promoter + ATG
ctcattatgtgacccaaaaaaagaaaaagaaaaacaaatcataagggaattcatcgaccacatcctaatacagtaatatctatgctgaatgattcatagagattagggtaatttaataataaaaagttgggttccaccttcacaagatcaaaattcaagattcgaatagttgagacgaagtcccaaaagaaataagacgagaacatgtcttctgtttttgttcctgaagaccctcaagagtcaagacacaccaaacaacatatgcacagaacacagactcattcatacatagtttctattaaagtatggactttaggtcatcctaagccatatatcattcattatcaaacaaggaacaggtctacatccatcaaccggaagttcaactaatcttaatttactttctcagaaaatgtgcagggaatgacttacaggcttaaaaaaaagaaagaaagaaacaattcttacaaaaaaagagcacaatgcggaagattactacctctggaggtcaaacacagcacggtggatggtgttcacttgaaagtggacagacgaggaagcttgtccctcagatagtaaagccttgctcttcttactttcctgtgactcaccacttttatctctttgatgttgggagagtatctgtcaaatcaaacgattaggagaatcaacacataccaaacacttttcttaattcccacatggtaagaaaataaccgatatatcacaggaagtttctcgagactcgtatgttatacagcagaatgaaagatagtaaacatgagcagacatgatagttgccatagtgattcaggctgccataactgggaaggtataacagcaactaaagacttattacagtaaaacctctgcacagagtctaactattatacagggactttatgtaaggtaacacaaagtataactcagtatctatgtataaacttggttttattgaaaagctcagaacatgtgaaaagactcataatcaaagtaggtcataccaaatggtcactggagaggggaaaaaactcacatgggaaacacaatttcaacaccgatacccgcaataattctccgaatacgaatggtagtgtgtatgcctgcattttgtctcgacatcactatgcctttgtagatagatagcctacgtttgttctcaggaacttcctgccaagccaaacaccatatcccaccaataatcaaaaacatcgattcaatccataacttaagaggcttcaaaaatatcaacaacttaccaatttgatttctacaatatctcctgtcctgatttctggaacaggtctcactttctctgctacctcaattgctttctggttcagtatctacaacaatcaacagataataacattcaatctccctcaacattgcctataagataactatagaaaaagcaagtccctcaacacaaatgtgtacacagagacttactgattcctaattgctaaacactcataatttggattactgataaacaaagaagttcactaacccccatgacatctccgagcttgatcctaggttttcttgtaggtttagcttcgaccacttcctctacatttccttccgtatcagcgatttcagcaacaaattcttcagattcagcttctgtgttaccttcttctgctctaacgataaactcatttctcaccctagtatcgagtgagaacccaaatttcgagccgggatgattcagagaaagcctagaaactgatatacgagaatccatcgatggtgcacacgatagaaacgaagaaaaccctaaattcttcgatgattgcgtagggtttctgggtatcatatgcaatgcctaaaaatcccatagaaacaaataatcaacaataatgaattaagtgaaaatagagatttcataagctttcgtatatttaaacctgaggaagacgatgaaagctcatcgccatagctgcagcaaactctcagttactcggagaaaatggagggaagacagtggaaaagagccttatctgcttttcgcttcctattttggcacacgtatgccatcgcacgtgtgaattttctttatgggccgtttgttattgtgggcctttagtatatcaatattaatataaatagatagtactatgatttataaaaatatcaataaaagagtcggctaatgacacagtcttattatgattacataaacctataatttgggcccaccaccacgtcggtcgtgtgggccgtcgcttcatgcgtaccaaagtggtcaccgtggcatgacaactgttgttctgccttttggctctaccgtaacaaataggacacgtgtcgcgtcttcacagtttatgtcgtgttctatctctctctgtctctctctctctcccgccaatatctctctccctttggtctcttctctctaatcgctctctctcaatcaaattaattcgtgattctgatttatcaaacactaaaacaaatggatttgggtatttcattttgatccgtaaaggttgattcttttttttttttgttatcattgaaaattttgttttgttgtgagagatggcgatgaattcgaagaggaaaacaccacctgggattgcgcttctgaggagagtcagaggaagaaattggagtccaaagacgtttcggtacgcgattttgtttattactttcatcgcatatgcttgttaccatgcttctcgtaaaccaagcagcatagtgaagagcgttttacacccagactcaagcactaagccacctcaagaacataacagcgacaaaatttatccttggcctatgggtaacgtgtttgtgaagagagaaattggtgatatagatgaggttttgttgcatcgtaagtctaaaggatgggaaccgtttaatgggaaagatgggacgtctaggttgggagagattgatgtggcgtttcttgcttgttactctataggaatgtatgttgctggtcatttgggtgatagtttggatctgagattgtttctgacttggggaatg

SEQ ID NO: 6677 - DNA, 3000 bp, Unknown
  misc_feature (1)..( 3000): cDNA_ID_2123239_gDNA_ID_1621100_Annot_ID_171372 3000 nt of promoter + ATG
gtaactagttgacttatggtttctcgtttaattagttaaaaagagaaagtctaagcatttcattcgaattctttctcattgcttgtacacttctgttgtagtcattgagcatcaatgagtttctgaaacctgcggatggaaagagttactacagaccaagaggtggttaccaaggtggaagggaaggacgtggaccaagagaaggaaaccagagggacggtggaagaaacctgagggaaggagggagaaaccagagggacggaggagctgcagcacaggcaccaacaccggccattggggacagtgcacagttccctactttgggtaagtaaggcaatctctccggtttggtccttcagcttctgtctggactcgtttctctgtaatatctcactcggtttggattttgttcttctgattctatttttattgttatactcttccctttagagagctgaaggttttttgttttgcgaacccaattttgggagttttaagttaaatgaggccaaaaaatcaaccattctccttttgttgtttaggtttcaattatatttaggtgggactttttactaaagaagtttattaataatccaagtaccattacaaagaatttaaaagcttttggacacaagtgaaaaattgaaaaaccaaatacaaaagatttaagaagcaacgttgtttagatttcttacatgcaaacgaatgacataatatggttaagtgttaccaaagcgaattaagaggagcagcagcctgattgctggttaacaggttgtcctcggatctggaccgttggtggcttagatcctcctgcaggttggctcgccattctgcaagacagaatccggttaaggctgctggtctacaaatggtctgcaaatgtaataaatatatgagctctgaatacaataatgattggtgagttacctggtcttgattgcagcagtcatggccatgaaagcttcttcgacattggtagcattcttagcacttgtttccaagaatgggatcccaagttcatcagcgaaagcctgtgtagacagaacaaccattacagtaaatccttgagacaagacacaagagtgtcaaagaacctttaactgtgacgaacttctgaagcatattaccttagctgtctcagtggatacaactttctgtgatgtgagatcacacttgttcccaaccagtagcttgttaacattctcacttgcatagcggtcgatttcatttagccattgcttgacgttgttgaagctttctagatctgttacatcataagtcacctgacaaaaatgaaagtttagtttcattaatggatgtcagaaaaagggagataatgtaagtgtgacaacgaacttacaataattccatgagctcctctgtagtaactgctagtaatcgttctgaaacgttcctggcctgccgtatcccactgcataattggtgatagtaataaggagagtgatcatatatatatatatatatatgcacatacaacaatttcaagtgattggcactagtcgagacaacttacaatctggagtttgatggtctttccatcttgttcgactgttcggattttctgcaaaaaacatcatcacaaaattcaaaattaaaacttttctgtttcatgcatgaccaatagataaagtgtaagaagcttacaaagtcgacaccaatggtgctgatgtagctatccaggtaggaatcatcctgcacatacaaacaaattgagacactacttgagaagatcaacaacgacacttaatagagttacttatttgtatgtagcctatttatgtatacaaatatcataagctaggtgattaagagagaaatgaagttacttacagcaaaccttagaagcaagcacgactttccaacaccagaatcaccaatgagcaaaagcttgaacaaatagtcactgcagatcaaaaaaattagaaagaagcataagacacatgtaagtaagagagtataaatcatttttgacatttctccagctatattaagagcttatgacatatttcaaagttgctaaacattgtgaagaagctcatagatttctaaacgccatattcaaaacacaatctcaagcaccataatcaaaatcgactatggattcacgtcacacccgtagaattttcaaactaagagaatcatctgtgtattgaagagaaacaacagatctcaaccaattttattctagatctaatcaaaattccgatcaacgaaacgagactccaatcacgaaattgatcagacagattaacaaagccagcatcaacataaggttaatttcatgaatctccttgtaaaaaaatgatacgaagaaaatctatagagaaactaaattacataacatgttataaatttcaaaatcgatctgaacgattagagaagaagaagaagaagaaggttcttactattcaggattcatgattgatctcggagctggatcgatctaccggaagaaaaataaaataagaagagagattccgccgattaaacagagaaaagagccgtgatcttcgtcggtgatgagagactgagagagagagagacgtaacacgatcggtttgttgtgtcgacgacgtggttaagaaatgagaaagggccacactacaactattgtttttaaatgcttcttttttttggttgcattgctgacgtgtcttcgccaacccagaagatgcgtggacgagaaagtttcaatacgatacaacaaaaagaaaaagaaaaaagaattgtatttacataatgggcctaatgaaaaaacttatcactaaggcccattaaacattttctcatcgaccagggaacagagaacgctgaatcatcttcttcttctctttcattttccgagtctctatctcttgctttatcaacagttcggtaactacgacaaagaaaaacaggcgggaaaccaaatcaatggaggattcttagctttttctctgtaactcccattatcgtatcttcagcttagtgagatag

SEQ ID NO: 6678 - DNA, 3000 bp, Unknown
  misc_feature (1)..( 3000): cDNA_ID_1815179_gDNA_ID_1621100_Annot_ID_171371 3000 nt of promoter + ATG
gttcctgcttctgaaccactgttaaccgatagaagatgatggagaagggagcagcgagagaggcagtgtgaacagaaaccattgtttgcgcaagagttttgttctgttatataattatgagtttgcagaggaacttacagttctttgtattctgtgttttgtctgatattgtgaaaaatttctttatctcataacaaatgaaggaattggcttacagctttcttcctctatttcttctctgttttctacgacactcaaagcaatctttgcatggtggtgtttcgtaattgtaagaggaaactaatttcagtttttcgggtgaaactttgagatcttctatgattatccttcgaagcttttcgttctcttccattacttcatcaatgagtttctgatgtttcagcacctacacaatcaatttcgtgtatacataaccatggactactaaatctgataaactgtaacagaaaaaagaaagaaactggaagtcaagaaggagacgataccatttgaagcattaagctctccgattctagttgtgtgacctatcaatgtcatgaaacaaaaggaagttcaaggatggctttctgagatcaaagcagagagggggaaacattctgtgatagaattattacctgtcgttcttccgcagttgtgtcctggtgtttcagaatagggttgtcgagaaaactgttgatcactttctcagttcgagtaccaaacgttcttgaattagtagaggaaccactgttcttcaaagatgcttttgtgtccacatgtttcttgtgaccggttacagattgagacacctggtcttcagtctcagtttgacttgaggtggtctcactcgttcttccaagtttagtcatcaagttggatgcagttccctagaaaagattcatactcatggttttatgtgaatgaaattaataaggacactctttgaaagactggtgcttaccataatagaagcttgaagtttgtgtatggcacttggtttcactgcaatgcctgtcaatgatggatatgagttaatgacaataagagagcgatagttcaaataagtaactcaagggatgcttatacaaccaacaaatccaagtaactcaactgttcagaaacaagccatgtatcaaaattgaagagcgtttagaacaaaatcgaaacaagaagttttacttagaacggaaacataccaactccgaaaccatgaccaaagccaactccacagccaacacctgcttgaatgttcctcgctccaagcttccgcaactatagatggcgcaagtacacaaccagattcagaataacataatgcaggaagatctaaaaaagagcaggaacaagtttgtctatactgtacagcgccattcacgtggtgtgtggcacccgaaaatacattggttgctcctctagctgaattcataatttcccccaccattggaatactacctgatatgtcaataacaacaacatcaataccagattagtgatctcacaatcatgatgctgtgaaagcaaaccaattagcaaagtaaatgacacacgattttcaactatgagtgatagcttaacactagtttcatttccaagaactctgattgaaacatagtcttcaacaaacaataaaacttcttaatttgaacagaccataaaatcatcagtggcagcaatacactgagaatcaaaaatcaaactttcaaaatcaggttaatttgagctgattgattacaatcaatctcaccagatttcttaattacacactccttcacacctcaaaaacggagcaaaaggaaaaagagagtatataccgagattcaaaggtgcaccactaccaataccaactccacaaccaacgccaaatccagtgaagacttgaagagccttaaaagcaaaaggattctctattttaattccccttttagaaaaccctaatccttccttcttcatcaccacaccattgctgctgatgcttccgccgccaatttcctccatctatctcactaagctgaagatacgataatgggagttacagagaaaaagctaagaatcctccattgatttggtttcccgcctgtttttctttgtcgtagttaccgaactgttgataaagcaagagatagagactcggaaaatgaaagagaagaagaagatgattcagcgttctctgttccctggtcgatgagaaaatgtttaatgggccttagtgataagttttttcattaggcccattatgtaaatacaattcttttttctttttctttttgttgtatcgtattgaaactttctcgtccacgcatcttctgggttggcgaagacacgtcagcaatgcaaccaaaaaaaagaagcatttaaaaacaatagttgtagtgtggccctttctcatttcttaaccacgtcgtcgacacaacaaaccgatcgtgttacgtctctctctctctcagtctctcatcaccgacgaagatcacggctcttttctctgtttaatcggcggaatctctcttcttattttatttttcttccggtagatcgatccagctccgagatcaatcatgaatcctgaatagtaagaaccttcttcttcttcttcttctctaatcgttcagatcgattttgaaatttataacatgttatgtaatttagtttctctatagattttcttcgtatcatttttttacaaggagattcatgaaattaaccttatgttgatgctggctttgttaatctgtctgatcaatttcgtgattggagtctcgtttcgttgatcggaattttgattagatctagaataaaattggttgagatctgttgtttctcttcaatacacagatgattctcttagtttgaaaattctacgggtgtgacgtgaatccatagtcgattttgattatggtgcttgagattgtgttttgaatatggcgtttagaaatctatgagcttcttcacaatgtttagcaactttgaaatatgtcataagctcttaatatagctggagaaatg

SEQ ID NO: 6679 - DNA, 3000 bp, Unknown
  misc_feature (1)..( 3000): cDNA_ID_2999833_gDNA_ID_1621100_Annot_ID_171370 3000 nt of promoter + ATG
ttcgaaattccggtgatcggaggagtaatttgcggaaatagaagggaaaattggaaaaataggagagtggagcaatacctgattcataacatctgggttagattcaagtggaagccatctcttagatgaagaactctcgcttgcggtcgccatcttaggatctttctcgtcactatcgatcgaattttgcagaagaaatcaaaatccttctataagaaaacaacacttcggctccaagatacgaatccctcaacatccgataattatgcaatggttcctatctattaacgggcctggctcactttaatccttctattaacgggcctgaccctctttaatccttctattaacgggcctgacccactttaatctgtctatccccttcgtatgcaattgttattttcagttgccaacgaatccaagttgtccgattttggtagaaagtaagtcaactagtcaagcattttaaactcatttgatctcaattggttagcacttgtacaatagtcaggtggtgaaattatgccttattgcgtgttatccatgattatcactatcgacaatatgattcgattgtatggtccattgatctataaatgtggattctctaaaccatgattaccaaccgcatattataattcggaaacaagaaaagaagattcagaatgtacaaaaagagaatccgagtaagtcattgactcagaaacaagacttaggagcattgcttctcttaataacagcctcaggcactcttagagatggctgtcacattgaagttgagagaactcggattcttctcgattatcttctttatcactttcgctgcgtcctacgaggataatatcaaagctattcaagtatataccggtttgcatttcctggattctttcaccgttttgataactttaagcttaaagagtgaagggtttatactactttgataattcttaagcttatagagtgaagtgtttatagtacatgcaataaggtagctggagaggaagtaccatgtgaaactggtcctgccctatctccatcaagttcatagagctcacttgcattatatggtaatagagtgtcacagtttagtgccaacttggaagtgagtttcattttggtgttgatatgaattttttttaccatctacacaagctaaacaaatgaaatgcgtgtccacctagtctgaagcctgaagatgggtaaacataaaaaaaccaatgtaacatctaagtgaacaagtcacaaatacattagcatcaacgggaggtgagaagttaccgttgtatcaccagctataatagctaaagaatgagcatatatcttctatttgactgtcgctctcaagaaaccttgctcgctatcaaaatttccatagacacacacattagacacgaagcaaacactctaagaaagatcaaatatataggagaaacaaaagatagagaaacacctctataggagtcatattggcagtggatttgaagaatctattcaggaacgacccctcagctgaaataagaaatcaaaagtgataatcgataaggattaatatctttagattaatgaaaggaacaaatagaaagcctgaatataactcacagagtttgatctcaaaggttatattctcaatagcatgaagaaggccaatggttccacaagcattatccacattttgtttcatgaagtaaactttatcactatgcacctaccaaattcatcaacacagagtatgaacgatacttaactacaaagacaagggttcttttttcatagaacaacccagatgtttatcagagagaagctcatcctttccttgatttcttggttatatacattatatatataaaaaatatgattaattttgcttagaaataatcttcctttaagaaaaaatgaaatatttacatgaaaatcaaccaaaatgaaagaatttttatacattatataaaaaataatatttttgtttcaatgtaggtggacaacttttatcctatgtagtttaaattaactgtgtatgggggtcaaaactataaaatactaggtcattataattattcctaagaaaaaaatatagttgtttttattttattttatagaggtcaattgacccccataatactgcactgcgtatatatgtttttgcattccgaattttgttttacctccgtatcatagagactgaaatatatatcgggtcttgtttacacaaaaaatcttaaaaataaatgaggttaattattatacaatatttaaaatgaagagacgtatccagtagcatatctagaaattgttgttgtaggggtcaaaagttttctttaatatataaaataatatacattatagatattaaaaatattcttaattttgcttagaaataatcttcccataaaaaaatgaaatatttacatgaaagtcaaccaaaatgaaataatttttatacattatataagattaatatttttgtttcaatgtatgtggataatttttatcctatgtagtttaaattaactatgtatggagtcaaaacaatataaaatacttagtcatcatgattattcttaagaaaatatagttgatttttttaattttatagagatcaattgatccccataatactatactgtatatcttttttcgtaggatttagaatggaaaaccttttggaataattcaccaatttacaattcattttatgattttgccatcacaaacgacatcagagtaaatatgactaacgggcccggcccaataattcaagattagttttttttaaggatttctagggtttttactttttagtatattatcttcttctctctctaaccctcagttctgttaagtacttggcttctaacaaacgctgtctgaatcatatttcgattctgatttttcttcatggattcgtatagccaataagttttttcaatattcaaaacaaaaaccccatcaaaataatctccggaccagtttctctttcgattcagtcggaccggaaaaaca

SEQ ID NO: 6680 - DNA, 3000 bp, Unknown
  misc_feature (1)..( 3000): cDNA_ID_3090710_gDNA_ID_1621100_Annot_ID_171363 3000 nt of promoter + ATG
tttaaagttgaaactgtacaccatatatataaaagtgagataaatgtaagaaatgcacgtgttcaatcatatggttgaaatagactggatacatgcattttgattacttttacacacaagtatttatagaatagtattatagtaccttcgtagaaattacatattccaacttaattgtagtatactgttcagaaagagtaactatttatgtccaattgccaaaaaataaatattctattaaggaagttattgaatagttttgttgaatggaattcgagaagaacaatttaagtatgaactagtatattatacgatcaaacttttcgttcttattttattaactgaactatgaccgcgatcacacatgttaacaaaaaattaacaaaggtaaattaaaatgatgattaattatagaataataacgttaaacatatgaaaacttttggttcttataaaatttatagaataataactaaattagaacaaaaaattaacaaaggtaaattaaaatgatgattaattatagaataataacgttaaacatatgaaaacttttggttcttataaaatttatagaataataactaaattagaacaaaaaattaacaaaggtaaattaaaatgatgattaattatagaataataacgttaaacatatgaaaacttttggttcttagaaaatttatagaataataactaaattagaacaggaaatctcacatattaacaaaaatttaataaagaaaatatagtatgaaagtaggacatgttgtatagtggttaatactaatctcgtctaatttcgttaactacgttttagaggcttaagggtagtttacaatttatgtctcttgttgtaaaaaaaaaacatttacgatatttacataatcgaacttcttcactgacttttttttaaataaaaagaatctaactgacatcctctctagactcagttaaacaaagagtctagaaattagtttaaactcaaatacgtaacataagcctagttttggaaacatgtggacctctaggctctaagttttcatttgttgtggattctggcatttggctgttttctaacacacaactctggtgtaacggtaccattatcccagtttaaatatgtataatgcatgtttatatatatatatataaaaattaaagactaatgataagaagaaatcaatcaataattgattttttaagtactagatttttttctttcagtttttgacatcctagatttccagaaaaacttgaaaaactatagctaacatgaacgaatatagcaaacatttttttttgtaggaacgaattagtaaacatgaatactctgtaattattgagaagttaattatggattcgtctgggcaatacccattgatatttcccttgaaacaaagatatttgtaataagaacataagtactggacagacacacagagctgaactagacatgtaaattatttacaaatgttttaaataagtgaaaacgttgatttgaaaaatatattagaagattcatttaaacctacatctaggataagccttgagcaatatgtttcatatatatagtataaattgtcatactgatagaaaattgcatatgtgtgtgttaggctttgtaaattagtttcaagtatgaatcaatatctatgatgaagtaagcacattcgtacgaagacgtaaaatggatatatcacgttcgaaagcagcaaccaaagccaaaagtggtcacatggtttgttgttgtaaaatatatatttttggttataattattgtagaataattgagactagaacttaattagtattacgattccgctaattacgcagcccttatctttcgagactataactttaatattacgattcctctgatagtctaattatgcatgcatttttgtgtgtttgcgttttagtttatgttttatacgtaaggtaatatctattcacttacaaatgaagcgataagcttataattttgtagcttgtacccgtagacacaataaaaatgtatatttatcggtgtaatgttttactatgttcggcaacattttaacaacactttagttttcagtgattatataacagctagaaatgaacatatatatagtgttgatcattgaaataaaaacagctttctggtctgagatgtataaaacaaaaataatggatattttatcccgaaagattatgtagagattggatgaacaaattactggttgaacttgaaattattggactttttttttttaaatgtttttgggcagctatacgagaattccatgggtctttgtccacaaaatgttggcgaccatacgaaaacatcgtcgacattcgacaaagagaatctagtcttcataactaaaatatttttaatccaaaaacaaaaataacatccgacgtacgtgaagtaaaaccagtgtttttcttccatcaaattttgcaactatcataagtttttatataaaaacgtgtgtttatccaaacattgagttgatacggccgctaaattttgatattgcaaatgcatgcatgcgaagaattctcacaacgagtagtaaattaatcaaatattaacacgaaaggtactttataataactattactaaaccgtactaatattttgataaacatgaatcgataaattcttgtctaatcatctgccaaagaaacccaatattagagcgcagcctaattaaaatatttgtgttttgtttttttaccccagctgccattgatgaaccacacgatcaaaccgttgacgaggggtttataatctaatcaaacggtgtaaaaccggtgaaacacgcgtgtacatacaccatcccgcatttgataattttagattttaagtttaaaaaatcctgaggatgttgccttgaaagagtctctcattgacttgactctttcctataaatacacctttccactctctcttctccactgtcaaatcaaatccctcttcctcttcaattctctgtttcctccaaaatg

SEQ ID NO: 6681 - DNA, 3000 bp, Unknown
  misc_feature (1)..( 3000): cDNA_ID_3048768_gDNA_ID_1621100_Annot_ID_171361 3000 nt of promoter + ATG
gtttgaaagtgtgttaggggaccacctcagtatatcggatgaggaggttgtggaatttgttgtgccttacttaatgcaaaactgtatgtgaattttcatgagactataagattgacaaagtttatggactataaatccaaattcatttattgtttctgataaagatttttttaaatttctggtaatttttttaactttgtgtcattatacttagtaatttaaaatgtagaaagtaaaaatagctggtttaacagttaatctttctttggcctatttttacaaggacatacatgtatagaattttctgaaagttttcaaataatttgtttaacctttctttaaagtttcaagtcaatgccgacaaagaaaaaaaaacaaagaaaattatgccacagaagaaatttagatgagtaagatcagtagatacaaaacaccaaccaccaagtaataaattctcttccattttatgactaaagcacaaaaaattagataaatctgtatcaaacgtaaacttattgctttcttccttctggtagttccccaaaactcaaagtactctttttctgtgtaaacaaaaaaaaaatcaacggtactctttctcttctaagttgttgttccatggagaagagtttccagaaatcagctctccttgtgaccttgactctcttcttcttcattccagtttcaatctcggttccattcattctgtttcatggtgattaacaatctttcttcttcctcctctttccttttttttatcgactagcttatgtatattgcttgacatagggattagagatcaatgctccaatggtggagtgagcagcttcgtacagctccttagcaacctctctagctcccatggatcttgcttgtaccgaaccaactccttctttttcttgtttcactctgatcttgtaaaagggtttaattgttgtctcctcctttgttatgtctcatctttgtagagaaataggaaatggagagcaagattcggtgactatgccgcttacgcaacaagcgagtgtagcgtgtgagaaagttaaacagatgaaggatttgagtcaaggctacaacattgttgcacagtctcaaggaaacttggtagctagaggtctaatcgagttttgtgacaatgctcctccggtcttcaactatatatctttaggaggtcctcatgctggcatatccgacattcccaagtgtaatgtgagctctctttccattactattggactatgtgtcttaatcacaatcatgatcatgataacaacaacattggtgttctctgtttcaagtctacactttgcgagttgctgaaaacagcggtctacaccgacttcgtacaagtaaaccttttctcttcttcttctctaatcaagattcaaaacctttgagcattcattactactacccatcattagcaacatcactaatgactctacaggatcatattgctccaagtggttatatcaagattcctacagtacgtaaactcaaacccttttctttgtaatccttaaatcatttcctattagatttagatgaatacttcaactgagaaagcatgaaactggttttcaggatataaaagattacctggaacactccaagtatctgccaaagatcaacaacgagagacctaacgaaaggaacaccacttttaaagaccggttcactagcttgcacaacttggtccttgtcatggtgcctctctttcttaaaccacctaaatcttgagcaacattgttaagtagcttcattaatattgttttcttcatttcctaaacagtttgagggtgatgcagtagtgattcctaaagaaagttcttggttcggatattacccggatggagcttccacacctcttttgtctcctcaacaggtgaaaccttcttgatcatctccatgtcatttctttgcctgatcatcaaccacttgtttctaacttgatattggttatccagacaaagctctatactgaggattggattggtctgaaaacattggatgctgccagaaaagttaagtttgtcagtgtccctggcgagcacctaagaatagcgcaagacgacgttgtaaaacacgtcgtgccttacctcaagaaccagcctgcgtctatgagtgaagatttggagatactgcatctatgattgagacttcattgttatgctctcttagaatcaaatttaaaagtgaagaactttagaggctcctttttcttaatcataaatccaaataatttcatcatgtacattattcaccagacaaagctatacagataagagtggataggtctgaaagctggatgctgccggagaagtcaagtttacgagtatctcgggtgagttgtgaaacacgttgtctctacataatgcaagttggtccatgacctctttaatattggacccgatcactgtcatttttgtgacaggtattagggtcaaatcaattattatttccaaagaatgggagaacatatcaaacatatggaaaaacgttttgtaaaacattaatttctgtagagcctaccgtatttatattggcacaacaattcaccttttgtgtgtatataaaggatcgaaactaatccatacacctcacaactttccaagagaacttaataatacaaactcctctacctctagcatcgatctattactcttctcctttgaatttaacttctacaaaggtattatatctcctctgttagtaatttctatatcaaccatacaccatatacatacttctattagttaaaacgccattaaaagtttttttacacaagtaaaccgttcaataacttttgaaagtctttgccgagtgaagaattttagatcagtaaatatatttcatacatagttttcttccatctttgtattgattaaagaacaaaacattagataaatctgtaacatacgtaaacttcttgcgcacgtaattactctgttttgtgtttaagaaagaattaacggttctctcccactgagtagctccatg

SEQ ID NO: 6682 - DNA, 3000 bp, Unknown
  misc_feature (1)..( 3000): cDNA_ID_3048776_gDNA_ID_1621100_Annot_ID_171354 3000 nt of promoter + ATG
ggagggctacttcttcctcagacgggttagcaatggcatggagctgctgcgagtatctcttatcactcaaagcgtaagcatttcacactgagtttttcccactgttgaaaggtactttataagtaactgcatatgtactttttgtggctttcaactttcaggtacacagtatttgcaacccatatggacagtctcgcagagttagcaaccatctacccaaatgtcaaggttcttcatttttatgtagacatcagagataaccgcttagacttcaaggttctgtctgtcttcctttcgtatgagttcgagactttaggtactgctgctgaatgttacattgttctgatcagtttcaactgcgagatggaaccctacatgttccacattatggccttctattagctgaagtggcgggtctgcctagtacagtgatcgatacagctaggatcataaccaaaaggatcacagacaaagtattacccaaaacttaataaatatgctagcatattaagctctattgttctcatttcatgatgttgaacaggaaaataaaagaatagagctaaattgtgggaagcaccacgaaatacatcggatctaccgagttgctcaaaggttgatatgcttgaaatactctagacagacagaagactcaattcgtcaagcactccaaaatctgaatgaaagcttcactgaagaaagactctaaatagtttataacagaggacactaggatacattcacgttttaattgcaatgtctataagggttctacattactagtcccaagtgagctttcgatttgttggctttcagaggctaaaggtaggagcaaatctacactcttgatattaagtagggaaaaattaatcatcaaaaataagtaataactaagaaacattgctttatggtcagaatcaaagaactcaaaacttgaaacaaactcttgaatgtgaaagtcttccatcccaatgtaattccagaattccgaaacacaatccacactgaagatataccagttcgagaaaaaacaaaacataaaactgatcaccggtaacgacggagagagatactgttgttcttcttccaggttgccctgcgggaaggtctgttcttgtggttgttgtgaccctttccacgaagaccacgattcttctttccttcggaggtgagacctctgagttctctgtgcttgtgcacagggttgcagatccagttgatccttggatcatttcggacggcattgtgtgcagggtctacaaggataatctcgtagtacttgtaggtagagtcctgagaaaaccagagaaccaaaccattactcacttgattccatactattaacacatttacaggatggcatagcaactagtaactaaaaacagtgtgatgcatacctcattgagccagtaggagttaacaaccctaaggcctcccagtttgcgaccagcacgttcctcagcaacagatctcttactacgctggaatttgagctgtgtcactccctggttggtgggtttaccgtacacgatacccttaggcactggcctcttgcgtccaccacgtctgactcgaacacggtagacaacaaacccctaatacagagaataaagagaagtcagcaacacagagagtgaataactcatcaaacaaaagtacaatttttttgatccagggcttaaaaaaaatgtatcaatcttagacaggaacagagtccacaaaagataaagagctgttcagtcagaagaatgaatctatgtagctgggttcaggaagtattctatcataaagcgcagacataaatgactacgcatcaagacaccgcttaaccagcaatcaatcgataaggcttgattcaacaacattacctaaacctattaaattgataaccaaaatgaagagaagaagaaaaagacctgcttggccttgtagccgagacgacgagccttgtcgggacgagtgggacgaacaagacgaacaatggaaggctgctggcgatactcccaacacctaaccctctgaagaaacctcatcacatccgactgcttcttcctccatagctccgacacgtatttgtacgcacctgtaatcaaaaatcacatttcatccttaattaacttctagaatctaatgaacaatacagaaacgacatctgagagagagataatagtgagaaacatacccattgcgattttccggcgtcgcagtcacttctttcttcgaattaggtttgtgctttaaatagatggctccatgggaattagggtttccatcagacaaagaaagcccttattgggcctttttccgttagctttatgtattgggccttcgctacaacataaaacatctctaattgaactgtatggcccattataaatttatgtaaaaggagccaaaacgcaagagaattaggtgaagagtcttttggattcggttacgatagttctctattcctcttcaaaccctagagttcgtgtttctgcgatatccatcggtttctccttcatatatccatcaaacgccaaagattctctaattctctctcgagatcgtctgcaatttcaccgtgaatcatcagggataccgcggtggtttcgattctatttcctcgattcgaagcttggagagtttcagcttctgaattgaagccagtgattcaattgtttggagatatctgagcattgtccctgcgatgtattcgattcaatccaacacgggcgttctcgtttcgtttctgagctttgtgggaaattctcgttgatttgatttcgtcttgaagagcgcgtgagaggtttcttctgtcgaattttgttgaagtccaaccagagaagtaaagaatcatattttgtaattactttttgtttttgttttggaaatcaactttctggcctccatttttttggcctgggttaaggtttttttcaaagagagtagattctggtgtgttttaataaattagtaatacagattgtatttttattcattatcagattaattcca

SEQ ID NO: 6683 - DNA, 3000 bp, Unknown
  misc_feature (1)..( 3000): cDNA_ID_2123123_gDNA_ID_1621100_Annot_ID_171327 3000 nt of promoter + ATG
attgtaatggataaggagactaatatggacccttttagccatgtggaaatatgagcctcattcctagtatttccatttttattagcaggttcaatcaaattaatttcattcttcgtgttatataaactcagtgtccagtttcaggtgtatattgctatgacgaataccagttgaggttaaagagagcaggagaacatactgtgaatttcggaagtcggattttgtagacatccactagttccatcatcagatcaaataagtttgaaaatgcactgtctaggaccattccagcaattgaaggatcttctgctccatagagaaggctgcacattatattcccgcttcatcaaatgatggagagaacaagatgaaatgtggagagttgacacacttttcagatcatagacctttagaaagctggtgaatctatagtcaacacaactactaatactacttttaagtgtgactgaaaagtagctcaagaagtaacctggtaactgcacccatagatcgtccccaaagtccaatacgggatacttgattgctgtttctcaggtaagataccacagtcttgagatcatccttctagcttaagtttaagaagaaaaaatttagataaggaaaagacgaagaaccttgagaaagtaagacccgaaaacacacctcatgccagccaaggcttacataatcaccctcagataagcctgaccccgagaagtcaagggtgaaaacagttatgttagatgggaggagaaccataactgcctcatttgcatctgccctacatccactggtaagattccgaaacaaacggattaagttcttatttattcaactagtcataaacaagttcttagttcctaaaagagatgtgcaagtatctatgtacctattgccatgacagtatataacacaggggagaggagtatcctcccgagaagatgagggaacataatgactgcaacgcaaagtgtgacccctcgaatttgtaagctacgagagtacaaaaacatgagacctataaggttaacctcaagaggaaccagaatttgaagaggacaataagaaaacactaaatcattaggtgcccatacttgcctccaagtcttgtcttttacactttgtgccaccgaggctaaactccttctcccacaaatactgatcaggatcatactcagccctgtcaaaacacccccaacagctatcaattgaatgcaaaaaagttgagacttgaaagagctaaagagggtggagaagtacctaggaggtcgaattacaaagttgatgaactgatcaatcatcttaattccaagtaccagtgaactcatgagctagtagtagtcttctgaatcatgaaccatgtttctacagacattgcttagttttcttcagcaacaaagtcccgaacaaattacaagtgagacaacaaaaagcatcatgctttcgagagtcccatataatttctgagaaatgcgcagatcccaaagactaaagagagagaagaagaagaaatctcaatctcccagcttttgctgaaaagcaagtaaggccacccaaaactatacctactacaagcaaccagcagctgaaaacaaaagggataaataaaaaaagaaagcttttattaaagaaatgacagatgcccagatcttgaaaatgagtcaactaggaaaccgagtctgatgagaagaagaggaaaaaactattctcaaagccacgacttttgagaaagaaaatggaaaggtagaatcagattttcagatctcgaggtggtagatactcgagaaactaagaaacaaattatatatttcccttttgaaggttcgaactctggtctgtgtggtcattgcgctatcaagaaatctcgacctttttagttcattctgagtttgctgttcctttcttctccagctcactaggtggcctgatatagactgacctgtaaagcttaaaaatatctaaaaacataaacttttaacttttacgggtgaaatgtttaaattaaaataaatataatggttaacaacaaaaacatacaaatttaaagatcatccaatgatttttttttttttttacatacatccaatgaccatctaagtgcaaaatttatattattataattaaatattaattttttaaacataattaataagaaaaactttaataaaaaaaaaaaactaataagaaaaaccataaataaagtagtacaaaattattaaaaaacaaataaatatcatagtgatatgtttattattacttcatgcatttggttgatcaccaaaaactacatcaagtaatatgacaaactacaaaaaaaattgtgttttgaattcgtagatcttcaagatcgacaatatttttacaatacttatgttcatattttgtctttcttcagtttgaattgatactatgattttgatgatttttttttatatagatatatatatatgatctaagtatttgtcgcttatgtgattttcttttttcttgtgactagccgctatcgtctgcaaccgcaaatatttctagaaatgagattttgaaatttagcgatattgagtggtgcaaaataatttaaagtaaatttctaaatatgttttaaatgctaacaatcgcaatcgttcacaagtttgcgagttatagcggaaaaaccaatcaaaattcatgatatattatagcaacttcacataattcgtctattcaattaaattcgatcacctatttgtatataattttggttgattcagattttagttggttataatttaaaaaacttcatattttaagaaactttttgtatatgtttaactagaaatgatatattttagtaatttcggttagttcgattaatcaaaaattaggctgcgtaaatccgatttatctaattggtttatatggtataggaatttctccaccggttaaattatttttgaaacttaattaaattttggtttagttcagttactgattagttttttctttttaataataaagtttatg

SEQ ID NO: 6684 - DNA, 3000 bp, Unknown
  misc_feature (1)..( 3000): cDNA_ID_1815247_gDNA_ID_1621100_Annot_ID_55841 3000 nt of promoter + ATG
cttgctcgctcaagaagttagtgaaagctgtaaacgaggcattggtctatgtcaacaagttcgaagaggtcttagacatcgaaggagagttagctaacagcaggaaagctgcagaagttgtttggttaggagttgatctctaccataaatggctcaacgtggatcttcgaaaactatccaagcaacatagcaaaacaccacaggaagttcttaaagagctggtagatatagcacaaaaagagtttacagagtcatgggagaaaaatcggatactatgcatgaagcataagccctcgcactggcccatcaagactcaagcagcaaactcaatgtaccgaatcagccaaacccttttgatgaagtacgaattcaagaaacatttgaaacagaggagactctgttgaaagatgtggaaaagatggtatcggacatagtatcaggatgcttttgcaacacggcacaagttattggaatgaagtgtttggttacagcagtggaagtgagggaagcgtcggtgagagaagcggcaatgcatttggggagaacagagaagatacttgagatcgtagacaggagatgcatgcctgctttgtctcatcacaaagtggcaaagattgatgaatggagagagttttataggaccaataaatccatcactttcactcatccttcgtcccagtgtacgacccgtgaactcattatcacctagaataacacattttcttgtcacatttaaagaattaattacgttttgtacatgataaaccctaattagcaaataaaatcctttctttgtcggttgatctaactattaacacttgatgccaagtctaaagagtttattagtttttaaaacccagtttaccaataataagtttcctttgtcggttgatgcactagtcaaactatcaaagtcgtcaagtttgctttgttgacaaggcaaagctactcttccaaaacattgatccattcttctggaaatttgcaataacgtctcaagaccaatgcaagtaataatttaaccatgccatgttatcaacaaaagctgcttctctgatttctagagtattattttttaaccattattgaagtttgaagatttcttattattgctaaatggtaaaaccatcttgaggggaacaatttgataaaactgtgtgctgcttcctgtctccgaccaaaacatgtttaaaattagattcggaccaaacaagttgtcaatttttagtacaaatcaaaggttcaaatgtcaataaataatcattacattttaaaatttcgaaataaaaggacaaacatgtaaaaaccaaaaaagtgaagcactgatatttgtcatttctgcctataaaatgtacacttcccactcacacggtcacagaaaccaaattcgaagaagaaacagagaatcatcaaatcaaatccctaaaaattgatttttgaaatggagaagaacgcatcgacttcgtcgttgaaggacttgggtccgagtggtctagatctaaccagcgcctttttcaaaccgatccacaactccgatccttctctcccttcaaaccgacgtaccaaagtctccgtcgtcggagtcggaaacgtcggaatggccatagctcaaaccatcctcactcaagatctcgcagacgagatcgctctcgttgacgccaaacccgataagcttcgtggcgaaatgcttgatctccaacacgccgctgctttcctccctcgaactaagatcaccgcttctgttgattacgaagtcaccgctggatctgatctttgtatcgtcactgctggtgctagacagaatccaggcgagtctagactcaatttgcttcagaggaacgtcgctctcttccgtcatatcattcctccactcgctaaagcttctcctgattctatattgatcattgtttctaatcccgttgatgttttgacttacgttgcttggaaactctctggctttccggtgaatcgggtgcttggatctggtactaatctcgattcttctcggttccgattcttaatcgcagatcatctcgacgttaatgctcaggatgtacaggtcagttccaaccaaaattagggatttttgttataaagctgtgatttgttttggttaaacattgcgattaaggagtcattagctggatttaatggtttagtatgataaaaatctatgctttagtggttttatactgtattgttgagaagatcaattgaagagcaaaagtgtgtttggattggttgttgtaggcatttattgtgggagagcatggagacagctcagtggcattgtggtcaagcattagtgttggaggcattcctgtcttaagctttttggagaagaaccagatagcttacgagaaacaaactcttgaggatatccaccaagctgttgttggtagcgcctatgaagtgattggactcaagggttacacttcttgggccattggctactcagttgctaatctggctcgtactatcctccgtgaccagcgcaagatccacccggttactgttcttgctcgtggattttatggtgttgatggtggtgatgttttcctcagtcttccggctttgcttggaaggaatggtgtggttgctgtgaccaatgtgcatatgactgatgaagaggctgagaagctgcagaaatcggcaaagactatattggagatgcagagccaattgggactttgaatatccacatctatatatgcatcaatttcaattttataactagtatcccacgggtgatagtgtcgatgttgatcactatatgttatgtaaatgcttgttcatgcagagtaatcccaactttgagttctattttgaaatagggtatttgcttacaacacacttgagttaccacttaccagtaatgtgaaaatgcgtggttttggcatgaaattattgtgcatattgcaaggcaatcgacacaaacattagtatatcaaaaaatatgatgtgtagaaaaaaagaaaagaaataaatttcttttaaaaa

SEQ ID NO: 6685 - DNA, 3000 bp, Unknown; identical to SEQ ID NO: 6666
  misc_feature (1)..( 3000): cDNA_ID_1815228_gDNA_ID_1621100_Annot_ID_55847 3000 nt of promoter + ATG

SEQ ID NO: 6686 - DNA, 3000 bp, Unknown; identical to SEQ ID NO: 6665
  misc_feature (1)..( 3000): cDNA_ID_1815216_gDNA_ID_1621100_Annot_ID_55851 3000 nt of promoter + ATG

SEQ ID NO: 6687 - DNA, 3000 bp, Unknown
  misc_feature (1)..( 3000): cDNA_ID_1815209_gDNA_ID_1621100_Annot_ID_55853 3000 nt of promoter + ATG
gaggtttcttcttcttcctttttcctgctgaagagcaaaagtatgcattattactttactgatgatactaatcgccaaacatcaatgtatattatataatgtgtaaaaggtgatgctttctcttctttaaatgcataagtttctcgtgctaatgggacaatagccagtgattaccttgctccccagaagcaacctgctgcggcatttcttccttggggggctgcgtattcagttgtgaaactgctgcttccttgccatttgaggatccttgaatgtttgcagatgcatcaactggcttttccactttaactatttctgcagacgcccaagcacttgtgatctctgctatttctattgacggctttagagttgaagtctcattgttgttactaggagctggtttcttttcgcctccagatgcagcagatgtagtaggagatagagccttgggaggtggacaccgtacagactccatatctagatttaatactcattagtttaccaatgatggtacacacaaatataaaagactgcgaatgagagtatgaaataccttggacttgacacatgctgccagcgttctcagcactactgttaccagactccaatatccggtttatagtatcccttagggttttgttaggtagaagatcatcagctaggacatgagttgctccacaaacacacattgactttgcaatgatgtgatctctaatacctgaattgtagataatgattacataaaaaggcgtttgtggaacagcaaaaggaatcagaagtattggcaatttgacaagagaactaacacttgtcacagtagctcttgaggcagcatttgcttgccagtgcagcatctctcatcacttctttacacaatgggcattttaattcaggaggaaattccccgactgatcgtgttgttgatgtcaatccctccatttccttctcaaacgcatccctaaatttgtcaattgacataagtgatcaacattactaataatttatgtgaaggtactaacaaacaactcgccatgttaatttagtgacaacgtactcgtttggttttaaaactgctactgcgccacttggcaaggagtaagagccatttggggttgccatcagcatcgacttggggataccagtaggtggtttaactctcttaacatcaaagttaggattaccgtttgtggagcagtgttgaataaaatgtcctgagacagaaaatgatgttcagaacattcatttctcggtaataaccgtacacactcgagacattacttaaccaaattaaaaatatataaagattctctaagtcagtcataccagaaacattgcaccgatggcaaacatagcctggtggcggtgttgtcctctccattcctactcaaacaaatacaatcagtctctatatcttacatttcaatgaaagagcaaacaaaatatttggacaataataattaacagaacatccgagtctcaaagctaaatacttggggagactgaagcatataagtcaatcatatacaggaatataattaccaaaaccgcggccacccatccttccagccatacccctcccataacctctacccgggccaaaactatctgcaccttgtctgtaacatgaaagaaaaatacgaatgttatgcaaaatgtatgtcaagatctcatttagcatgctaatgtccatcagttcaagaagattacttactgatgccagtctagtgctggagtgtcaattaatgcctttagcttggtttcttcatcatcagctggtgcagaatcatgacataggttattagaatggactgctggggcatcaggaattgaatacaaatcattcccaaactcatcgaattcatcttcaacctataaggtagattaagttgtaaatcaatatttgtgtagaaggattccatgccaataaaaactgagaaagccaactcacgggagatgcatcagcagtaataacattgttcatatcagcttgaacgttttccactttatcctcgactctcggcctgcaaaatgtagtcatttacatcatgacacatgggaatctggtataatttcacacaactaataatgaaatgcgcagcttagagcgaaagaacacaaagattgaacaactcagttgagaaattaggtattaaagttatagagaaattactcttctctggtaataattctgatgcgagggcgtccagggacccggcgaattagcacagaagtattttttggtattaacattgcttcatccagatattctgaaattgcaaaaaaaaaaataagtatgaaggccaccacatattgcaactataccaacagagaatcgtagttaagggtttctttctaatgattcacaaccacaaccaatcaagaacagtagtctcagaagtaatcacatttaacatataagctaatacagtacgcaagaacttcacttttattttttttattcaactaacaaggaagtaccaggtacataacatccattttactgaagcagttagatactgaacaatccatggccagattaacagtgctaaatgtgattacttcggaagaaagccataaaccatggaaattttgacaaagcaagtaataaccatatattttgataagtgaatactgatcacaatcagaccagaatccaacctagataacaacaaaacacattgcacaatatcttctaggtgaataggataagaaggaggaagacaaaccttcattagtttgggcattagagatgacaatgtcaaggtctttaccacttcccaaatgcttagtttcgtaaattttttctttgagtaaaccaactgttataaaaggaccatccatggagatggtatcataatccctcgcactcttaaacttgtaatatattgccattggaattaatctgataatgaataaaaatacaatctgtattactaatttattaaaacacaccagaatctactctctttgaaaaaaaccttaacccaggccaaaaaaatg

SEQ ID NO: 6688 - DNA, 3000 bp, Unknown
  misc_feature (1)..( 3000): cDNA_ID_2123194_gDNA_ID_1621100_Annot_ID_55855 3000 nt of promoter + ATG
gagtcttttggattcggttacgatagttctctattcctcttcaaaccctagagttcgtgtttctgcgatatccatcggtttctccttcatatatccatcaaacgccaaagattctctaattctctctcgagatcgtctgcaatttcaccgtgaatcatcagggataccgcggtggtttcgattctatttcctcgattcgaagcttggagagtttcagcttctgaattgaagccagtgattcaattgtttggagatatctgagcattgtccctgcgatgtattcgattcaatccaacacgggcgttctcgtttcgtttctgagctttgtgggaaattctcgttgatttgatttcgtcttgaagagcgcgtgagaggtttcttctgtcgaattttgttgaagtccaaccagagaagtaaagaatcatattttgtaattactttttgtttttgttttggaaatcaactttctggcctccatttttttggcctgggttaaggtttttttcaaagagagtagattctggtgtgttttaataaattagtaatacagattgtatttttattcattatcagattaattccaatggcaatatattacaagtttaagagtgcgagggattatgataccatctccatggatggtccttttataacagttggtttactcaaagaaaaaatttacgaaactaagcatttgggaagtggtaaagaccttgacattgtcatctctaatgcccaaactaatgaaggtttgtcttcctccttcttatcctattcacctagaagatattgtgcaatgtgttttgttgttatctaggttggattctggtctgattgtgatcagtattcacttatcaaaatatatggttattacttgctttgtcaaaatttccatggtttatggctttcttccgaagtaatcacatttagcactgttaatctggccatggattgttcagtatctaactgcttcagtaaaatggatgttatgtacctggtacttccttgttagttgaataaaaaaaataaaagtgaagttcttgcgtactgtattagcttatatgttaaatgtgattacttctgagactactgttcttgattggttgtggttgtgaatcattagaaagaaacccttaactacgattctctgttggtatagttgcaatatgtggtggccttcatacttatttttttttttgcaatttcagaatatctggatgaagcaatgttaataccaaaaaatacttctgtgctaattcgccgggtccctggacgccctcgcatcagaattattaccagagaagagtaatttctctataactttaatacctaatttctcaactgagttgttcaatctttgtgttctttcgctctaagctgcgcatttcattattagttgtgtgaaattataccagattcccatgtgtcatgatgtaaatgactacattttgcaggccgagagtcgaggataaagtggaaaacgttcaagctgatatgaacaatgttattactgctgatgcatctcccgtgagttggctttctcagtttttattggcatggaatccttctacacaaatattgatttacaacttaatctaccttataggttgaagatgaattcgatgagtttgggaatgatttgtattcaattcctgatgccccagcagtccattctaataacctatgtcatgattctgcaccagctgatgatgaagaaaccaagctaaaggcattaattgacactccagcactagactggcatcagtaagtaatcttcttgaactgatggacattagcatgctaaatgagatcttgacatacattttgcataacattcgtatttttctttcatgttacagacaaggtgcagatagttttggcccgggtagaggttatgggaggggtatggctggaaggatgggtggccgcggttttggtaattatattcctgtatatgattgacttatatgcttcagtctccccaagtatttagctttgagactcggatgttctgttaattattattgtccaaatattttgtttgctctttcattgaaatgtaagatatagagactgattgtatttgtttgagtaggaatggagaggacaacaccgccaccaggctatgtttgccatcggtgcaatgtttctggtatgactgacttagagaatctttatatatttttaatttggttaagtaatgtctcgagtgtgtacggttattaccgagaaatgaatgttctgaacatcattttctgtctcaggacattttattcaacactgctccacaaacggtaatcctaactttgatgttaagagagttaaaccacctactggtatccccaagtcgatgctgatggcaaccccaaatggctcttactccttgccaagtggcgcagtagcagttttaaaaccaaacgagtacgttgtcactaaattaacatggcgagttgtttgttagtaccttcacataaattattagtaatgttgatcacttatgtcaattgacaaatttagggatgcgtttgagaaggaaatggagggattgacatcaacaacacgatcagtcggggaatttcctcctgaattaaaatgcccattgtgtaaagaagtgatgagagatgctgcactggcaagcaaatgctgcctcaagagctactgtgacaagtgttagttctcttgtcaaattgccaatacttctgattccttttgctgttccacaaacgcctttttatgtaatcattatctacaattcaggtattagagatcacatcattgcaaagtcaatgtgtgtttgtggagcaactcatgtcctagctgatgatcttctacctaacaaaaccctaagggatactataaaccggatattggagtctggtaacagtagtgctgagaacgctggcagcatgtgtcaagtccaaggtatttcatactctcattcgcagtcttttatatttgtgtgtaccatcattggtaaactaatgagtattaaatctagat

SEQ ID NO: 6689 - DNA, 3000 bp, Unknown
  misc_feature (1)..( 3000): cDNA_ID_1815197_gDNA_ID_1621100_Annot_ID_55856 3000 nt of promoter + ATG
aaaaaaagaacccgtaaaaagcttaaaagactacaactgcttaagtctatcaatgatgatcaatatattcatgtaagtgctaaataggttaatttctctagtgaattcgattttggactaaaaatcaacaaatattagatcatctagtgaattcgatttctctaggccatcaaagaatattattagttaggtccaaagacctaaatttatttttgtgtataaatttaataaaatagaaatttacattttgatatttttaatattattttggtgacaaaatatttagaaattttttatatttttaaatattcttttattttcatatattttttattttattttacaaaaatttaaaaagaataaaaataaaaataagttcataaatattaattagcaagatatctaatctccattgcttgtttaaaatgttatgtggacgcgcaaatagcttcgtatagattatgttacaaaaagatttctaaaattaactatgtttaagttcgtattattttagttaaggcccatcagagaatattagttaggcccaaaacagtgacactcaccgttttggcatcttctacacatgagcaaaactagacgcaacgcaatgatggcgactaaaacctcagagcaaaaaacatgaacaacttcttcaatcccagtagaccaagcccacgtccatggccaaacaggaagaagcaaaccgacaaatctgcgatatttctttgctccgtttctatacttgttgtgttcttcatcgtcgtcttcttcatcacttactccgagatgcccaagtccttgttctcaatctctgcattttctggatccgttcaattccctcagtgcagatccgagatactaacccgaactcttctaggtcagaagtttctctggtacgctcctcacagtggattcagtaatcagctatcggaatttaagaatgcgcttcttatggcgggaattcttaatcggaccctaattattcctccgattctggatcatcacgccgttgctctcggtagttgtcctaaatttagggttttgagtcccagcgagatacgaatctcagtttggaatcattcaattgagcttcttaagactgacaggtacaaaatctcttttttttttcgtaatgagttttagtaatttgatcaatgtgggtgacaaatgttggtgtttataggtacgtttcgatggctgatattgtagacatttcgtcgctggtatcttcttcggctgttcgagtcattgattttaggtactttgcatcactacagtgtggtgttgacttggagactctatgcactgatgatttagctgaacagtctcaggcttatgagtcactgaaacagtgtggctatttgttatctggagttcgtggtaatgtagataaatgtttgtatgctgtggatgaagattgtagaaccactgtttggacttataaaaatggagaagctgatgggagattagattcgttccagcctgatgagaagctcaagaagaaaaagaaattgtccaacgtgagaaggcgaagagatgtgtataagactcttggacatggtacagaagctgagtctgcagctattctagcatttgggagcctcttcacagctccatacaaaggctcagagctgtatatcgatatccataaatctccaaagataaaatctttggttgagaaggtcgatttccttccttttgttcgagagataatgatcgcgggaaagaaatttgcttcagaaaccataaaggcgccgtttctttgtgcacaacttagattactagatggccagttcaagaatcatcgggagagcacttttacgggtttatatcagaagttggaagctttgagcgttaagaatcctggtctaattaatgtgtttgtaatgacagaccttcctgaatttaactggaccggaacttacttgggtgatttgtctaagaactctacaaatttcaagctccactttataggggaacaagatgaattcttagcgcgaacagagcatgaacttgattcagcgagtcacggccagaaatttgggtctattccgatgagtcttgatagtataaaaaagatgcagacccattgttaccctcatggaggatccaatgtgcagctttacatagaggaagctgtttgtagctgtgcttcactgggttttgttggtactccagggtctacaatagctgatagtgtagagatgatgaggaaatacaatgcgtgtagtagtagttgaactcagactgcatttctattggattcatctggtggatgagccaatgtgtagtgattttattaagttttgccggtctttgtatagagatggatagagatagatgatagatctgtcatctgtctccacttgaagttattggtgatgaaaacaggctcttaaattgttttgtgttgttaagttatttgggaaactatctaagtttcttattaatagatgaagctacttggttcctttctgattattcacacacaacaatggaagagtaaaggttgcgtgggatggttgcttagtaaaggttttgtgagttctgtagatgtctctagtggtcgacaagatttgtaattgttgtaccaatgtctttaaaccggctattgaataagaaattttgtaccaaataaatctagtgaaagagggttggttgagaagaaatgtaattatattaaaccggaaatgaaattttacgtcgatgtgtattttgtgaccaatgagatctctccacgtaaacagattccacgtgcagcttcaggccgatttaagcgaatttaatctgtcgttttgttgggttcccgtcggtgacatccaccgcgaacatttcgaccggagttttgagagagctcagagtgtttcgagtgtgttatttggatctgcgatctgatcgtctcgcatcgacgtgaaaggttttctaatccaattggttctgtggaaatttggattcggaggtttttgtttggaagatctttctgcggttttcaccgccatg

SEQ ID NO: 6690 - DNA, 3000 bp, Unknown
  misc_feature (1)..( 3000): cDNA_ID_1815193_gDNA_ID_1621100_Annot_ID_55857 3000 nt of promoter + ATG
aaaagaaagagaagtcgtaactggtggtattctagggccttttggatttgaaatcatgaatattagcccatttagcttattgtggtttaggtactccattctcacattaggacttcaagccttaagatgcaatcacatgaatatgaactgtgagccattttctttatgcaggttgttgttaagtgggtatgcagattttttaaaaaatacagtcatacagaggaaacaactgtgtgattaataaaccagcgtaaaagcaaaaactacactcttagtttcacatttttggaataattagaaacattaatgcagaactgtaactatttttagccgtcttctcaaagttatctgcaggtttttaatttgcttttattctcttagaaaccttattgtacttaaaaaaacttatatggatcttaatacactttctaactatgtgtgttaataagagttatatatggtttaataaatcattgtctgtgctaataagagttataaatggtttcaaaaaaccctttttaaacatagattatgttgttttcctctgccattaaacttagacgcatcttaattactaactcaaaaacaaacccctctcgctctctctctttatatatatctataattatatgaccttaccgatatttacttatagtttagttactactaagtttgatatgagacaagaacatgtctcttgagatatcttcttcctagcttctactgtgatgtatctggattctcgatcaccagcatacctatctaccctgcaacaaagcagaaacaaaatccaactacttaagcacaaacctcaacaagatcaagcaatgtaatatcataacaacgttaccatatatccatgaaaatgataagtttcaattagggagatgacttcacctttttccttcaccaaaagactcctttgcatcgatcatcactgcaaatggaatacaatcgctgttacgggttttgtatcattaaagcagcagtaccattaggttacgtaaagctaacatagaatgaaacttcataaaatctgtaatagcacctaaaggtctagactttcatccatttcatactatctacagatcaatgtagctaaagggcaggttgatccaagctttcatcgagcaagtaagtggactgatcaaagctaaccttagccggagaagtggctactctgaagcaatcagcattcatcccaacgagacccaatccagggaaaatgacctacaatggcagacattgaattgcctaagaaaatggagacactaaaaaaacgtagtcattgttttgaattctctgtgaggcaattcgtcgaacacctggtgacttacatcgagatgtttctgcatagcttttgccctcttccttggccggcgagatgacctgttcccactcatgctgaacaaatcttcttcgatctcgtctcgagctagagcaacccaaagcctatgattctcgtttgcaacctcaccaccgcctaatccgggtgattccgccgggattcctctctgcctgttcgatttcggctcaattcctgcgcctgatttctgattcttcacctccgaacctcctcctccgccgccaccgcaaacctccgccgtgaacacgccgtttcctttcttcgaaccaccataagccttcctcggacgaagattccacgtcctcttcgcttcctcctcctccgtttcttctctctccttcaccgacaccggcacttcctctctcgcgggagaaatctcatcggatttcagcttcttcaggttatcgtgctctgatgagggagcaaaggaggagaaagagagacgcggctgacgacttgaccgtgacgccacgacacggttagaaacagccaccgtctccgccgattgagaagcagacctctccgacttggaattcgcagacattggtatgagattataccaaaacgtattcacctgagagatgatcaaaaaccctagaaggtaaaaagcagagaggagagagagagatgtaggagatttacggaagctgatgcatgcgtaagtttctaattatgtttttattcatggggtgttattggtttatgatttcaaaagacttttagtgttttaaagtgttatttagaatttattgttattcgatcacgatttgttaaaagtatgttatattttgttggctaaaataaatcattagttaattattttatatcctgatatatcaacatcaattatcatccttctgatatggggattaatatatgttaacaataaatccagaaaattacgtttagatttagacatataaataaagagatcttaaagaaaagaagagaaaaaaaagaacccgtaaaaagcttaaaagactacaactgcttaagtctatcaatgatgatcaatatattcatgtaagtgctaaataggttaatttctctagtgaattcgattttggactaaaaatcaacaaatattagatcatctagtgaattcgatttctctaggccatcaaagaatattattagttaggtccaaagacctaaatttatttttgtgtataaatttaataaaatagaaatttacattttgatatttttaatattattttggtgacaaaatatttagaaattttttatatttttaaatattcttttattttcatatattttttattttattttacaaaaatttaaaaagaataaaaataaaaataagttcataaatattaattagcaagatatctaatctccattgcttgtttaaaatgttatgtggacgcgcaaatagcttcgtatagattatgttacaaaaagatttctaaaattaactatgtttaagttcgtattattttagttaaggcccatcagagaatattagttaggcccaaaacagtgacactcaccgttttggcatcttctacacatgagcaaaactagacgcaacgcaatgatggcgactaaaacctcagagcaaaaaacatgaacaacttcttcaatcccagtagaccaagcccacgtccatg

SEQ ID NO: 6691 - DNA, 3000 bp, Unknown
  misc_feature (1)..( 3000): cDNA_ID_1815189_gDNA_ID_1621100_Annot_ID_55859 3000 nt of promoter + ATG
gaggttccacgtgaggaagatctatctagagtgatgtcaaggtcatctccgcaaccaccaccggaggtaccttctctttcagtactcctcctctttccactcactgtgctcgagatcgtactgtttggagacgaaactcctgtctcctcttccaaatccaccgttgttggcaagctgttcacgtcgattttcctaagaaactgttgcttttgttgatctgaaaaatgaaaaagggttatttcaggatctgtgttgtttccttgtggaaaaaggttatcaagactttgttgaagaagaagcttacctgaggaagaaacaagggtttggttccatggaaacatctggagattggacattggtgaagaagtgggtttaagatttagctggagaggatggttttgtgcaaatcccaagctaagacttaaacccaaatcctctttacccatcatcatgatattgtctcttggtagaaaatgagaatagcaaaagctttgatctttatgagtagagatgactagaaaaaccttgatctaaagctgattttacctcaaaagatttatcagttgtgctaagtgtatggaggacaagagaaaccttcttctagggttcttatagagagagagagatgtgaaatgggaaatgaaaagagaaagagaggattaatataggaagtgaatgatatgagatgttgtcaggttggccaattataatctattaatgcccttttgaaactcaattattatatccccaacttgttccctctttgtcttctcctttctcttttttttttttctttatcttttccttcttcttcttttactattttagtaaattgtatagtaagtcctatcttttgctatctttttccataacctcaaagtacttctatatatgtatggaatccaaagtaaatttaaaatgcaaattcatattttccatctctactttatttcttgcaaatttggactaggaaaagagaaactctataatatgcggtgcaaatccattatgacatttatttagcgacaataagtacatcaaattatatgcctaatcaactaaataatgattctaagttttaattatataccttcacatatatatgaagtgactcatgttatgtcttgcatatattagatataagcagccttagcttctgatttaatagtatccgaggaattttattattgcgccaatttgatatcatttcgagatatatagacattagttctttattaaaaaaaaaattaatagaattattattaagagttgtaacttgctaatctttttgaccatgtcaaaaaaaaaaaataaagatgttattggatgagcttactagagtgaattttatttagtatttacggtaagttgaataattgccaatctaatagttatgctacaaaatatttactctactgtaaagaaataaacgtgaacatctttagttttttactccacctaaaagtggtagtaaatatttcagttcattttctcttttcatttttatttaaccctcaaatttttccaatcattggtgcaagaacttgtgacctttgtaaagaaaaaaaaaacaactcaatcagtcaagatcacacacggatgagaacagatatcgaagaaatagttggcaattaattgttgaaataatgaagaaaaaaaaaggactaaatcaagtggttggtacaaaacacaatccacatgaatctgagctcattcaaagttgtgggccagtcacctgttgtgatccaatcatatccatgtgggatgtgggatctatcattacactaacacccatatgtattacatatgaatccaatattcactgactgtttctctattttcatttcatgttcttaaactttcaactattatagatcatcatacttcccttatcatcaattttgtagaatttttaagtattcagatcgtgttctataatcagatatattctgagtgctgctaatcagaatcattttgctttattgttgacaaaaaaaaaaaagaagaagtaaattaaaactgccgaaagatgattaaaaaatgtctcaaatagttttgggctcaagagagaacatgggcaggtgggtcatgtcacgtgacaacaagggacccgaaaacactcgacccggccgtgcgttttattttgtttcctcacgcgccgacatcttatcattgcctaccacgcgccttcatcattttcgcttcgttgtaatcattatacgcatgatttcaaatgaaataactccttctcattaatgatctaactgtactcgaaattaaaaatagttaaacatagtacattcgaattatatgccgtatataatgaactaataattcatctttctagtaagtattttttttttcaaactagtagtgtattatgcgttctaaacgaaaacatgaaatatctatttagaagctctatttgaaaatgttaatggatttgaatactcacgacaaaacgaaccaaaaaattgttattgaatatatatatttctacttcgttttttgattagaagaaattcgagacccaaaagctcgtagatcccccttaggttgagacgagaaattcaagacccctattagcttatatatatttagtctatacttgtatataatagcagtgattaagggttcggtatagtcccggtttattcatctaattaaggtgaatctctggtttattattggtttagttggtttgttgtctatacaacattgtaacaaactttcaagattattaatgagaaattgagctttcaccatgttttctctctcgagcatggttcctattatggtatcagagcaatttctgctcttacttctctgatttctcatcgatttctcattgctttcttcgtttttcttcgttttccaccgttaaagtgttgaatcgatcccggatttgtgttgttttgagctcaagctgaccagaatcaccttctgaagcttcgattcaagttccgataacacatttgagcttcgatctctctatccatg

SEQ ID NO: 6692 - DNA, 3000 bp, Unknown
  misc_feature (1)..( 3000): cDNA_ID_1815182_gDNA_ID_1621100_Annot_ID_55862 3000 nt of promoter + ATG
tcatttctcatttgtgacttcatttttgaaatatctataaatttgtaatcaataattacaattaataaattagtttggcggaaaaagctctaatcttataatatgggaatcacgtatatatattacaatttccatatttttgcatggtaatatctatgactcttttccttcttttttttttctttctttaaaacaaaaatgctatggttctttttgcatggtaaaagctttccattttgatttttataccatcgcctatacgtcgatccttaagagtttctctcatccaatcttagacttttataccacaaatcaacttttccctatataccactgcttacgttaagtcattaatacagctaatagattatttagataactttaataatctcttgtgtgtaaaactgaattttggttctttgtttatctttttagaaatccgaatcatatctatatttacggatgtgaacaccataattctcaaatggtatcgcttctttcagtgaaaccaaatacgaggcttcaaataaattttattattcagtatatataaaaaaattaaaatgaacaaatcaactaacaaaaaatttgagagaaagtatattgaatatatttttttaaagtaaaggggggtaaattgaatattgaagtgtaataatcaatgaaaattatattagtacatacgtgttaaatatgtaaatacatatatgattttttttttgccaactaatatttagctttgacttttatttgttttgttcattacttatatgcttaagttttaaccaaaaaaaaaaagcaaatcttcaaagaaaaaaactccgtgtataaacttttctcgatcatttttgcagtctctctcccaaccaatcccattctgctcgactctcatgtaagctccgtttccttcgtcttcctcgtctctctcgatctctcttgctcgattgttgtacatgaaaacgcacgcgcccaatttcaattatgtttcgtggctttcctgatttgaaattcgagcgattggatagatttttcttttagaggattagatttttgattgtatgtgtaattgctactgtgtgaatcgaatccttggatctgttctcgttagtcgccaaagaagaagttgtatacatgtttgattgtttatgttcgaattgcttgaattccaattattttgatctaagttatggaacatttgattgttacttttggtgtttatatgatgaatatgaccatcagttttttttttttttagtgttgcagaggtttaggaagaaaggaatggttcgatcgtgactttgaattgggatattgtgtgtaaaatgtgggtgcctacattgagctcaagctcatgttcaagtgatgagagggatgagagcagtggagaagccgcgcttacgccggtttatctcaatgtctatgatctaacgcctgtcaacaattacctttattggtttgggattggcattttccattctggtattgagggtatgtttcttctctttctctttaagattcttgattgagatcacgaaaggagaaacctttctatgagtctgtatatctgtaaactcaagagaacattgtctacttagtatgcttttgagaaggggattgtttctggatatagaaaaatagctgtcttaatgatttggtggcaatactaggctcttttgagaaggggattgtttgtggatatagatgtaggaccaagaaaagtgttaaacgctgaggattatttagtggaaactttctatgatcctttaataacttagattttacctgttattttagttattattcattgctctctttgacacagttgttcaacttcaatgtagctcataatttggaatattgctatggagctcacgagtatccaacaagtggggtatatgaggtggaacctaggaactgtccagggttcatctttagacggtcggttttactgggaactaccagcatgtcccgttcagatttccgctcatacatggagaagctttcaagaaagtaccatggtgacacttaccatttgattgccaagaactgtaaccatttcactgaagaagtatgcttgcagctaacaggaaagcctattccaggatggattaatcggctggcccgagtaggtaaaagatataataaacctttctctgtgttaagttacaaacaaattgtgtcctaaatatttactcatggtctgtttgagtttcaggttccttctgtaattgtcttctgccagaaagcattcagcttacagctgttagtgctcttcccgaacgccttgaattctccggtaagctcctaactaagagaatgttataaccaaaaaaaccccaactcctttgtgatcaaaacaaatcatgaatggcttcgtattttccttatgtagatgaggatgaatcaaactcagaggcatcttctgtgtcagatgaagaaggatcagagcagcatctcataaatgtagcagacagagagattgtgtatctacaaaacaaaccagtgcgacttaccagagaggagatcccctgagaaaccaaccagcgacgacaatgtacttcctcctgaatcaacccaaccaatcatcaaaacttgcagagtgtggtgtgcccatggaagctgaaagggagtaagttatatatctcgttttgtcaccttagtgctgcgttggttctgtcggaaattcgatttggtattcttctcatcattttaggaatgtaaaaacggattcccggattcattttaatcagacaaccctttggcagtaaaaatctaaagatttctccatattttccatatctagttaccccggttctacccataaggccataaccatatcgaaagagctatcaagctgtttatcgtttgtaataaattttaaaaacaaatcgtaattaaagttattaaaagaaagaaaccacaaatcagttactagggcaaaaaaaccccaatttgtttctcaaattttccccaaaccatatagggtttgcactgagaatg

SEQ ID NO: 6693 - DNA, 3000 bp, Unknown; identical to SEQ ID NO: 6680
  misc_feature (1)..( 3000): cDNA_ID_1808465_gDNA_ID_1621100_Annot_ID_55863 3000 nt of promoter + ATG

SEQ ID NO: 6694 - DNA, 3000 bp, Unknown
  misc_feature (1)..( 3000): cDNA_ID_1976982_gDNA_ID_1621100_Annot_ID_55865 3000 nt of promoter + ATG
agcttgagaaggaggaggcggcttagtcggcatcttaccagacttagcagtctgaaccggagccacaaccttcaatggcttagacgcaacaatctggctgggatcctctgcgtcatcgtccaagagatcgaaagggttcacagacgccattgtttttccggtccgactgaatcgaaagagaaactggtccggagattattttgatggggtttttgttttgaatattgaaaaaacttattggctatacgaatccatgaagaaaaatcagaatcgaaatatgattcagacagcgtttgttagaagccaagtacttaacagaactgagggttagagagagaagaagataatatactaaaaagtaaaaaccctagaaatccttaaaaaaaactaatcttgaattattgggccgggcccgttagtcatatttactctgatgtcgtttgtgatggcaaaatcataaaatgaattgtaaattggtgaattattccaaaaggttttccattctaaatcctacgaaaaaagatatacagtatagtattatggggatcaattgatctctataaaattaaaaaaatcaactatattttcttaagaataatcatgatgactaagtattttatattgttttgactccatacatagttaatttaaactacataggataaaaattatccacatacattgaaacaaaaatattaatcttatataatgtataaaaattatttcattttggttgactttcatgtaaatatttcatttttttatgggaagattatttctaagcaaaattaagaatatttttaatatctataatgtatattattttatatattaaagaaaacttttgacccctacaacaacaatttctagatatgctactggatacgtctcttcattttaaatattgtataataattaacctcatttatttttaagattttttgtgtaaacaagacccgatatatatttcagtctctatgatacggaggtaaaacaaaattcggaatgcaaaaacatatatacgcagtgcagtattatgggggtcaattgacctctataaaataaaataaaaacaactatatttttttcttaggaataattataatgacctagtattttatagttttgacccccatacacagttaatttaaactacataggataaaagttgtccacctacattgaaacaaaaatattattttttatataatgtataaaaattctttcattttggttgattttcatgtaaatatttcattttttcttaaaggaagattatttctaagcaaaattaatcatattttttatatatataatgtatataaccaagaaatcaaggaaaggatgagcttctctctgataaacatctgggttgttctatgaaaaaagaacccttgtctttgtagttaagtatcgttcatactctgtgttgatgaatttggtaggtgcatagtgataaagtttacttcatgaaacaaaatgtggataatgcttgtggaaccattggccttcttcatgctattgagaatataacctttgagatcaaactctgtgagttatattcaggctttctatttgttcctttcattaatctaaagatattaatccttatcgattatcacttttgatttcttatttcagctgaggggtcgttcctgaatagattcttcaaatccactgccaatatgactcctatagaggtgtttctctatcttttgtttctcctatatatttgatctttcttagagtgtttgcttcgtgtctaatgtgtgtgtctatggaaattttgatagcgagcaaggtttcttgagagcgacagtcaaatagaagatatatgctcattctttagctattatagctggtgatacaacggtaacttctcacctcccgttgatgctaatgtatttgtgacttgttcacttagatgttacattggtttttttatgtttacccatcttcaggcttcagactaggtggacacgcatttcatttgtttagcttgtgtagatggtaaaaaaaattcatatcaacaccaaaatgaaactcacttccaagttggcactaaactgtgacactctattaccatataatgcaagtgagctctatgaacttgatggagatagggcaggaccagtttcacatggtacttcctctccagctaccttattgcatgtactataaacacttcactctataagcttaagaattatcaaagtagtataaacccttcactctttaagcttaaagttatcaaaacggtgaaagaatccaggaaatgcaaaccggtatatacttgaatagctttgatattatcctcgtaggacgcagcgaaagtgataaagaagataatcgagaagaatccgagttctctcaacttcaatgtgacagccatctctaagagtgcctgaggctgttattaagagaagcaatgctcctaagtcttgtttctgagtcaatgacttactcggattctctttttgtacattctgaatcttcttttcttgtttccgaattataatatgcggttggtaatcatggtttagagaatccacatttatagatcaatggaccatacaatcgaatcatattgtcgatagtgataatcatggataacacgcaataaggcataatttcaccacctgactattgtacaagtgctaaccaattgagatcaaatgagtttaaaatgcttgactagttgacttactttctaccaaaatcggacaacttggattcgttggcaactgaaaataacaattgcatacgaaggggatagacagattaaagtgggtcaggcccgttaatagaaggattaaagagggtcaggcccgttaatagaaggattaaagtgagccaggcccgttaatagataggaaccattgcataattatcggatgttgagggattcgtatcttggagccgaagtgttgttttcttatagaaggattttgatttcttctgcaaaattcgatcgatagtgacgagaaagatcctaagatg

SEQ ID NO: 6695 - DNA, 3000 bp, Unknown; identical to SEQ ID NO: 6679
  misc_feature (1)..( 3000): cDNA_ID_2999833_gDNA_ID_1621100_Annot_ID_55866 3000 nt of promoter + ATG

SEQ ID NO: 6696 - DNA, 3000 bp, Unknown; identical to SEQ ID NO: 6678
  misc_feature (1)..( 3000): cDNA_ID_1815179_gDNA_ID_1621100_Annot_ID_55867 3000 nt of promoter + ATG

SEQ ID NO: 6697 - DNA, 3000 bp, Unknown; identical to SEQ ID NO: 6677
  misc_feature (1)..( 3000): cDNA_ID_1815176_gDNA_ID_1621100_Annot_ID_55868 3000 nt of promoter + ATG

SEQ ID NO: 6698 - DNA, 3000 bp, Unknown
  misc_feature (1)..( 3000): cDNA_ID_1815172_gDNA_ID_1621100_Annot_ID_55869 3000 nt of promoter + ATG
gatgcggctataatcttggacatgggtatcactgttgtcgctaaagatattccagggatcaagaaaaactccatttatttcagtggcctcaaccaccccttaacggatcccgaatgtagatttgtctatgatctcacaaccggcaccatggaacctttgccacaatgcgttctctcctccatgctcttctctgattctcgatggttcttacctggtttcaccagttaattggacatgtttctgcttcttgttccatttttttttgtttttaaattattaatacctttgcttttacttagtcttttgatggttagtttctttgtattatgcatatgttttagacttcatgacttcaaggtgttacgtgtttcaattatcttatttgttaccagtagtaatagtttggttagaacttcgatgatagaggttttggcacactatgattcgaatctcattatgtgacccaaaaaaagaaaaagaaaaacaaatcataagggaattcatcgaccacatcctaatacagtaatatctatgctgaatgattcatagagattagggtaatttaataataaaaagttgggttccaccttcacaagatcaaaattcaagattcgaatagttgagacgaagtcccaaaagaaataagacgagaacatgtcttctgtttttgttcctgaagaccctcaagagtcaagacacaccaaacaacatatgcacagaacacagactcattcatacatagtttctattaaagtatggactttaggtcatcctaagccatatatcattcattatcaaacaaggaacaggtctacatccatcaaccggaagttcaactaatcttaatttactttctcagaaaatgtgcagggaatgacttacaggcttaaaaaaaagaaagaaagaaacaattcttacaaaaaaagagcacaatgcggaagattactacctctggaggtcaaacacagcacggtggatggtgttcacttgaaagtggacagacgaggaagcttgtccctcagatagtaaagccttgctcttcttactttcctgtgactcaccacttttatctctttgatgttgggagagtatctgtcaaatcaaacgattaggagaatcaacacataccaaacacttttcttaattcccacatggtaagaaaataaccgatatatcacaggaagtttctcgagactcgtatgttatacagcagaatgaaagatagtaaacatgagcagacatgatagttgccatagtgattcaggctgccataactgggaaggtataacagcaactaaagacttattacagtaaaacctctgcacagagtctaactattatacagggactttatgtaaggtaacacaaagtataactcagtatctatgtataaacttggttttattgaaaagctcagaacatgtgaaaagactcataatcaaagtaggtcataccaaatggtcactggagaggggaaaaaactcacatgggaaacacaatttcaacaccgatacccgcaataattctccgaatacgaatggtagtgtgtatgcctgcattttgtctcgacatcactatgcctttgtagatagatagcctacgtttgttctcaggaacttcctgccaagccaaacaccatatcccaccaataatcaaaaacatcgattcaatccataacttaagaggcttcaaaaatatcaacaacttaccaatttgatttctacaatatctcctgtcctgatttctggaacaggtctcactttctctgctacctcaattgctttctggttcagtatctacaacaatcaacagataataacattcaatctccctcaacattgcctataagataactatagaaaaagcaagtccctcaacacaaatgtgtacacagagacttactgattcctaattgctaaacactcataatttggattactgataaacaaagaagttcactaacccccatgacatctccgagcttgatcctaggttttcttgtaggtttagcttcgaccacttcctctacatttccttccgtatcagcgatttcagcaacaaattcttcagattcagcttctgtgttaccttcttctgctctaacgataaactcatttctcaccctagtatcgagtgagaacccaaatttcgagccgggatgattcagagaaagcctagaaactgatatacgagaatccatcgatggtgcacacgatagaaacgaagaaaaccctaaattcttcgatgattgcgtagggtttctgggtatcatatgcaatgcctaaaaatcccatagaaacaaataatcaacaataatgaattaagtgaaaatagagatttcataagctttcgtatatttaaacctgaggaagacgatgaaagctcatcgccatagctgcagcaaactctcagttactcggagaaaatggagggaagacagtggaaaagagccttatctgcttttcgcttcctattttggcacacgtatgccatcgcacgtgtgaattttctttatgggccgtttgttattgtgggcctttagtatatcaatattaatataaatagatagtactatgatttataaaaatatcaataaaagagtcggctaatgacacagtcttattatgattacataaacctataatttgggcccaccaccacgtcggtcgtgtgggccgtcgcttcatgcgtaccaaagtggtcaccgtggcatgacaactgttgttctgccttttggctctaccgtaacaaataggacacgtgtcgcgtcttcacagtttatgtcgtgttctatctctctctgtctctctctctctcccgccaatatctctctccctttggtctcttctctctaatcgctctctctcaatcaaattaattcgtgattctgatttatcaaacactaaaacaaatggatttgggtatttcattttgatccgtaaaggttgattcttttttttttttgttatcattgaaaattttgttttgttgtgagagatg

SEQ ID NO: 6699 - DNA, 3000 bp, Unknown
  misc_feature (1)..( 3000): cDNA_ID_1815161_gDNA_ID_1621100_Annot_ID_55872 3000 nt of promoter + ATG
cattcagtattggaggtcgggttttaaaccctttcagaaaccgccttcttccgagaaatgttcaagccttgttatgtactaggaactcgttgcgtggttttgcagagttggaagataaaaaaagaatagtctaattttttggacttaattttttttcatttgttgatttatatcttctaattgtaggtgacattgaagaatactttgatgatggaattgaaggtactacatcggtagcaagtagctctggagtatgagaagatgttgtatttttgttttaaattgattttcagatatttgattactttttaagtttttcttgtttaatttgacatacaaattattattattttgctatgaaaaaaatttacatgatatatttacataccagtttagtttataagcaaaatatagatataaaatatatataatagtatattagtaattaaacataaacactagaaaaaaagacaaaaatcaagttgggtacccacgggtagtatcagaacaatcaggtttttttcgggctttacccactaatcaaaaacccatttgggttttctaaagttgagtttttggtgggcgggtttattttgggttcaggtcgggctgggcttttttacccaccacaacatctctatttctctttaatgttttgcttcactcactcattttaacacaagcacaaaaagaaccttcactctcattctctctagtctttggttagtttcttgttttgacacgaagacataaaacgattagtaagagagagaaaagagaaaatattagttgtcaacattttgtattgaatccaaagatagattcttataacaagacatacacacatttgtggatggttataattgttaaatccaacttttaattttactgaaattaatgaagatctctacaaggtctcaaaggctcacgttgtatccatgaagctaaaattcatgaaccaaaattagcaaaggatgtccacaacactgactgtcattatatgatgtgtgtccacatatccaacgttttatggtagagtttatatagtatagcatgtgaatgtattaaccttatggatgtaattgtatggttaattttgttcatttaataagattaaccagattaattggtcatggtttccaaaatcatctcaaatcctttgtaaaaaaaaaactaatctgcgaaatataagtgaagagaatcagagctagatccacgtttgagaggataacgtcctcttgacggagatatgattgttggagcggcgaagaaatagggtttagaacttcgagagaaagagagaaacgtatcttgcccaagtggttacatttttgatgcggttgttgaaatttgggagaggcttcacgatcatggaatcaaaatcgaaagagagaatgtcgatagcgttgttgtaattttcgagaaaacttctgacggaaattctgtgaccagagactttcacatgttttggaatcagatccaacggagaaaggtggatttgagaatatatttgaaaaagatctcgagagaggaagaagaagagaatcaatagattgttgagagatagggaagatgatgataaaccttaagagattcaattttgattttgaatattcagaatgtcctaaaagattgaatttttattctggaaagagagatgaagaagaagataggccaaaaatgtttttgtattgtgaaagaagagagataacgaagagatattactaaggaaaagaagagatagttagagagtagtgatgttaattcacatcaaaaaagtgtctaatgattgtaaagtgcttaattacggctaaattttcagaaaagtgcctcaacacgtaatattctctagaaaagatccattacatctacacacaacagtatagtttaatttcttggattttttttctgacaattttattaaaatttgaataccaatgtcgatgtagaactacagttgtccacatatgaagttgaatccataatctaaaatctaaatttatataattaaaaaaaaaaggttaactaacaagccacagaagaaaaacacgatcttttgatgaaggtaaatttagaaactaatctccaacaaaatccatttcaatgagctatatatcaactcacaagtcgtaacccgtgccatcattaatattgttcacgtacattttcgttttggcataagagtatggtttgagttatatttcgtgaaagtacatattttaaaaaaactacttctttgtttgtgtaagtgattggaaacgacatgtttgatctctttttgttgttattgaaaatgattttaattgaaaatcgaaattcgtgttaggactttacatattttgttccctttttagcctaacacaataacctattcttggtccgtccataactaaattctcagttctcgatcgcctacatatacttttttttttttttttttgttagattgatgtacgtaacttaaagtatatgtacctactcattccttaatctaggaggacaacatatatgactaagatctagttcttggaactacatgtttaacaacattagtactaattgggtgacacatgcatataaatatacaaatggttatatctaaggataataattggatctctaattttcaaactaatagcattatggaacgtatgttagtgaaaaaagtactctttaatttattattaacatcaatattagtcgccattttgtaaagtcatacgacacataattttttaaattaccatcgaacctaaaagacattctcgtagttcaacgaacgcaaacacacgtattcacttgttttcttctggccagctatatagtctacgcatcgcatacgcaaaccatatatagatccatcactctatatttacatatatcaatgtatacacagagagctatatatagagaatacacaatacattctattcttgtatactcttattacaaaaaaaaaaggagagagagagagataaccaatttctctccctgaaaatg

SEQ ID NO: 6700 - DNA, 3000 bp, Unknown
  misc_feature (1)..( 3000): cDNA_ID_1815157_gDNA_ID_1621100_Annot_ID_55873 3000 nt of promoter + ATG
aaacatcttcaaatctcgttagccttttgtttgaataattacaccaaaaataaaggaagaaactttgttttgaacccaatgatgattagttcacaacttcacataatctttcatcgcaagattgatacatactttgtaatcgacatacatgctaaagttttcaaattataccacaattaataagttgcacatacaatcaaaaacctaaccctggaaagggaaatatatcaaataggagaactataagcagagtaatcaaagcctggtcttgacataaatttccaaatcgcgaaacatcattgtatgttccaaatatgtacatggtgcaaccgatcagctagttcctttgctttcgtaatctctttcttcatcttttctctcctctgtttcctcatctccatgacttgcttaagcagctctctcccttctttagtgtttagtatttgagctctggtgcgtttatatatgttccggataagctcaggtttacctctcacaaagtcaccatcagcaaattccctttgctcagagtcaagtttcctaaacccgtatcggtcaagcaacctggtaaacaatgagaaattgtggccagagccaatatcgtggtagccaaagccaaagattcttggtaaaacatttatctcacttacgagctgttgtcgatgtgggataaatataactaacgaaaataaacttggaaaattgggcttcttattgggccttttttgttttctaattagattaagttaagtagagactagacatgattaacggtaatctgaggaaacattgttcaaatctcttgatattacatttggtaagttcatctcctaattacaacaacaacaaaaaaagaaagcaagaatctttgttatcacttcttcttagaacccaatgactcatcatcatcatttttccaagctgcttgccattgcttatcatacaatgtagtctcatcaaacaagttcttgagtttatccacatcctcattcttacgaataaacaaaactccagccacagccacaaacaatagtgtcttgcagaagaaattccccatttgatcaacaagtcctactccggtaagactatcgacaaagtaagccataaagaatcctatcatcgccgcacgacctacaaagagtaagagtaagtaacattctttgtgtatgtgtttgatcttttgagagaggaaacaaataccatttaagagttcagcttcaggtaagtggtatctcttaatccaagcccaccatggaataatcgatgtatcgaaaagcactggttcgtcgttactcgttgtttctggattctcttctagccattttcttctctttgcctcttcaaatcaaaacacattaaacatcaaattcaaatttcgaattttcaccaaagtaacagagcaaaaaaacttaacgaggatctaattctaatctaaccagcaacgattacagaatcccaatcggtttttccatctttctcgaactgtttcagatcccaagttccattaatccatctcgcatcctggaatttgacaacactctccgttgttttcatctcttcaccttcgacggcgacatttttagcggtggcggtttcttcctttttaaccgccggtgttgattgcggaggctctttaactatcacttccacgggctcaggagcctccacggagacggcggcggtgggagaggttgatccactgtcggaggaagctcgagtgacggagaggagagagaagcggttactggagaggagggagaatgaaaatttgggaatgaaattgggattttgaagagatgaagaagagattggcggggagaacaacgccattgttgtggtttcttctttacttcagagtttcacaaatcacaactagtggttctaaatagacttgttatcgtttaaagatgtaacatgtatgtcgtttctttctcccaaattgagactacgtaacgtgttttttttccctctacacatacagaaacaaaaaagtgactgttatcttcatgggctcgtattaaaagcccatcccagtattttggtgttgttatgagggtatcaaacaaagaaagtcaacacatttacctgattaatcaagcaaagtttttattattattttgtattcaactaagcaatgtaccttacaatattttccattttacaaacaatttaaggtttaactttttaaaaggaaaaattgtactaaactaaattcattaataatatatttaattaaaattttaattaatttttttttctgcaaactgaattatattaaccaattgagattttacaaagtagtttttgtaaccaaggtggttgacgacctgattaagaataaaaatctccatgaatacaattagaggttgagaggtaatgagctatactattatttacacgctttgtgaagccaaagaagattgaagaaatttttaattaatttaaaattttgaatcccataaagtatggtgaaaagaaagctcaacaaaaataaatttgtaaagaaaacataatatttcttttaaaacataaaaagcctaaaaaatgaattctaaaatatgttttttaccttgatgccctaagccatgacttcacttgattgtgtggaatgtcgggcttgatttattatacataaatgcattgtatttgttataatgcaacacgatgaccaaaggatatatgaagttgattttcaagtatgatttgtatcatgtgttatgatgaaaagtgctattatatattagactctaaacttagtacttgttaagacaatcttagtgaattccggattataaatgtagatttgtcacaaccggttgttacaatagcatcttatacaacttaattgtacgagataagctcactttcagttctttaccaatcttgaatatgagtgtcggataatcaaggcgtcgcataatcaaggcattttgaatatgactctggagaactctttaaactaatcaaggcgtttgaggagccgatgccgacatatatatg

SEQ ID NO: 6701 - DNA, 3000 bp, Unknown; identical to SEQ ID NO: 6672
  misc_feature (1)..( 3000): cDNA_ID_1027047_gDNA_ID_1621100_Annot_ID_55878 3000 nt of promoter + ATG

SEQ ID NO: 6702 - DNA, 3000 bp, Unknown; identical to SEQ ID NO: 6671
  misc_feature (1)..( 3000): cDNA_ID_1815133_gDNA_ID_1621100_Annot_ID_55881 3000 nt of promoter + ATG

SEQ ID NO: 6703 - DNA, 3000 bp, Unknown
  misc_feature (1)..( 3000): cDNA_ID_1815321_gDNA_ID_1621101_Annot_ID_55882 3000 nt of promoter + ATG
accaaccctgcctagtttctccatggcacgtgcaaaatcctcgaagaaagccgtctgattattcgcatataattctacaaacggtctcgtgctaggatctttaaacaatatatggtcggaagctaacagtccaagacctcgtttcaagttcttgaaatacatattatcgaattttcccggtgtcaccggatcgagaaatgctgccatcgtcttattggtttcgaaattcttgcatagatctttaagaactcctgcgaatttcgcgttgagttctggatcaaccttcgggaatatccggttgctgaattctttgcagtgtgagaatccgattgtgtgcccgccacttaacgcaaccagctcctttagagtgaaaccattcttcttgaatatcgataacatgtcggggacggattggttcgctaaaggtaaatttcctttgactttatgggcttttgactcaaaaccatctttacggcccagtttgacttcatagaaaggcccaccaaccattgtgacaaggtcacgtgtggcctgagccaggatgtctgcgcaggacaccaccccgggacaagacaattcaagagcggttttgatgcgagtcacaatgtcgaatgcatctcccggaagcgactcgttgaggtcatcgtcacgttcggctttgttgaaagaatttgtagcgataaggacggaagcatcacatccttccatgaaacaatcatggaaaaagagacggagtgttccagcagctgtcgttggctgctggccttgctttggtgtaacggtttcacgtacgattttattgaaatcgggacatgttttttggtaataatcttttgttaaatttggtggtggtgccgagtatatagacgggacaaagactaggacgacgaagagaacatttataaccgaagacattgtgtatttcacgagactcgtatcgatttgtgaaagaaatattgtttgtaaaatatggaaacggaattgaaatgtaaagagatgtctatgaggtagacttctttattgaattgttatcggtgaaatatagaagcatgtacgtgtggttggagtttggcttttgttatgttctttttatttcagtgattggtctatatttagtttgtttttactttcatttttcattagaaacgttttctaacactaattcattataaaatcgattggcttctaggttaattaaaccacaaacatggaatgcatgctaattggggaaatgtgaaggtgattaatcactcaattgatttgttttgtattactactcctgtttttgaaagaattttggaatggtgattaatcaactaaagcatctacagaaaacattattgatggttagagatatgaaaatttaaattgataggctaaacatacaagcaaacttttacttaatctaatgttgctcttgatttgaaatataaacaaaaacaaaattaagaaaaatgttgacttctgagttctgaccactaaaatcatgcaactgcttgacaatggacatgccatccatcttatatcaatttgttgcttaccttgccaccacatttctagatttttatgtcatcttgttgacatttattagtatataaattcctaccattctttctgaccaacatatgctagaaccaaattatttgttgttagatatcaattttcgctaacgtgttactgtttataaagtattaaatcatgcctatatatattattatgtttcatactcctccaaacattttgataagcttgattttctttttatatatagttcaatttttgtaatctcatgtatacgctatggcaatgtgtactgatgacgaaacattatgtacctatatgtatcatgtggtaagtagaacattgtttgtttgctagaatatgtatgtcgcttatcgttttgaaaaagactcaccagcatatatataatatgcaactgtgaagcataatatcaatgaggaaacgtgaagtgcaccaagggataatctaatttgataccttttatttgaagaatatatgacgtccgatccattaatgctttatatgcatctagccatcgacatggatctagacctttcaataattgacgactcctccgttttctttttataatatcaaaaattgggacattggttatattggaagagtggtgaaggatttatcctatacatcaaacctagatatgaatcccaaccaactatggaccgctattgttctctctttgttttttttttttgctatgaaactatggaccgctattgttagctttttatttagttattgtaaacatcttaaatgaaaaaaaaaaagaaatactcggttcactatatgcatcatgtaataataatctaggttttggcccaagatctatctaagttataattaaaacgaaaaaaaaaaacaaaaaaaaaaaattgaaaaagaaaattgttaggtagctaaaaccctcaggtactacaagattaacgaatacatctacagattattcatctggaacatgcaaatatgtgatgtatcgactgatctaaaatggattagtttggttgaaagacggtttggtttagttaggttggaagggtctttgggaagagtgttacatcgttcacatcttttaattttgattcagtctctaaattatactatatagtctatattgcaactgaagaatgattgaaagagtactagtactaaggaaaaaaatagaagtagatgcaaaaaaaaaatggtaacattagtgtgaatcatgcatataatgttgaaagctttaaaaagacccacaagtctttgtaccctttcgtccccctcccctctaaaacctcatcttccccatttatttctcccattctttctccttttctttttcagttcttaattcatacttgaaaaaatcaatacattttcatcatcatcagcatcatcatttcccatatacacaaacacacatgcatgcccttattatctgataatgaacgcataggtctcttctctgatagctcaatg

SEQ ID NO: 6704 - DNA, 3000 bp, Unknown
  misc_feature (1)..( 3000): cDNA_ID_1815313_gDNA_ID_1621101_Annot_ID_55884 3000 nt of promoter + ATG
tatataaaaaatacacctgcatgaaatttaagagatgaagatacattaaaaccaaaactgaagtctcgtcgtcacttgttgtttgtcttgtttattggtttaattctttgtcctccttgaaatcggagtttggaattataccgaacattacgaacttggtggctgggtgcctaagaataaattgaatatgatattgcgtctaattaatacctgaaaaagcttttctttttccttctatatattgtttgtggagaaagtgattttgtttacgtgataagataaaatttaaggaaaataagaaatgggaaaagaataatatcacattgacagtgagatatcaccttaaaatatatattgtatatagtttcgattatgtttattagtaattttcaaaacaagttaacattaaaggttttttattccacgaagcattaacttcatttccatcaaaatactatacgacattaatttaattttggccctagtgacaccgatagacagtccaagatttgattcccaaaacgccctttgataattcatgtcccctaagcccatacatcgacagataatgttggggacgatccttagattcatttgtttttttttatatttttcacatatttgattaaactaagaaaatctgaatccaaaaataggtttccgtaaaagtcgaacctttttccagttttagttccggcagcacgaggaacgatataagacaaacggaaaggaatttttatggaaaatcgatagagaaaataagattaaagaatataatttaatttacttgattggaggcactaccaaccgacgatgcataagacaaagttagaagctcaaaaacattactaggttaggagataaaatcttattcttttttaaccgaatcattaaataaatcgtattaatcgaatcttatttgtttttcagcaatccgcgattaactatcatcactagtacttgagttttgtagcaatgaatcttatttgttcttctcgtcgtcacatacaaacaagaaactaatcatgataagttctgaggggtcggacttaagtgacgaataaataggagaaatatcaaaaactattgaaaatttatagtggtcaaatagagaacaaaggttcccatcaatttgagtaagttactccgacacggggacgtaagagtgaaacctagtgaaaagcatgctgtccacttcacttagtgtaaaattgtaagacctttcagggcacacagtttgttgtatattttagatttttatttcgtaaggttatccgtatatacgaatcaatttcctacatatatatatatatatatatatatatttccttcataatgtgatgaaaaagagaagtacaataggaaaaagattgattgaaaaatgaaaaagtagaagcacacttaataaaggagtagaggagaaagatttggagtttatagaataattgcccccacgaatctttttttgggagatattttaagcaaatcttaactttggggaatttgataagaacccacatttctattcggacaaaagagttgcttgcaaactttaagtcgaaaaattatttatctggtattaaaagaaatgaattaaaatctacaagggaaaaaaaagaaaaacctaatcttagctagctggttatacgtgtgtcatgtaataaaatgaaactatttgactaagttcatattgggtgggactggtatcactggactgtaaggaatttgtttttaataataatattgttatggtagaggaattcttatttttttagtagattggtgtgttattggtttgataattttttaagattaggattatacgatgcaagttgaattattgaatttgttttgtcaattgtaagaaatgacaataatttacgcatctaaatgctgtggggaagatataagctttttgtacagtaataatggttacttactattccatcaactattaaaaatcatgtaaagaataaagacctaccactttcattgtttgctagctagtatatatatatttatggttagtaaagtaatagaaaatcagtacaaagacaaaatttaaggaaatgaattaagagttcttggttttggtgcatgtggaaatatttgaggttaagactgtttactgttggaaattttaagcaaacaagacataatcaatcattgttttaatttgggatgtaaaaacaatttttttaatgcctaagaacaaccttttgttagtgtgtgtatgtatatatggatacatattatttaataaatcattttctattgtgtgtgaacgaacatataactcaaaacataaaaatactaagatttactaattcttgtttgattagtataacaaaattcacgaaattatattaatatgcacatatgtgttttttttcacaaaaagtttattgggccacaaaatctagccacaaatgaatcgcattggccaagtttctacttgatcgaacaactaaaaaagcttagggtcactaaacattttattacttttgggaatcagatatctctggaaatctcatagaggtttgtctacttagaagtttttaattgcctaaaattcgttgtcataaagaatggggctgaagaagatgtgtaaataaatatataaaattatgtttcagagaaaaactcccgagtcctcgcatcctcttcatatagtcctatttattcgtttaggaccattgaccttcttcttcaagaatacctctaccatagtcaacacaaacctacaaatgcagaaggagataattaagatggttaataacaatttgtttcttcaaaagcccgatgtttataaaaattcataaatggacaaactcgacaattgtacattgggttgtggaggcccaattaaggcccatatatgaatctgcagtttaatggcatatagcgtggaggaaacgtaatagattattaaacctttataggcatcaggcgtcaaccgattgcttccgccaagcaaagcaaaagttgagaaatttagtg

SEQ ID NO: 6705 - DNA, 3000 bp, Unknown
  misc_feature (1)..( 3000): cDNA_ID_2992663_gDNA_ID_1621101_Annot_ID_55887 3000 nt of promoter + ATG
tacataaaatcacttgacgggctaattgctctaatcaaatttttgattttaaaataaaaatcgatcggtatttggttcagttaaccatgatgattagcccggtttaaataagtttaagaaaaacgaaaagaacaaaattgttttctttttaaggtctaattaccaaatcgaccatgaatccaatgttacaagaacacaagtcttcgtcctaaataacaagttcaatcttcatcttcaacaatctgagagagattagttccaagttttaccgtttacaacaagaatcagaaaggtctttgattgcatatctcaaggttgagccggagcaggagctgaagccataggtggaggagattgttgctgcaatggtttcgattgtggctcaagatgttcagaatctttctttgcttcaggagattcagagagttttgattcacgttcggcttcttgcgttgatgaagctgcctttggtgattcagacaagtgaactctagcaaactcatcaaccactttcctcttatcctcttcctcagccataccaactttctctttagccttttgtccaacttcttctgcagctttagcaactttgttgaatgctccagtaacccacgtggcacctgtgagaacataccggttcttcattatagctgaacctgcattgctcactgtctgctccgctgcagcgattgctgatttggttttctctgagacttggtacttctgatcaacttccctgaccttttctcccactaccaccgtgcctgtgttgatcttatcagtgaaaccaattttcttgtcaaaagatgcgactttggctgatgctgtagatgttagctggtgcttctcgtcaacacttttggctttagctatggcatcttttcccaggataaagccctttgcaagcatgctgctcacaacatcttcggcttttctcaacacggagtcacctgccttgggagatttattgctgtccttgggttcctgtgaaaaagatgaaatggtaagattttaacttgtgaaaaaactcagaagagatgatgaattacgagcttaccaaggaagctaaagcctcaggggacagttggtaatcaggagccatagagacaatgactgaagaatcaacaatcgttgctccctgaaatgaaagaattacattaatactcagtcactcaaaggatacagtcatatagaggaactaatacaggctaagaagtaaaaataccgagagaagaaccgcagtttcagctccttgtagatccttaaaagtgacatatgccagtttagtccgctcagtctcgctgtacaaacatgtcaaaagagttaagaacctgacgaactaaaagctgtaatctaaaactttcaaaaggaacaatagagaggaaaccaaacctctgcgtctcaaggtacagaatatcgccagaaaaggaaaagaactccttgagatctctatcggttgctcctagagaaacattgctcactttaactgttgtcatctgcaagtgaaatataatctcgtgtgacttaaaaactaaaatttcaaaccatttcaccagctaaacaaaatctcagacttattcattagttgttcgattacacatttctcgattccttatcgcctaaaacaatgactaaacacacacacacacactcctaaagcaaccaatattatcaatacaatgatcagaaaacacagaaacattgcatcatcaatacaagaagataaaaagaacctcagaatctaggaaaagcaaatacttgtctcaaaactaatcctatggcacagatcagatattaacagattacaaaacaaaacaaatgctaaagtgaatatcctaatccaaacaaaagcaattttaccctaaaaaaaaatttcttcatatcagaaacagtaattttcacccaaatcaaaaacagagaacagcttcaaatcctctaaaataaaaaaactagcgattcttcactaataatcaacgccatttctcgcaaaacaaattagaaaacaacaatcaaaatcaacagatctgttcacatcttcctcaatcaaatcaacagcaaaaacatcgacctttctcaggataaatccaaaacaaaaaccaaaactaactagtttcaaaaagcgaagagattagataagctcaccgtcatgaagaaaatcgcgttgacgcggattgaaatggaagattgtttttccttcacacaggaggaacaatatttgaaacgaaacgaaacgaaaaatcaaaggaaagaaaaatctctggtcgcggatttgatgtgaagaagagtgaaaaataaaagaaaaaagtgggacctgattttaaacgccttggaaaaacgagtcttattcgggtttggcacgtgatatggtcggaaccttctcacgtgcgatgattaaaaaagagtcctaattttaaacttcttttgcttttgaccctttttagtcacgtaaagttctatctagagattttattcattaaattctggactaatctatcataatccttaatctaattctaattaatccgtaatctgttagtatcttggttaaaataatcaattaacgtcgtgacataatcactttctccaccaatgtctaccatccacgtgtcctgagctcagagcaatgtaatcatcgtagaccatttatcactttataataaaaggaggatataccgttaagattctaaactatagagtcacgtttggaatattatagaaaagttaaggatcaaaaaatgaaaaaagtacaagctttttccgttcatacaggtaatgtgacatttcacgttttgctcaatctctctctccgcggttcacgttttttctcaatctgtccggagagagagaaactcaccggggaatcttgaaatcaccatcacatcctctcttccctcgatctccgttatcgactgtaaatcgaattttgttgttgctttgttttcttgggcgaataaaagaggataatttagtggcggggttttcgagaaagagagagaaaga

SEQ ID NO: 6706 - DNA, 3000 bp, Unknown; identical to SEQ ID NO: 6703
  misc_feature (1)..( 3000): cDNA_ID_1815321_gDNA_ID_1621101_Annot_ID_171415 3000 nt of promoter + ATG

SEQ ID NO: 6707 - DNA, 3000 bp, Unknown
  misc_feature (1)..( 3000): cDNA_ID_1815301_gDNA_ID_1621101_Annot_ID_55888 3000 nt of promoter + ATG
agattacacaagggggttccttttgaagactgatctgtacacttgaaccaggccattcaagatcatctattgcttccttcaacgccgctgactgatagatacattatcaattaccatttgagaaaaagctcagactaacaatgttaaacgaaaaacgatactaaactatgttactacctttactgtaaaagtaagtggcgcgattcccgcctgctcaaagttgtagtcccaagtaacagtttcgggaattctagttcttatctcagagtagatgcaagagtttaaggtatcaacagatctaatcaaacactcacaccaatcagctaattactcgtaatccgtatattcacaaagcaaaggatcatagtacacatacttgagaagaagctccatatcaggtcctggatacttgatttctatagtattagaatgtccaggtgatgaaaatgtgttcaagcaatcaacaagaagccctaagctgattccgaatctcggcctaccttgagctccatactcgtatttcgtgaatagctactcatataacacatcaaacagatttcggattcaatcgaattttaggggtttagaaaatttaagataaactcagaaatcgatacctcgcgttgaagataaactttggcttgaagacaacctgattcttcaacaatcaaaactattccgtgttcagataattctactaaagcatcctggaaacggagaagttttcagaaaatcaaagaagaaccctagattgaatttggggaggatggagataaaaacctggtggcgtttccatcggacgcaagtgagtgcatcgaccattccttgaacattatcgagctggcaaatcaggtccggtgtgtctggttcaatcgccggcgacgaggacgaactcatttctctctctctctctcactctccttcctctgctttcccgccagaaaatgtatgccgacaatatagcaattaaattgattattattatatttgttttagcaggcccagttattaataaagttgatctttttggcccacacacaaactaaaaagaaaaataaaagcccatctttatgatatcgcgtttatatctgagtcacagagaaataaaagggtatgtttgtaaatttcaaatacttctctttctttatccgtacgaaaatggacggtgttaccggcggaggaacgaatatcggcgaggctgtgacggcgccaccaccgcggaatccgcatccagcgactttacttaatgcgaactctttaccgccccctttccttagcaagacgtatgacatggtggaagatccggcgacggacgcgattgtctcatggagtccgacgaacaatagcttcattgtttgggatccaccggagttttctcgtgatcttctacctaaatacttcaaacacaacaatttctccagctttgttcgccagttaaacacctatgtaagtataaattctctcgcgccctaatttctccaccattgatttctctaattgtactgtgtatagattatgatttcgttgaataatcttagtgcttgatgtgtttgataagatttatatgattcatgtgccaattttgatgaacagggttttaggaaagtggatccagatcgatgggaatttgctaatgaaggtttcttaagaggtcaaaaacatctattgaagaagataagccggagaaaatctgttcagggacatggtagtagtagtagtaatccacaatctcagcaattatctcagggtcaaggttcaatggctgcattatcttcatgtgttgaggttgggaaatttgggttagaggaagaagttgaacagcttaaaagagacaaaaacgtgttgatgcaggaactcgttaagttacgccagcagcaacaaacaacagataataaacttcaggttttggttaaacatcttcaggttatggagcagaggcaacaacagattatgtctttccttgctaaagctgtacagaatcctactttcctctctcagtttatacagaagcagactgatagtaatatgcatgtaaccgaggccaataagaagcggagactcagagaggatagtactgctgctactgagagtaatagtcatagccatagcttggaagcatcagatggacagatagttaagtatcagccacttagaaacgattcaatgatgtggaacatgatgaaaacagatgataagtatccgtttcttgacgggttctcatctccaaaccaggtatcaggagtcactcttcaagaggtactacccataacttcaggacagtcacaggcatatgcatctgtaccatcaggacagcctttatcatacttaccctctacttcaacttctctcccggataccataatgccagagacttcccagataccacaattgacacgagagagtatcaacgacttccctacagaaaacttcatggatacagagaagaatgttccagaggcattcatctctccaagcccattccttgatggtggttcagtcccgattcagcttgagggaatacccgaagaccccgagattgatgaactaatgagtaactttgaattccttgaagaatatatgccagaaagcccagtttttggagatgcaactacactagagaacaacaacaacaacaacaacaacaacaacaacaacaacaacaacaacaacaacaacaacacaaatggtagacatatggataagcttatagaagaattgggtcttctcacatcagaaacagaacactagtaaaggattatgtttagtatccattgtaaagtctttctctactaacattatcgttaggactcagtagtacggttgcaactttgtgcagaaatctttccttggataatagaagagttgtatttattattaaaaagaaaatgccattttttctaatttattgtagaaagtgactactttgtccaatcatatttgtagtcctttttcgataagaaaaacagagttggaattttcccggggaagctcttttcaatg

SEQ ID NO: 6708 - DNA, 3000 bp, Unknown
  misc_feature (1)..( 3000): cDNA_ID_1815282_gDNA_ID_1621101_Annot_ID_171436 3000 nt of promoter + ATG
atgggctttattccaactttcatttactatgatattgtcctttttgagcttatatcttcaagcccgcaaagatttgttattgggttcctttccaaaagacctcatactagttggagttggacttgacttatatattaaaaactctttttctaaactttcgatgtgggacatttggtttgtacccaacaatttgtagctgttttttacatttaaatattctcaaaaatacagagagcatggaatttaaatacatatactgtaataaacttacattttcaaattcaaactaataaagctgaaaaaaagtagtgtaaactttgtggcacatgttttgtcaaactgatgttttagttttatatcaccccattacatgtatattcgtcatagtctttcagttttgttacgtttttaaatatcttataacgtattaatttttaataactttaaaataaactatctaacaaaaaataaaaaaatagaattagtgtccgtgtgcttattttacctgcaagtacgggcatgaaggcaagggatttgatagatagccaatacgaacacgcatcacgtgcttttctaaacgcttcgatcactctgaagacgccacgtgtaaaaatctagccaaatagagtcagaacttaccatgtgggcacgtgcgattcccgcagctctaacatctatgtatgcctccatgactccatgtgatcatttgagccaatctaaatatattttgcgtattctttttcagtatacacacattggatacgaattgattttaaattttttacacatgatagattgttttgtaaatataataatactaatattatgtcatcgaaatgcaccaagtcgttgtttatgataagatcattaatggaccgattaggtcttaattaaccaatattttgtttcacggaaagcaatatgacaaagcacgtattaattagtgaataaacaatagccaatagcttggagacatgaaatacaataatgaaccgaatcacacaagacttagtctatattattttctgaaacatgaaatcatcatgttagttttacagtcaagaaaacaatgcgtctataaatttatttcaaatcaaaatcttatatagtaaatgttgacaaaagaaaatcttatattacatatgatcaggattttttcttttcatcaagtatctgttaaatagataaatatagagaaagatgtgatgggcggccaaaggtcgtcgtccgggagaagcggtcgtttgatagctgcaaaaggattctctttgctcccaaaaagcttcgctggcaaaacgtcattgtttgcttctcccttaatctatctttcctttattctcaacttcaatacaataatatagttatatacatacaaacgttttgacccaatgagatatacaagtaccaacattggtatatatgtttaactcggagatgcatattatcgggttaagcttttttcaacatcgttcgtctaatgtttgtgatggataaactcgaaaaattatatatgcttataattaacttatgatattaaaatgactggaattattgaaacttttaacccaattttaattagcacttaaatttgtacactcattgtcaattaattttggattaaaatcatatagtgttcctataaacaaacatattttatcactgatcatgatgaagtttttttcgcattttaaacaaaaataaaataaaaagagcgttaaaaggcctaaattacgtacttgtccaacggcccattgaaagcaaacgcaaggatccataatgacctttatttgggctgagatttatcattgtactgtaatttgactattttccaaggaaaattaagtccctttttatgtttttatttatttgaaaaacatgacaaaacaaatgcaatccacatggtccaacgaaagagcgatctagttgaaatctaactaagttcccaacgaaaccactgttaatgtaactttacatggcaaatatctttcggatatcaaggcccatcactttcagctcttctgtttttcatttttttcccaaaatttgtattgtttaatattcctagatttcaaattgtaataaaattttcatttggcataagaaaaaaaaataatatctttttctacatagaaaataatatatataatatgagttcatacaccatacatgtgtgtctatatacatatatatagttttgtaatgtatgtatatctcgaattgtagccatatgtaggatgattatctaaaatatatggtcataatgtcacagtgtaaagctactctagtcatttgtcagattctaacaagagaatcttagtaatgatcacgcaaagctaagatctttgcttcaccatttaaagcaaacaaactttgtcttaaccttacataggacatcaaagtcacaaccaactttttcctctgtaaatcttcacctatttatataaaatgcacactatttttttatttataattgggcttcctatattaattaaatgcatagcaatctatgatttaatgtctttttgtaacaaagtaccaacgaagatagaagaacacacctaaaagtgtagagttctataaagacgtaaagtttatgtaaatttctgaaagtagctaaatatatgtaagtaattaatagaaaatgagatttcatttttacttttctaacatatataagttactaaaatatgtttgcactggatttaatagaaagaaagtatattatatttgcaaattttgaattatacatgtgataatcaaaatgtgtgtgctcttacactcagtaaaatttattatggtaaaatttctttcatttactgaaaatgatattttgaagataagtgacctatctatgtatatatttcgggtccatctttatatttattattgaatttacatcattatccaccaaccccatcttcttcttattcttcatcttctactgagatttctctttttttttcaaaaaaaactcatccttgaatgaacggtggtgcatgg

SEQ ID NO: 6709 - DNA, 3000 bp, Unknown
  misc_feature (1)..( 3000): cDNA_ID_1815297_gDNA_ID_1621101_Annot_ID_171424 3000 nt of promoter + ATG
tagactatatatagttcattcaaaaaggagagattctcgcatgtctcagtgactcgctaggttcatcagttttattaactctagtaagaattttttccatgtatattaggtctctctggtctatacatctatatacattggtttatacgtacatcggtacatatacatacacaaatgagacattgtacgtttagtatacagaaatgattagcatatcattcgataaattcccaccgtttatatgtgtgggtgtgtgtgcgcgacatagacatataagtatattatataagcagcattgatgtatgtttgtatcatgattaggtccacaaaagtgtcaataccatcattaatgtcaatataaatggtaacacgtccccaccatataatgcctacaaatctacattaggtgcacatacataacaatttgcgtatatgtgtgagttcttgtcgattcatttaattattcttctataaactatttccaatagatggtagtgatatatgatatcatgtcaacattattggtaattttctttacaaaaaatgattaaagaaaacacacaaactgctaactttagtataaaatcatcacccaaactcttctttaacaaacgtaatcattttcttaagaagattagaaacactaatcatacgatttactttttctttttgtcaacataatcatatgattttctaaaattatattttgaagacttttttttggtgtttggcctcgagtcatttatatttctttctcttttgagtgtgatttaataatcatgagaaaaaagtccaaccaactttgaaatagtgagaaagctacttggacgtctgttttaactccacgtgtcaagcttagaacatttaaaggttttgcttacaatttttatttatttgatccaaccaacaccaacccatctcagatattttcgccaatcataatcagagatcaaattataacggtgaagctatttttaacttgtatattaaatagtaaaatatacatgttacacatccggatccgtggcgcaatggtagcgcgtctgactccagatcagaaggttgcgtgttcgattcacgtcgggttcaatcccccgaactatacacccggtttcttttttcggtatgacatacctatgtctccactgcacgacgtcgttcagcgatataacactaaacgacgagacatctgagctaatttagtgaaaccacacgcagtttttctttgcaagccttaaactttttctttctttctttctgatactgatactgatagtattgagagactgactaaaaagaagaactagaattacaaagataaagtaactgaaggagaaaatctattaatcagcaggctcttcaggcttcacaaagaactctatataagcaatccgactcggtggctgataccctgcggattccacttgtggagctaaagctttagaaactgaaaccaagtgctgaactttcaacattcctcctcttcctattgttagtttgcttcccctgttttctctcactacgtttcccggtatgtttgccgttgttgctttcaaaaacttgtatttgtacctacaatcaacaatgagaagtttagcaaatgtatctggctactattcttgattggtaaatcaagcgtaggagcgtgtgttttaaccataaagctacggtagagaaagaattgagttcattgttacccgtaagagacttcggtatcacaatgaaaggcaaggagaagatctgtgttggcataatacatgaagtctatctgcaaagaggatagatcgaaatatgttccttgattctttcacattaagataatatacatcaccaagaaacaagtgagaaacaagacctgcaagtctccatgtccttctcctctaaagattacacaagggggttccttttgaagactgatctgtacacttgaaccaggccattcaagatcatctattgcttccttcaacgccgctgactgatagatacattatcaattaccatttgagaaaaagctcagactaacaatgttaaacgaaaaacgatactaaactatgttactacctttactgtaaaagtaagtggcgcgattcccgcctgctcaaagttgtagtcccaagtaacagtttcgggaattctagttcttatctcagagtagatgcaagagtttaaggtatcaacagatctaatcaaacactcacaccaatcagctaattactcgtaatccgtatattcacaaagcaaaggatcatagtacacatacttgagaagaagctccatatcaggtcctggatacttgatttctatagtattagaatgtccaggtgatgaaaatgtgttcaagcaatcaacaagaagccctaagctgattccgaatctcggcctaccttgagctccatactcgtatttcgtgaatagctactcatataacacatcaaacagatttcggattcaatcgaattttaggggtttagaaaatttaagataaactcagaaatcgatacctcgcgttgaagataaactttggcttgaagacaacctgattcttcaacaatcaaaactattccgtgttcagataattctactaaagcatcctggaaacggagaagttttcagaaaatcaaagaagaaccctagattgaatttggggaggatggagataaaaacctggtggcgtttccatcggacgcaagtgagtgcatcgaccattccttgaacattatcgagctggcaaatcaggtccggtgtgtctggttcaatcgccggcgacgaggacgaactcatttctctctctctctctcactctccttcctctgctttcccgccagaaaatgtatgccgacaatatagcaattaaattgattattattatatttgttttagcaggcccagttattaataaagttgatctttttggcccacacacaaactaaaaagaaaaataaaagcccatctttatgatatcgcgtttatatctgagtcacagagaaataaaagggtatg

SEQ ID NO: 6710 - DNA, 3000 bp, Unknown; identical to SEQ ID NO: 6707
  misc_feature (1)..( 3000): cDNA_ID_1815301_gDNA_ID_1621101_Annot_ID_171423 3000 nt of promoter + ATG

SEQ ID NO: 6711 - DNA, 3000 bp, Unknown; identical to SEQ ID NO: 6705
  misc_feature (1)..( 3000): cDNA_ID_2173453_gDNA_ID_1621101_Annot_ID_171422 3000 nt of promoter + ATG

SEQ ID NO: 6712 - DNA, 3000 bp, Unknown
  misc_feature (1)..( 3000): cDNA_ID_1013294_gDNA_ID_1621101_Annot_ID_171421 3000 nt of promoter + ATG
tatactcgataacaagaaacaagagaccaatagtccaacagactaaattgtaggaacaaagagagtcgtgacaaacatatactcattgatgcttcttgattgatgatgaagcacttgtccatgcttttatgagcttggggaaatcaaactgcgagcactataataacaatcatgagcacgataccaaaaatcaccaagagcaagcacgtctacaagaaaaagaaaaaacaatggaaagaagaagttagtaggctgatctgatcatccaaaatcctcaaaaacacatttcatggtacgatcaaaagctttaatatattaccagagaagaatttgatctttgtgtctttgatgccttacgagatgggattttccttgggcagttgcagcgtaagagttatcgatgtgagtaccaatatcatctacacaaaaataggtcttacgtcttaggttttgaagacataagtgagagttttagcataacaagagttggaatcagttttacctatcatgtttccttgatcgtgcaccaacactgccaagtctttgaagatctcgtgcacctcgccaatttgctgctgaatttcttgtatcccttgctctctttcctcaataacagcctcattgaacgcaatctcattgtccaacagtacaagttcttgtctgcaacaaaaaacaacaaaccaatcaatagataactcatcaaccgaacaaagatggacaccattgtctgtataaactaacctttttgattccacaagaagggcacgctgctctggatgcttatctccattcacatctatctcactggatgtgtagctacattaccaaagccaggaaatcaatacacaaaaccacaaaagtaaacataaaccatcaatgagcattaaccttgagggaagagatggcttgtggacaagaggagcatatacggtttctctttcagcagcaagacgctgagccttttgaaactctttcaacacagcttgaaagtcctttgcaagcttagcatccacaatcttcttcttttgctaaccaaccaatcaaattcctattaatcaacagaagtagcagaagaagaacaagaatcttcctttatcataaatgactcacatttacacctctttgatgatcagtttcactagcttctttaagtttagctgatgtatctttcactaactgtccaatatataatcttgtcttatgcctaaaacaagcaaattgactcaattagaaacaatttcaagtaccctaaaactcaaaaaggagataactttaactttgagaagtacttacagcttctctctgagctcaggcgtatctttaggagtaccaagagtattgacaagacgatggaaagtggaaacacttgtattgatctgaaatataccagaagcaacatcttgagtcgtgtcttgtctactaccaccaccattgatgttccttgaagaagctaatgatcttcctcttcccgcctctaaatcttgaaaactcattctttctctctctttctcgaaaaccccgccactaaattatcctcttttattcgcccaagaaaacaaagcaacaacaaaattcgatttacagtcgataacggagatcgagggaagagaggatgtgatggtgatttcaagattccccggtgagtttctctctctccggacagattgagaaaaaacgtgaaccgcggagagagagattgagcaaaacgtgaaatgtcacattacctgtatgaacggaaaaagcttgtacttttttcattttttgatccttaacttttctataatattccaaacgtgactctatagtttagaatcttaacggtatatcctccttttattataaagtgataaatggtctacgatgattacattgctctgagctcaggacacgtggatggtagacattggtggagaaagtgattatgtcacgacgttaattgattattttaaccaagatactaacagattacggattaattagaattagattaaggattatgatagattagtccagaatttaatgaataaaatctctagatagaactttacgtgactaaaaagggtcaaaagcaaaagaagtttaaaattaggactcttttttaatcatcgcacgtgagaaggttccgaccatatcacgtgccaaacccgaataagactcgtttttccaaggcgtttaaaatcaggtcccacttttttcttttatttttcactcttcttcacatcaaatccgcgaccagagatttttctttcctttgatttttcgtttcgtttcgtttcaaatattgttcctcctgtgtgaaggaaaaacaatcttccatttcaatccgcgtcaacgcgattttcttcatgacggtgagcttatctaatctcttcgctttttgaaactagttagttttggtttttgttttggatttatcctgagaaaggtcgatgtttttgctgttgatttgattgaggaagatgtgaacagatctgttgattttgattgttgttttctaatttgttttgcgagaaatggcgttgattattagtgaagaatcgctagtttttttattttagaggatttgaagctgttctctgtttttgatttgggtgaaaattactgtttctgatatgaagaaatttttttttagggtaaaattgcttttgtttggattaggatattcactttagcatttgttttgttttgtaatctgttaatatctgatctgtgccataggattagttttgagacaagtatttgcttttcctagattctgaggttctttttatcttcttgtattgatgatgcaatgtttctgtgttttctgatcattgtattgataatattggttgctttaggagtgtgtgtgtgtgtgtttagtcattgttttaggcgataaggaatcgagaaatgtgtaatcgaacaactaatgaataagtctgagattttgtttagctggtgaaatggtttgaaattttagtttttaagtcacacgagattatatttcacttgcagatg

SEQ ID NO: 6713 - DNA, 3000 bp, Unknown; identical to SEQ ID NO: 6709
  misc_feature (1)..( 3000): cDNA_ID_1815297_gDNA_ID_1621101_Annot_ID_55889 3000 nt of promoter + ATG

SEQ ID NO: 6714 - DNA, 3000 bp, Unknown
  misc_feature (1)..( 3000): cDNA_ID_1815286_gDNA_ID_1621101_Annot_ID_55892 3000 nt of promoter + ATG
gttttgctggaaataaccaaacatatgcgtctccaagagacacgatcacggatgtttcgcattagtataggacaactctttagaaacttttgcaaatggatattttatatgcaattatgtttatttgtttcaaaactcttgtgtttgtattctatattgcgtatagacaaacctttggtcgttgttcatataattttacacgttaactgttttttccaagattttccatctaccgaattatatacttccttgtcaagaaagggagataggagcaggagaaaatttatcccaaactcatctctctttactttattgaccataacatcataaatactgttacatatatttttttttttcttttttttttttggcatttgacacctactaatttgatttcttttggtattaagtgaaatcaaaagtctctttccaactcaaaatttagctcaatagcaaagaagcaatctttgtcttataacctattgaacgatcccaattcataatttgaatttgatatactgtgaaagataaatttggtctattagaaatcgacccataaagatataagatttggatttagggtcacggaaagatctacagcaaatccgcattctgagtcaagctagagaatattgttatcaccaaacgagagaagagttcacgattttcatcgttatccacacaaaaacactggtgatgggacgagttaagcgttacttctaatatagtacgaagacatcattatgccaactaactcagtatgcatgttctgattatgtgttttagagatcacatccgatccatgcagttgttatttttttttgctaaagcacatccatccaacgtacgtacgctaacagttgttctctaattgaaaccagtttccagcttttatgactttaacatacgttggatggtcgttggaacttggaagatactcttggtgcctcaagcgaccttcactgttttctatatggtgcaagtttataattcaaagatcgatcggtttccaaagatgttcaagagtaggaacaaaaatccaaacaagaaaaaagataaccgatctagactgaaagtttatacaatgttatgaactcatttgaattcggaagtcaattttagctacagagaccgaaagagtgaagcagccattgaattacaaattgacgactatgtatctgttgcgtaagccgcgtaacaataacattacatagaattttaaggcttgtcttatctatactcgttgacaatgtcaaataaatatagcataggaattttatactatatggtgctactaattacatggaacccttaatatatacgactgtttaaatagtcaacgtgataaatagagagttggtaagtgtttggttttaatttgacaatgtgaaacaagcctgaacattgaccctttaaaccataacagtaatttaacggtaaaaaaatagtaattaagtatgtaaacaagatcttccgtgagagtgaaattaaacctcattatttaaattatactagtaaacattttctccaaccgtaggaaatttcgttttatgttttttttctaatttgtcgtgatccttctcattcctttgaagacaacaagattctattatgaaagattttttcaaagatccaatagtataatacaacgtaatatataataccaactttatagttacaccttctaataaaatccacttactcgtttatgtgttcctcacgctatcgacttaatgtttggaacccgcgagagaagttctttaattaaattagtcaatcgaaaaaagctatccatttcctttatcaaagtaaatcaattcgaaaatctcgtattaacttgatcatccaaatccatatgtatattttcgaataatataaaacagaaattgagataacctatactaaagagagtttcacgtaaaaaatttatattttcacgtaacaaaaaattacaaaacaattaaacaaaaaacaaatgataatagcataggtaattttttgtgacttgaaattcagaacgtatggtaggcacaaacgacggtttggtaacaataaggagaataataataatcttcgtttgaattcaaatagaggaagaagaagcgaaagggtaggctttgatcaaccatgagacattgaagcaggtagagataattctttgaatgcggtggaagcaatcacataatgataaatgcaagattccaattttgatgaactttgcaatgagaacataatattgcttttcaattaaatattagttaaatatacccttcaagaaaagtagttaacaagtttaatttataatcatgcatttatgcgaaattcttatttgtaggttttaatctaaatagagaaatatacacatatataggaaatattcaaaaatgatcacatgcatgtttaatttttgaaaaatgtggctttcttttataacataatttcaataagattagtttgaattgcagattatgaaatagtatataatttgtgattgttttacaagtaaaagagcgtaagaaatttggtcccaaaaaaaaaagattttagtagggaaatatcaacattttattctaacatagctagggcaaatattttatacatctaacccacaataacaaaatccattaatgcattaacaattattcgtattcttttatataaaaattatttgtttgaacatcatccccacgaattactcttcgaagttcgaacgccatgacacatatcatattatcagtacctaatcttgattttgttataactattttggttatttaactgatttattgaatgactcatatattgtagacttatgacacactatgaaaaataatatttacaccaaattctgacgaatgcatacacaactttactttagttatgtcatgactgcttttcacatctatatatacatacaaacctaatcgtagggagcgacgaaacgaagatcatatcttcaaaaacctctgataagttttggttcttgatataaacaaaatg

SEQ ID NO: 6715 - DNA, 3000 bp, Unknown; identical to SEQ ID NO: 6708
  misc_feature (1)..( 3000): cDNA_ID_1815282_gDNA_ID_1621101_Annot_ID_55895 3000 nt of promoter + ATG

SEQ ID NO: 6716 - DNA, 3000 bp, Unknown
  misc_feature (1)..( 3000): cDNA_ID_1815379_gDNA_ID_1621102_Annot_ID_55898 3000 nt of promoter + ATG
acatgtaacccatgaaatatcactaacagttaccgggaacattgttttgcagtttcgtttcagctatatgatcttaagcagcaaggtttcatagagaggcaagaggtgaagcaaatggtggtggctactcttgctgagtccggcatgaacctgtcagacgaaatcatagagagtataatcgacaaggtgtggttccttcctaccctgctcgatactatattcttgttccactgttgtatagccaactcatgatagcagttgagaataaagtaaagagtggtttctaagtttcttctttcacagacatttgaggaagctgatacaaaacatgacgggaggatcgataaggaagagtggagaacccttgttctcaggcatccttcccttctaaagaatatgactctccagtatcttaagtgagttcctaaaccaagacttatccgaggtttaggcaatgcaacttccaattttttctgtgttattattaacaccgatctctgatattgtgtgcagggatataacaactacatttccgagctttgtgttccactcgcaggtggaagatacctgagaaaaacaatagcatattagcagaggagacaatttgggaattgtgtttgttttctgattatgtatcatgtctatttgtttcaatctctctgaacattttcaagattttgttgttacttgtgtgaattaaaagtaaagaaaacaaatctgtatttttgctactcctgattttgattgctgattttctcctcgcatctgtagatatactactaaccttgagacatgaatcctattaataaagagcaaactgatgaagtgataatagagagcaaaaaagagagaacccaacaccaaatgatcgggtatgctctagtctgaattctgaagtcaaaattgaaatcaccgatttgatcgaaccggatgcaacattacaacaatcggatttgttagtcttgtggttgactttgtcagttagagttgacaaagtaattagcaaagttagtgacgattgtgttctgcataaacacgtttactttgaggaataaattacttactctttcggtctttcctaatatatatgttttccctgtctcaaagatctgaataggtatcagagcgcgttgacaatctctttttttgatcatcgatttgttctctctttcttggctaaaaagtttctatctacacgactctccatggattcaacaagaaattcagcttcttccaactccacgggatgctttacggatcagaaaaagcgaaaggcactctatgaggtgtttaagaaactcagcggtgttgattgccaaagaaacgaggttcgtataaattatatgtaactttcttgctaagtacgcatatgatataaatctgtgtttcttcgttcagggtaacgttgtagaaggcgtaacgtgttattatggtgaaatgaacaaggtatttggaattatatataaatatatatgtctttcttgccacgcactccttcttttcaacaagtcttacagattttccataacgtgtcctgttgtatttctgttgtatcaggaacagtttcatgtagccatattccagactgacaaaaatgagagcttgttttcagagagggtattttatttttgttctcaacaaaaaaagtctttgtaatccatttgcaaacaatgacattaccctatcacacaggtcttcgatttgttcgacacaaatcatgatggattacttgggtttgaggagtttgcccgagctctctctgtctttcatccatctgctcctatagatgataaaattgaccgtacgtctctgatctcaaaaactagacccgatatattaaccatctacaaacaaactgttcacatgctacctatatatattccatgaaagcttattaacggttacctggaacattatttggcagtttcgtttcagctatatgatcttaagcagcaaggttttatcgaaaggcagggggtgaaacaactggtggtggctactcttgctgcgtccggcatgagccagtcagacgaaatcgtagagagtataatcgacaaggtgtgttttccttccttctattttttggttcgactctagtctatagtatagccaactaagtttaagcagctgatgaatatgaagtgaagagtgatttttgagtttatgaggcagacatttgtgcaagctgacacaaaacatgaagggatgatcgatgaggaagagtggatggacctagtttttagacatcctcttcttctgaagaacatgactctccagtatctcaagtgagctcctaaaccaaagactaacccgaggtttagccaatgcaacttcaaatttttctgcatcacgtattattaacaccatgatatctgatattgtgtgcagggatatcacaactacatttccgagctttgtgttacactcgcaagtggaagatacctgagaaaaacaatagcatattagcagaggagactgtttgggaattgtgtttgttttctgattatgtatcatgtttatttgttttcaatctctctcaacattttcaagattttgttgttcctttgtgtggaaaaaaaacaaatccgttgatgattttctcctcgcatctgtagatctactactaatcttgagacatgtaaaagcaaactgctagagcattgaaagggcaaactgctagaaaaaaaagagagaagaactcaacaccaatgatcggctatgctctaatctgaattctcaagtcaaaattgaaatcgccggtttgatcgaaccggatgtatttaacaaaataaacaaaataaacaaaaaaagaaggaaaaatagatcctcacgcgttaccgtagcgcgtatttttttcacaacaaaattcataagcagtgtgggtcccacaggtccactaagtttagtggtgggttgctccgtagctaatctcatctctcactctttttcttatccactatccatagaagaagaagaagaagactgttgacgacgacggcg

SEQ ID NO: 6717 - DNA, 3000 bp, Unknown
  misc_feature (1)..( 3000): cDNA_ID_1815375_gDNA_ID_1621102_Annot_ID_55899 3000 nt of promoter + ATG
tggatgaaatgcccacttctgttcacacttctgcactactgccactacattcttggactgcttctgccgctatattcccaccacaagggaccattcttttattattagacaaaacaagttaaatccgattgaaaagtatacagacaaaaccttctactatagaaataaataacccatatcatattctagattagatccagcgtaacaccctttattaattctcacttaatataatttattggagcagatcaagccattcaacaaagcctctctctcatgtgatgagatctctgacctaattgaatcgtgattagatctagatcttgttacattgtcttcgtcaattatccgcacttaaacatttcttcgttattttacactattagtatacgttgtaacacatatttcatctttctgtactaataaagagtacccacccataaactactctttcataaacaaatgtcttcatcaacaaatgtcttatataacgtgaagtttcatatccaaaccactggttataaagtgttttgtaacgttaactttcactattagactcatcaatgtttgcctatgtaatcatacaacagtagtagttgtataaattataaattggtgtagagaatttaggaataatgtttggatgaaagggtgttgtcacccaacaaggagagggaccattaataaccgataatcataataagatttgtgaaagaaatgtttcactgatttggcagaagtacagttggaggttctttgtcttttctcttctgcaccttttgttctctttacttccttcttgtttgttggtttttgttcttttcttattttttttccctaccataaatggaccattaccattcatttctctctttttcttattatttgctgtatttagttgattttgttatatccgtttaaatttgtgtacatataaacaacgacgtctataagtttttataacaaaaaaaaggattatgttaggtgaaatttcgattcgttttacgtgtaggatcaacgtgaaagaaagtcgttgtaggtatgaaaaatatggaccgactacgatacggctgcttgagaaaattagatgtataacgtaaagtgaaatagtgaatgttaaggcaattagggaaactaaaattaaatattcaattggtatgtagggaaacgactttttatttattcacatgcacatgacctctctatgtcatgtgccttaagttgccgtgttcgatctttttataatttgttcgacccgttaccctaaatttaaaaatcatttctatttttttattattatgtccaaatctgatttctttttcatgtgtcatatatataaaactcattttaattaaattacaaatttgaaaaaatatttttttttgggaaatttaagaccgacaagatgagcaagggacatggttgtaaactaattatttctttaattaatcagtcacaaaaattcctagcttgcatgtgcaatttcactctccaagattccatgttttacttcaacttttatcactagtttatactatcaaagactcaaagtagatgatctgtattctacgctaatagtaaataattttaatataaccactatttacccacttctgttttctctcaaaataaaaacagaatccacattatatacatggtttcttgtggttactagttacacaatgtactagctacaagaagtgcttctgattaaaccatgtacagttttctagttcaaatacacatggttcctcgttactagttacacaattatgtcgacattcatgggaagttcaagggatttggatacttcaattcttactatgagaaaccctatttaaatgtaactactaaaacacaagcactttttgtcgtggatataattggttaaaattatcggtgcgtttaatgtgttgagaattcgttgaacactttattacctattattaaaccaaaaagaagcattaaagttcatcgtgccgctttaagatccacaagttttgtttcttcgattcttcgtggtgaacgttgcagccatctttgggctgtactattgtcattatatttaacgggtcttttcttttgtaagttagagctagtatatatgaattaatgatatagttaaatttaaataacttgtaatgctcggtctaactcttaaaaaaacgtttgaatgtgattgaacctttcgtaacagtttgatactagtttaatggtaaaactggccacatggaacaagacgtcaagacctataaatgatcgcaaccttttatcgaagtggagaacacttctcgttcacatgttataagatcatgatacgatgctctctgattagtggattggagtgaaatttcgacaaaattcgtacatgcaaatgtcgtaaaaggcaattacaatatagcagcggaaaagagaggaggactatttgacatgtcggtctcaaaaccatgaaagttggtgccattgtaagagggctattgttttgacatgtcattcttgattctcagatttcgattttcatataaattatagcatactatttttgttgcataatatttgattattttcttactttcaaaaattttggtggtcggccataatatgtttttccaataaataaataaaaaaggtttatctatgtaaggtatattccttgaagtcaaatccaaatttaattacaggattatgtttcaaaacgttatctaaaacttgatccagctatttcaagagtgaactactttgtaacttaattaggactatttagggtaattgttttttcaattttacaaaaatcaaaagcaaagattaaaataatactaaagggttagtgatagaaactttgttgggatcaaaaaccttcctttgctacttctctctctgctctgtgtttatttatatatttcctataaacaaaataaaaccaaaaccgatggattggttcttcgctttacaatcccaacgcacttctctcattcttcttcctcatcttcgtcttctccg

SEQ ID NO: 6718 - DNA, 3000 bp, Unknown
  misc_feature (1)..( 3000): cDNA_ID_1017738_gDNA_ID_1621102_Annot_ID_55900 3000 nt of promoter + ATG
gctctcctttctaactgcattcctagaaaatattaccctaaaggcctttgtcttggcatcctcgtcctcttcagcaggaactcatctgtcttggaagaattattaccatgtctgcttttgtcagcaaatacgaaggtaagtacacttaatatgcactcttctcttcgtgttccagtaatcttcagttctccattttatgtgctttctgagttcagatgagctgatcaagacggccaagtacattgcaacgccgggaaggggcattttggcggcagatgagagcacagaaaccattgggaaacgattcgccggaatcaatgttgagaacactgagtccaaccgccaagcttaccgtgagctcctcttcacttcccctggcagttacccttgcctctctggtgttatactcttcgaggaaaccctctaccagaaaacctctgatggcaaacccttcgtcgatctcctcatggtccgtctcggaaaaagcaaactccagctctagtcttagtcattgggtccaagagttgcagagttgaagctcttgacatgacccaaatggaacttactgtttcagtttggatctgatttttctttggatcaggagaacggtgttatccccggaatcaaagtggacaagggtttggttgatctagcagggaccaacggcgagaccactactcaaggtctagactcgcttggtgcacggtgtcagcagtattacgaggcaggagcccggtttgctaaatggcgtgcattcttcaagattggggccaccgagccaagcgttctctccatccaagaggacgccagggtgctagcccgctatgccatcatctgccaggagaatggacttgtcccgatcgtcgagccagaggtgctgacaggtgggagccacgacatcaagaaatgtgcggcggtgactgagacggttcttgctgccgtgttcaaggccttgaactaccaccatgtcctcctcgaaggcactctgcttaaacctaacatggtcactcccggctccgacagcccaaaggtatccaaactagatgttgcaatccggttttgttttggagtcgttgttttattggtcttatattttgaaactgaaaccacaaccaaactgtatcggtgtgatgctattttatttaaatttacatgcccggtccttacgtaaccacaatcaaatgaatcacagagacatcaatacctcgaaatgcaacgttaatttgctacaaaacgctaaaatagttcttcttacaggttgcaccggaactaattgcggaatacacggtgactgctctgcgccgcacagtcccaccagctattccgggaatcgtgttcctctcaggcatacagcgcgaagagcaagcgacactaaatctaaacgcaatgaacaagcttgatgtgttgaagccatggacgctcactttctcttttggcggagccctccagcaaagtgctatcaaggcttgggccggtaagcccgagaacgtagccaaagctcaggccaagttcctgaccaggtgcaaggctaacaaggacgctaccctcgggaaatacaccggctgggcttctggtgactcggccgctttcgagaacttggttgtgataggatacaggtactaggatcctttgagaacgggcgtttgcctttgatgcggtttgagtagatatctaatgtttcgtgtgtgttttaactgtttgaatgttcaattttgcagactgctaataattgttattttccggttactgtcaaactatccatgtgaaattcacgttttgaaaagctaataataatgtttttattgtatgagaataaatttagaaaactaaaaattgttaaggacatattacaagatatctcctcttttcgctttgctctagtgcacattgttagccaattcaaacacacttgaagtgcttaatgacactgaaattgaatatgatcttgtccggaaacacagcggctgaagctatcaaccttcttataagcaatgggcgtacttgagggaaacatcatatttttaaaccttgtctcagtaagctaacacacaccccttgtgattacttatccatgtttatccacaagaatgcagttggattgagatattttcttctttgttgaaatcaggcctcaaggtgttcatgtggtctgcaaaaaaattcccaaaaataaagatagtgacatctgaaatcgataatggattagacgaagagtttcgtgttattccttggtatgggcgggtttggggacagatattttggcacagacgaggactaggccactgtggtcctgcagcattaggtgtcccttccatgtcctgcattacattttattgatggattcatcaccctatctactacaacggctacacaaactatgaagagttttgtttactaataaatgcccaagtgaggggtcgatcgaacccgggacacgtttttcagtttaccatatagaattatccttggaacccttgatactccataaaacatcaccacctctgttgtcatctcatgaatccaggttcaaacctagtctctctctccctagtgggaggtatatggccactgggccaatgatgacaaaatgcaaaaaaaataaaatacatttgggttcattatctaaaatatctcttgtgtttgtaagttttggttgcacactcgtgtggttgaagtgtgtgtgagaggtactatacaatacactctgcttttgttttgtacctatctctttctcttctccacatatccaagactttggggataaagctgagatcattggttgccatttggttgtgtagaagcaatcacccatttgctttatccgaggttgataaatttcctcgggttctccttctgacacgtatgacaaattctaatagtatattcctcgtagatattacctatatattctcaatagttgcaggtacttaaggctttgtcttggcatcctcgtcctcttcagcaaaactcgtctctcttgcactccaaaaagcaaccatg

SEQ ID NO: 6719 - DNA, 3000 bp, Unknown
  misc_feature (1)..( 3000): cDNA_ID_2990142_gDNA_ID_1621102_Annot_ID_55901 3000 nt of promoter + ATG
actcattatcatattgttacttgatgtttataaatttgagattcctttttcattttctcactgcctctttctgtaacaatagcaatttcttagatgtcaccactggcttttatctggttggggatttaaggggagatcaatttaatcttatttgatgctaggattttgaaaaacattctgcaggtaaatcctacagatgtaataattcttgaagggatacttttgttccatgatccacgcgtccgaaagttgatgaacatgaagatttttgtttgcacaggtaatttgttgcctcttcccgttataattattgtaaactcttgtttcgactacattccatttcccttttgtagattcacttggctttttttttctacaaaatttcacatgatggaacaacttcttatgctttaagattttgctgtttcacattgcttattttgttttctgcgtagatgctgacgttcgtttggcaagaaggataaaaagagatactgtcgagaatggtagagatatcggcacagtacttgaccaggttagcccgtcttagtattgttactgtatatattatcatcaagaacaacaagaaatggtttacctcttgcattttaaatattacattgctctgatctgtatgtttttttctcatattagttcggcgttttcaaatctatatgtttctacccatattttatatgatgtcaaccttttgatgcagtactcaaagtttgtgaagcctgcttttgatgacttcattcttccaacgaagaaatatgcagatattataatccctcgtggtggggataatcatgtagctattgacttaattgtgcaacatatttgcaccaagctgggtcaacatgatctctgtaaaatatatcctaatctctacgttatacactcgacatttcaggtaattgatatatcaatctcatctacatacgagtaacattctcttaactaccaaacaagatccagaaaattgatttctcttgcagataagagggatgcacacccttatacgagattctcagacaaccaaacatgattttgtcttctattctgatcgattgattaggctggtaggattattaaagctcatttaaatggctgaccaaattctcctatcacgtctcatttctgttgtctgagtttttttcttatatttatcaggttgtagaacatggtcttggacatctgccttttactgaaaagcaagtgattactccaaccggtaagcttggtgatttttgtttttgcagtgttgttcgtgaattcacaagattattatgtatatatttagaggttaaactcgtgactaataggtcatagatatcccggttacctgtctcaggatgtgtgtattctggtgtggatttctgtaaacggttatgtggtgtctcggtgattaggaggtactttcctatatcttagctttagtttatacaataggaacttccccatcctttcatatcccactctctcaccaacttgatggtgttttgaaataatgctagtggtgagagcatggagaatgcgttacgagcatgttgcaaaggtatcaagatcgggaagatcctaattcacagagaaggtgacaatggtcaacaggtaaacgagtcactcctatttcattccaggtgttctgtttcatcactgttgatgtctgtatcactgtgcagcttgtttatgagaaattgccaaatgatatctcagagaggcatgtcctattgttggatcctattctcgggacaggtaattaacccgtctttcttcatcactttttactgaaaacattttatttcatatttctctttgctgtaatacacatttgttagccaattcaacacacttgaagtgcctagtgacactgaaattatacatcttgtcaggaaactcagcggttgaagctatcaacctccttataagcaagggcgtacctgagggaaacatcatatttctaaaccttatctcagtaagctaacacacaccctttgcgtatcatttatacaccccttgtgattactccttatccatgtttatccacaagaatgcagctggattgagatattttttttctttgttcaatcaggcacctcaaggtgttcatgtggtctgcaaaaaattcccaagaataaagatagtgacatctgaaatcgataatgggttaaacgaagagtttcgtgttattcctggtatgggggagtttggggacagatattttggcacagacgatgactaggccactgtgttcctgcagcattagttgtcccatccatgtcctgcatagcagtttactgatgcattcaccatcctattctctacaacggctacacaaactatcaaaggaatcacctttaactttgttggttttcccatttaaaccccctcaaggtgttgggaacagttttgtttacttataaatgcccaagtgaggggttgatcgatcccgggacttgggattcggtgtaccatatataattacccttggaactcttgataattcatctacaactcttgtgtaccatatataaatatccttggaacccttgatactccataagcataatacatttggcttcgaaaggaacatgtgggccaatggttgcaccacctctgttgtcatctcatgaattcaggttcggacctggtctctctctctcccaagtgggaggtatatgaacggcccaattatgacaaaaggaaagaaaattatatttggcttcaatgtccaatatatctaagtttggtggtgacttatgttggttgaagtgtgagagaggtattatagaaaatactctgctcgttctcctccacatatccaagactttggagataatgctggtatccttggctagcatttggtagtgtcgaagcaatcattcctcgggctctcctttctaactgcattcctagaaaatattaccctaaaggcctttgtcttggcatcctcgtcctcttcagcaggaactcatctgtcttggaagaattattaccatg

SEQ ID NO: 6720 - DNA, 3000 bp, Unknown
  misc_feature (1)..( 3000): cDNA_ID_3091954_gDNA_ID_1621102_Annot_ID_171468 3000 nt of promoter + ATG
ctgaccagatagatgattcgaataatgagagatatgatcttggggtccattcctgaataaaaactccaagagttgatgtgagacattagttgagtgatgcttgatatgagccttgactctggctttcgtccctcctctgcgtcaacgaggtcgtgtatttgattaatgagtgatgccatctccgaatcctccgaatcctttatttccttgaggatacgagatattttataagtgactgacgtgagcctccattgtgactccgtgggatccaagtctgtagagctggtgatagagataattcgagtcacgagtgataccaactgtgactctggtccagaaacaaccttgctgagagagattatttgcctaacgagtgatgtgatcttcggctcctgcttcggctctgaattcgaatccatatccagtgattcgatgagaggaataagttgattagcgtatgctatgaaatctcttgccacctcttgacacatatcctcacctcttaatgtagatatcattttagaaatgatatagaacatgagctccgactcccaattcatatcatctgtatagccgtagataagatcatctttttcttcttcttcggtggtgagaggcggcacttgttggttattgatgagcttctgttcctccgtctggacgagactggccacctcagaaaggagtgaaaagagctccgattcctcgtccattgccatgatgagagcgaatatttgagaagtgagtgacatgagctccggctctgactccttgagatcaaaatctatagagccgatgatagagatcattttagtcaccactgataccgactgcgactctggtcctggttctgaaacagagttgctgacataaattatctgcttaattagtgatttgagcttcgactccggctccggctgcgaatccaaatccagagagttgaccagagagattagttgacaagtaagtgctatcaactttgacttcagctgtggtgtatgtgtgtcttccccaccgcctaagatagataacagttgagaaataagagatatcatgagctccgactcggaatccatagagaaagggattgtttgaatattgatgagtggtatgagagatgattattttgagtataagaaacttactgctctctgtatgtatatatagaactcgtagcttgtcggatcacgtgacaaaacctcaaagctgtccgaatactaagtcaagccatcaatttatagagagataataatatctcaattatataacgactagaaatttagcatcagatgtgaggcaaggtgggcctatcttatttcatattttattcgaaaacaggattgccttattaatgatcgtgtactgtttttagttttggtcaaatcatttaaacgataaactctgaattttgatagcgtcatgaacgttaaacttagggttttccacatagtgtgacataggtctatttttttaccgaacgtagcttgcgggtctttctttattatacataactggaaataattgaagcagtacggcattacaatttagtcacgtcgttcgaacgaaaagtcaatgatcgatttttagagataaagatcctctaattaacaatttatatttttcgagtttctagactacattaattaagctcatacgtatattaccgttaggtcggcctgtgcacctttcacatttttattgaagaagttatgattaacgaaatggtaatatatatcattaacaaaggataatactaatatgtttgatcaagcagttacagtgaaccagcggtaaagtagagaaatcgtcaaacaaacacttttgcatgtcgatttctgctagtgatattaaagatcatggaatctgattatgtggtaaagaaacagctcaacaaaggtttgaaataattagttaacagtagacattgacttcatctaacgaaagaccaaatcaaaaccactttcaacaaccacaatgtgtagaattacagcagtttcgtgactaatacgcgacaagtgttaattttaaaacggttctttagtaaacattaaacaataatcttccaagtggaggaatacttgatatttgttcaatcgcatatatcaacttttgagttctataatattgttcccgtagcttgtggattttgtcttggtgtaatgcttaatttgagatgattactaaaaccaaaagcatgagatcatcttaaagtttacaggcgagcgcaaagtcaatgaaggatttaaagattagaaacctaaacgatgttaaaaggtcatgacaatttatattcgagttatttaggtcggtttatgggaaaaaagctgaaaaatctccatttaattttaatttgcctatttaatatccgtgctactaaatttgtccaaaatacctaaattagtttttatgtcttttaaatatttttattttttattttttttgacaaaatcagacatccgaattaacgagcgttaacagtggtaacaaaatcgttatttgcagttaaaacttaatcatgtgatgtttattagttatatacaattgttttttctaatgcatacgaatatatcgttttagtcaagtagttatatgagagtttattatcttcatgaacacgagtacgagtcccatatccgatgtttttttgttgcacttgatacttgtcttgaaagaaaactgtcacagaatcacaatctacgaaattccgagagaaatatctaagtgcaccacttagaaacgtagtggcctattagctcagttggttagagcgtcgtgctaataacgcgaaggtcacaggttcgatccctgtataggccacattttttggctttcattttgatcagactaaaacgttgtcgtgtgtttcagcttctttttttttttttttttttttttaatccttttttccggagatattttgttttttttttcaattttacggatatcgttatctgcttctcacactaacacggcgaagcagaaaaagagctcgaaacaaaa

SEQ ID NO: 6721 - DNA, 3000 bp, Unknown
  misc_feature (1)..( 3000): cDNA_ID_1815332_gDNA_ID_1621102_Annot_ID_171467 3000 nt of promoter + ATG
attttcgattctttttcatcatggcgcacaagctcatcttcttcttcttttgtttctgttttaactgggggtcctccaaagctcatgtggttgtattccaacaaagaactcttgtcaaactcgtatccaggctctgtacaaaccgaacaatatgcattgaagttatatcacaagcagttaaatcacgaagaatcaagcaaatgatccacagaagttacaatgagattcctacattcatgactgtgttgcagatggaaacagaacatgataacaaaaaatacgtttggttgatacttacctcttcttgcgtttattctcttctcaaagagacgaattgggtcagagccttctaagcatgcggcataaagtattacactgtcaatatcatccagcaacatgatcagagagggtagatacatcattcatattgataggagataatcatatcaaagttcaattttttggctgaaatcaagtaaaaagagagaactaatggcttaatacttctaccctcgagaaaaattgactgttgagtgaggcaaggttctgggtttagggttttaggttaaaccttaaaacccagacaatggaacactaagttgagacttattcttgtcacaccaagccgcatagatgactgaatcgtttccaattctagtaaaggcgaattttcatttgcagctaaaatttccaatttttttcaaatcaacgaaacgattacgatttcagaaacgcttaaagtgagaaaacgaagcttacagagcgagctcgcgtgcggctcgaggactgcttaatcggccgctcttatcaatcttcggcatcgggacatctttcacctcctccgcggaaatagtcggcgtacggagagcgcttctagtcggagagagaaatagccgtagtgaagacgatgacgaacgtttatttcccgttcgcagggaaaccaagttcgttggccggagcgaatcaaccaatgtaaatcctatagaacggtgagaatctggtgaaacattactggagaagtaacagaggttcgaagaagaacgtaagcaaagcggcgagaaggttccctccatttttgtttcgagctctttttctgcttcgccgtgttagtgtgagaagcagataacgatatccgtaaaattgaaaaaaaaaacaaaatatctccggaaaaaaggattaaaaaaaaaaaaaaaaaaaaaaagaagctgaaacacacgacaacgttttagtctgatcaaaatgaaagccaaaaaatgtggcctatacagggatcgaacctgtgaccttcgcgttattagcacgacgctctaaccaactgagctaataggccactacgtttctaagtggtgcacttagatatttctctcggaatttcgtagattgtgattctgtgacagttttctttcaagacaagtatcaagtgcaacaaaaaaacatcggatatgggactcgtactcgtgttcatgaagataataaactctcatataactacttgactaaaacgatatattcgtatgcattagaaaaaacaattgtatataactaataaacatcacatgattaagttttaactgcaaataacgattttgttaccactgttaacgctcgttaattcggatgtctgattttgtcaaaaaaaataaaaaataaaaatatttaaaagacataaaaactaatttaggtattttggacaaatttagtagcacggatattaaataggcaaattaaaattaaatggagatttttcagcttttttcccataaaccgacctaaataactcgaatataaattgtcatgaccttttaacatcgtttaggtttctaatctttaaatccttcattgactttgcgctcgcctgtaaactttaagatgatctcatgcttttggttttagtaatcatctcaaattaagcattacaccaagacaaaatccacaagctacgggaacaatattatagaactcaaaagttgatatatgcgattgaacaaatatcaagtattcctccacttggaagattattgtttaatgtttactaaagaaccgttttaaaattaacacttgtcgcgtattagtcacgaaactgctgtaattctacacattgtggttgttgaaagtggttttgatttggtctttcgttagatgaagtcaatgtctactgttaactaattatttcaaacctttgttgagctgtttctttaccacataatcagattccatgatctttaatatcactagcagaaatcgacatgcaaaagtgtttgtttgacgatttctctactttaccgctggttcactgtaactgcttgatcaaacatattagtattatcctttgttaatgatatatattaccatttcgttaatcataacttcttcaataaaaatgtgaaaggtgcacaggccgacctaacggtaatatacgtatgagcttaattaatgtagtctagaaactcgaaaaatataaattgttaattagaggatctttatctctaaaaatcgatcattgacttttcgttcgaacgacgtgactaaattgtaatgccgtactgcttcaattatttccagttatgtataataaagaaagacccgcaagctacgttcggtaaaaaaatagacctatgtcacactatgtggaaaaccctaagtttaacgttcatgacgctatcaaaattcagagtttatcgtttaaatgatttgaccaaaactaaaaacagtacacgatcattaataaggcaatcctgttttcgaataaaatatgaaataagataggcccaccttgcctcacatctgatgctaaatttctagtcgttatataattgagatattattatctctctataaattgatggcttgacttagtattcggacagctttgaggttttgtcacgtgatccgacaagctacgagttctatatatacatacagagagcagtaagtttcttatactcaaaataatcatctctcataccactcatcaatattcaaacaatccctttctctatg

SEQ ID NO: 6722 - DNA, 3000 bp, Unknown
  misc_feature (1)..( 3000): cDNA_ID_2176318_gDNA_ID_1621102_Annot_ID_171460 3000 nt of promoter + ATG
caagtttcagctttaacttgggctcaagctgaaacgtgattaggtgttacatatatgacacagagcagttaacatggaactaaaatcttaaaaaattattgtaattaaaatggaaacagagcagttttttttatatgcaataagtcttttgatggagatacaagagtgattaataccttataacaatgaagataaaagagtgcttaatacctgatttactaatatacatgcaataagtgacacccatcagactttttatttcgccgtttagacagtaagagagatcgaaacatcgaaacatggacttgtctatgtctctctgtttttatgggttgatcacacaaaatgatcaatataataaatcttctgtagtagaaatctcttgctcttgctctctctctctctcgttcttgattatcgtttaccctcaacacaatgaaaatgtatatcggcagaaaaactacaagagatttacacagcttggttagataaaatttctccttaactctctaacaaacaaaaaagtttcaatttgttttctccaattgtgttaattaatcagttccacaaaaatcaccaacagtttaactatttttagaaatagagttttgtgcaaaacaaccttcaactttataaacgttttcaaattattttttatttttatttttttggtaaaagtagacagtgctgtgcccaatgacgtaaatgttgaagttacaaaaatagatgattttgaagatatttttacacaaaacccttagaaatatacattatactttcttttctctaaacagacacctataagatatgaaataccatttatttgtgtttagtcttcttatgtatatggtaagctatatctttcatatagtctaatcagtgcatgtccatcaataataccatgcatgagccttcctccaactattcacaacaggagctgaatattaaactggcaaattgatgttctaccatatatacctattatatcacaaccagcatagtctatagtggttttactatagctaatgtaattagtactaattaaagctagttgttagaaaaacatgagcaaaaaatctaatttgcaaactatatttagtatataagtgattaagttacaataatcaattaatagaaatacttttttcaataatattccaaccacagaaaaaaccaatttctatcattttggcagataaacttggtttcgctagtttgttaaacgaactagcagtatagcttatttgtttttgtttatatatagaagaaactcaagccagttgggttacctatcttgtttatgaattttcgttaatgtttgcaatatttctgattttttgtgaaagactaaattgtagaattgtatccacattttattctttccgttcatgtcgtagatttttagtttatgtttcggtcaacaagtcgtggagttaaaatatactatacaataaactgaaagttcaaatggaatggggttcaccaactttttaatttacttattcttgtggtcactttctttcaaaatgtactaaataattttatatattctcataatgtctaaatataaacaataaatatgaatatgaaaataaacataaatatgaaaataatttttcttttataaaagaattaataaactaacgataagtgattataaaaaatatatgtctttggaaaccaaacaaaatagtttaggcttcaatcccattaaattctcatctaaaattgatgcatgtagcatgtagatatgatcatgacaaaacgatgatttacaaatttttatttttcatttgttcgtcataaatatttgatcgtttatgataatattattattagacatgactgattgttattgcacaaataatttacattgtatatagaatttgcatcgcatttttatttgcgtatcaatggctgacactgagatttatgaggccacaaacaatttcggttttgggggcttcatgatctatatataaattttttttaccgtttgggcctcaaaagctatacatactacttgttaaaatttgggatccaacaccgatgttccactaggatatgatcagttacggattatttattgtaactcttgacaatattgcacaaaaaatttcttgattgtaaacattcgggttgcaacgtcagaccatctcactttctatcctcaaaataaaacatttccaacatgccatttttaaaattctaatctcataagcatgatattatttggacatgaagtgtatacagttatagtgtacaagcaggagagtagaagtcacgcgtcttacagatgaacttagtgctagtttaccaaagaagctgacgtggcgttttcatgctttccgtctttgtgctaataatatatggtagaaaaaacttttgagacgcaaataaaaatgcgaaaaccccaaaatcgtaatcagcagcgatcgagattttcgccgctgaaatctggagactgattattacaaacttgttcgtcgtgttcttcatcggagagacactagatcggaaaatttaacctcgatttgattgccgttgccgtaacatttgactgttgttttgtggtggggaattctagggttcttgtttgatgaagaagaactgaagtgaaaatgaccattaaaatctcccatgagatgattgtgtccgttcattcttcgaaatcggacaacggaatcgaatgatcgtcatattctgtaagagagaaggttagatcttcaccgaatctggaactcgagatccatcgttttgttcgattttctattctttcgcacaaggattggtctgagaagaacaagttcaagttagaagctgttgtgttctgtccggtgaaacttatttgagctgctgcaaaaacttcaaaagttgttactttttctgaaataacttaagcttcttggtattttgagactaaatggtttcactactcttgtgaattcctggaaatcagaactgttattagttttttttgtatatttagggacaaagatg

SEQ ID NO: 6723 - DNA, 3000 bp, Unknown
  misc_feature (1)..( 3000): cDNA_ID_1378577_gDNA_ID_1621102_Annot_ID_171459 3000 nt of promoter + ATG
acaatcagctgcctccgcctctgcctcctccaccggtgcagcgtagaagcagtggcggtgacgttttcatggaggcaggtcgtctagcaacagagtacttggtttctcaaggtgttctaccacaaactgtgctttccagtaaatggcagaatggtaattttaggaagcaagctggagagtttcagagttccaggtctcaagaagaagcccgaatggatgtttcagctccagctgcagagaaaaggaggtatattgatggctatagctcagctggatccaggaatagcttgaaaggaaggagatcccaccgttatgactcggattttgggaggagcggatcttggtcagagagaagtaaagcttttgagactgagactggtgacgactctgtgtctgggcatcaagaagagcagccgcttgctgaagatattgctagctcggttcagcggtcagcctctggtgaatttatgagaaaatgtgaaggagcaggtgattccgagtctgtgttggacaagtacaatctccaggatgaggcacagtctaagacaggttcctcgagtgccgggaaagatatagtacaggattgtgaaatctctaaagtatccgaaggctcttctagcttgagtgctggatcaggagagatgaaaggtaggtctggtggtaatggtggagaggatgagaaccagactgctatcgaagatggatctatccatcaacgttgtgaagatgcatctattgatcaacagtgtggggctgatgaatcattcaccaagagtggtattgatttggcaacgctgtgtaaatttgagaaggtgcctacgaggacacgctcttctctgactgcaaaaggcccaaagctttatttgagtcataatatcaaggatacctctcataattctggacttgaagaagaagatcaaaccgaaaatcgatgtgagactcgaggccaatcatctggaaaggccgatagtactggtgatgaaaatgaccaagttgaagattttgctcttgttcaatatattgagaacagtaaatgtcataggtctaattcttttcccagtagcattctcagggataacagtgagaaagaatcaggattagaattgcctaatctgcacagatcacattcggtggggaaagtaggtgagaaaaggcctggtgaaggcagtgacttggaggagggatcaaaaagacagagagattgggtggcagtttctgaagctaatgaacgcttcaacatgtttaaaacaagcggaaaccaatgcgatccggaagaagaaggaaagacaagctcgttcaacaaaagactgattgacggtgctgctggaaaaagggtcagccatgaaagtctggttaataactctacatacaataggacacacactggcagaacaggtccagggtatgctgaagaacatcagctgtttcctgcttcgtttaagatgtgtgacctaaatctagggggagcgtcggatgtgaatgatgggataaaggaatctcgtcaagctgttgattttgatctctcaatcagcagttctagtaagtctctcgagtttggtacgagtactcggatgagcaatggtaaagagatagaagtgattaatttggatgatgatcaagaagtggtaaagtccagcaatgatccaggaagaaagtacggccaagtcctactcttaacacttatatatacacacacctattacattttggctaatgggttttcatatctaacaggcaagaagctgctccatatatgggcatcgatgacgtcccagactacaatgaaagactcatgatggtagagtatcttgattcctttactccaataaaccagggaaccagtagtgtcccacagaataacaacacagttagccttcaagaccgagaggtacctactctacttgtcaagttttatgtcacatagaatgtttgttgttgctaacagatcctgaaaacgtctcagggagctattggaaatgaccaagtaccaaataatacagacgatgattcgatcttcatgtcactcggagaaataccattgagtaagaccaatatcaaattctttctcttttctattttagcttcttaaagagctgagattcattatgtctttgcaattgtgcagcattcttgcaagcttgggaccaacctccagctcgaggctacgagaagcctttctgattctctttttttttgttatgtttcttcagtctgtgtaatgagtgtgtagtagcccaatttcgtttgtgctaatctcaatcctctcagatgatgtaagaatgtgacttgtggtgttttatggttgtatgtaccctttgtaattctctgtttattctcacactgtccccatgttttaggtcagttcaacaattttctgaaattgtaataaccaaaatgataattattaacggtatatatatgtcgtgtccaatctcacggtcaaaaatgaagaaggtgatgctgagaggtcaggcgattccgacacgtgttatattccaaccacccacacgtaattttcaaaaaggaacaaaattgatcatgagggaaaaaagaataaactttttcccacaaagaaactttccacattgaacgagagaattatagatctgcgaatccgatcattggattagggttttcacttttcaccctcctttttccatctctctgctgtatacccttcctttctccaaaaagaccaaaactttgcgattcaattcgaaatctgtgttcttccattgagctggattttcatttttggaatcatttcttctcttctttgatccgatagatggtggcatggtaggaaattttagacctttatatttctatttaaccgtcaaggaaccaatgaatttgtatagcttgttgagttgactttttgattgtgtatgatcgaatttgggatcctcatttcgggttttgggttattgatctgagctcctgttacttctgaaaccgatgtgaatttggtgggggatagatttttttgtggagtcaatg

SEQ ID NO: 6724 - DNA, 3000 bp, Unknown
  misc_feature (1)..( 3000): cDNA_ID_1815368_gDNA_ID_1621102_Annot_ID_171455 3000 nt of promoter + ATG
tttctataccgaattaaaggtaataatttgaagtttcaaatacgatatttaagatcctaattatgagtagaattgaatgtgaaacggttttattagtacaagaaaagggtatatgaaagggttaagcaattaggttcgaaatataaacacgcacagaactcgaagagccgaatttaacaatgaacccaaaattaaacgacactgaagcaacctttgtgttgtgactctatatgagtgtatatatatatggtttatagaatacaaagtcttcagatatgtaatggagatttcagaaaaatggataagacactatagtagcacacacaaaatccttctagttggagaaggaaacttctcattctcactatgtctagcttcagcttttggctcggccatgaacataactgcgacctctctcgattctgaaggtatgtaaaacccattttatatgaacatttataatatacatctatcgatcactagtcgtaactaatgtattgacttaaatcaataaaattttacatgtagatgaactgagcataaaatatatggatgcggtggataacataaacatattgaagagatacgggtgtgatattcagcacgaggttgacgtgcacacaatgagcttcgataatagtttgagtctgcaacgttatgaccgcattgtcttcaattttcctcacgcagggtctcgtttctttggtcgtgaattgtcctctagggccatcgagtaacgaaatatattctttcattttcttactataatatatagtttatgatttggactgatgtaatgataaaatgctgtgttttggatcaggagccacaaagagttagtgagaggatttcttgagaacgctaaggagatgttggaagaggacggagagatccatattacacacaagacaacgtatccatttagcgattgggggataaagaagctgggtaaaggagaaggtttgaagctgcttaagaaatcgaagttcgagctgagtcattatccgggttatatcaccaagagagggagtggtggacgtaggagtgatgattatttccctgttggtgaatgttctacttacatgtttacccaatcctaactttgggaaatcttgcttaatttttttttggtattatgataactaaaaaaaagaattgggcattacaacatcaacaaggtaacaataatttggtccgactggacacgttcattcagttccttctgaaaactcaaaagcaattggtatataaaaagatcaaaaagttatatgaactatgtactttgaaaaagaaaaaaaagaagaagttatatgaactatgttaataataaagatctttaaactttttaatctcatttttgtttataatacatcgatttttattgagcttatacaagttcccgtaactgactttatatatagtttcatgtattaatttatacataattggccaataagtaggccttttttttgttgttttctcatgtaagtataattaagtgtgtaatcatatgaatctctataatctatatgcatacatacatgtatatagaatatatctatttttcgccaacaagaaaaaggacgaggaaactaaattggttgagattaacactttagtttattggttggtccaagagttggtagatttctttgtcgtttctctatagttggaacatgcatttatgtgaacttcgattatgacgatatgcatccatactacatgtaaaatttattgttgttttccgccaacaaaagaaaaacgaaaaagctaattaaattacgtacgagtaaattgaacacttggagaatcacatggatcctggagctctgctcatgcttaggagtgctcgaggccttagatctttcctatatgtagacgttgatccttgtgatctaaaaggtttcgaggtcttggaaatctatcacccgtccatgtctgatggctttgtgaactcggtaatggtcgcacgcaaactcactgatcgattaattaagtacgagtggtgtactggaactcgatcactaaattcattaaaaaaaacaaggcaagtgatgattccctaagaaattaggtcaagattggagccatacttgtggaacaaggcagatgatgatttccctaatgaggctctctgactctcccttactagttcaatattagttctgtcttttgtcaacgtgttgacgaaatcaaatctatattattagttgttgttttctctctatgcttattgtgattatgatgtcactagatcaaatactcggtttgaatgtttccttataaatgtatcagcatgaccatttttctcatattttacgaaatatttagcctgacaagcattaagcagttctgttaaacataaaacatacaatatccatgaaagaaaatcctcaatgtacatgagtcattaccaaatgcaagccatttgatcagaagtaagctgtggctgaaacacaatgtacagatgagtcatctttttgtttgtttgcttgaatagaaacgcagcgtttttgactaatcgagtaaccaattttttttttacaagaccgaaccggatcaattcaacaaacgtgaaataaatcgaagcgggccaggtcaagtaggtagccctctcaatgattaagagggaaccagctgtatccagagaccctctgagtcagtaagaagcttctaagagggacaggaaacggtaaaaaaaacacgagttatgtccggtaatatcaaaatggcaaaaatcattcatttcaagaaagaaaagagtagagagagtctcacacagctataaaggcccaaaaacaccaatccaccgacgagtattgtagatttagaggtctacaactaaaagcctttgtgtgtgccagattagctccctactaatccgccgccgcacctcctcgatctccgcccagctcccttcttttctatctatctattcagttgtttctccggtaacaaccagctgaggaagaagaagaagtagtagccgtgatgatgatg

SEQ ID NO: 6725 - DNA, 3000 bp, Unknown; identical to SEQ ID NO: 6716
  misc_feature (1)..( 3000): cDNA_ID_3048845_gDNA_ID_1621102_Annot_ID_171445 3000 nt of promoter + ATG

SEQ ID NO: 6726 - DNA, 3000 bp, Unknown
  misc_feature (1)..( 3000): cDNA_ID_1388618_gDNA_ID_1621102_Annot_ID_55902 3000 nt of promoter + ATG
ggaatgtaccaaaatccaaaaattagatgtaaaatcaattgtggggttgattatgaataattagaaagtatacgactcttttcataaataaggaaaagaaaaagatatctagattttttttgttttgttttgaagcatcgtcttcctggttcttcgttctcttgcgttcgtcacctcaaacacgtccgccattattatatatcaaatcaatcatgtccgaatccagcttttaccaatgtaagcaattaaattaaattaaataaaaacacttttatcaaatttaatcaaattaaaaaactgtccctttcttatctgagattctattgtttctgtctacttccacagaaagaaactgcatctccgtttttttttctgatttgaggctttccttagatccttgagagcaaaactgaatctgggtaattttaaaaatctcatttttacgacttatctcttttgaacgatctgttttttcatgtaagtacgatttcacctcgagatgatcgatcattgctcttctggttcttccatgtttgattaaatgttataacttgagggttttgtttcttttggattgttctcgcatttgttgatctatggttatcaaaagagtttggatttacagtttttggttgcagctgaaatttttcactcttttcttctctgttttgctggataaagttggatttgattcacattgttgtttagaatctagatgaagttgtaagattccttgtattgtgtttgcttatgcatgattgtgataaagatttaagttattttaccaatgtacaatgtccagaattgtcgtcgggatgggttctaagtccgttgttgacatgatcgaagctgcctcgcgggcacatttttctggtttacacgtgaatgggcacatgaatgggttggaaccaagtgcacttaaggaaaccacttctgcatcagaagatatccaaagacagccttttgtaataggtgagttctgcttttgctttcatttttgattaatatatggtcgtggataaaaaaagcttgacgaatggtcttgattgatatgttgtgacttgaattggttaggtgttgctggaggcgcacatcgggaaagactactgtttgtgatatgataatccagcaactgcacgatcagcgtgttgtacttattaacctggtaattttgttttgctaataaagtttcatagagctaagtgataaccaccggtttgatttgtgtttcgaatgtatatgaagtcaattgaattccacacaatttagagatctaaaaggagaatattaccagctaataacttatatatggctgaagtttaacattgttcaaccttgtcaccattgtttagatatttatgtcagtctatttatctaattctcaaattcctttggcatcatgataaaccacaaattgctcgacttaatatcctatgataatgatttttggcaggactcgttctatcataatctgactgaagaagaacttgctagagttcatgaatacaactttgatcatccaggtgagaatatatttggagtgtaattgctttctgtaatctactcttgtcaatacatagtgtcatcaggagtaaaaaatctttcctagcttctttggccattttttttttttttataatacttctttgggataattaaggcataactaacagccatattattcagtgatatcttactaattgatgtattctcttttattaaagcaatttcatccctgacagcacattactagttgctgggagttatgagaaaaagtcttgtgcattactctttgtcatccaccgttaatttctttttatccaggattctaatgaattgttgttgtttctgtagacgcatttgacacagagcatttattgtcttgtatggagaaattgaggcaagggcaagctgtagatattccaaaatatgattttaaaacttacaggagcagtgttttcagaagggtaccaccttccctctcagcatcactcattatcatattgttacttgatgtttataaatttgagattcctttttcattttctcactgcctctttctgtaacaatagcaatttcttagatgtcaccactggcttttatctggttggggatttaaggggagatcaatttaatcttatttgatgctaggattttgaaaaacattctgcaggtaaatcctacagatgtaataattcttgaagggatacttttgttccatgatccacgcgtccgaaagttgatgaacatgaagatttttgtttgcacaggtaatttgttgcctcttcccgttataattattgtaaactcttgtttcgactacattccatttcccttttgtagattcacttggctttttttttctacaaaatttcacatgatggaacaacttcttatgctttaagattttgctgtttcacattgcttattttgttttctgcgtagatgctgacgttcgtttggcaagaaggataaaaagagatactgtcgagaatggtagagatatcggcacagtacttgaccaggttagcccgtcttagtattgttactgtatatattatcatcaagaacaacaagaaatggtttacctcttgcattttaaatattacattgctctgatctgtatgtttttttctcatattagttcggcgttttcaaatctatatgtttctacccatattttatatgatgtcaaccttttgatgcagtactcaaagtttgtgaagcctgcttttgatgacttcattcttccaacgaagaaatatgcagatattataatccctcgtggtggggataatcatgtagctattgacttaattgtgcaacatatttgcaccaagctgggtcaacatgatctctgtaaaatatatcctaatctctacgttatacactcgacatttcaggtaattgatatatcaatctcatctacatacgagtaacattctcttaactaccaaacaagatccagaaaattgatttctcttgcagataagagggatg

SEQ ID NO: 6727 - DNA, 3000 bp, Unknown
  misc_feature (1)..( 3000): cDNA_ID_1815372_gDNA_ID_1621102_Annot_ID_55904 3000 nt of promoter + ATG
gaacgtgtccagtcggaccaaattattgttaccttgttgatgttgtaatgcccaattcttttttttagttatcataataccaaaaaaaaattaagcaagatttcccaaagttaggattgggtaaacatgtaagtagaacattcaccaacagggaaataatcatcactcctacgtccaccactccctctcttggtgatataacccggataatgactcagctcgaacttcgatttcttaagcagcttcaaaccttctcctttacccagcttctttatcccccaatcgctaaatggatacgttgtcttgtgtgtaatatggatctctccgtcctcttccaacatctccttagcgttctcaagaaatcctctcactaactctttgtggctcctgatccaaaacacagcattttatcattacatcagtccaaatcataaactatatattatagtaagaaaatgaaagaatatatttcgttactcgatggccctagaggacaattcacgaccaaagaaacgagaccctgcgtgaggaaaattgaagacaatgcggtcataacgttgcagactcaaactattatcgaagctcattgtgtgcacgtcaacctcgtgctgaatatcacacccgtatctcttcaatatgtttatgttatccaccgcatccatatattttatgctcagttcatctacatgtaaaattttattgatttaagtcaatacattagttacgactagtgatcgatagatgtatattataaatgttcatataaaatgggttttacataccttcagaatcgagagaggtcgcagttatgttcatggccgagccaaaagctgaagctagacatagtgagaatgagaagtttccttctccaactagaaggattttgtgtgtgctactatagtgtcttatccatttttctgaaatctccattacatatctgaagactttgtattctataaaccatatatatatacactcatatagagtcacaacacaaaggttgcttcagtgtcgtttaattttgggttcattgttaaattcggctcttcgagttctgtgcgtgtttatatttcgaacctaattgcttaaccctttcatatacccttttcttgtactaataaaaccgtttcacattcaattctactcataattaggatcttaaatatcgtatttgaaacttcaaattattacctttaattcggtatagaaaactagtttactcactgtaaaataaaatatcttggtcattctatggttaaaccaaattattgccaatattaaaacacgtgaggttttatcaagatattagtatattactgattaaatatgaagttttgttgttattctcatatttgtttcaggttagctcttatgcttatctctaactttcttctctttgtttagaatcgttttcacttaaacttttccttcatacttttatgcaatcttactacaactcttacactcatacttatagtagactttcatctactacacacacttgcacacatactttcattttacctccagacactagactgactcacctacacaagcagcactacttatgcgtagactccaacaactcttaattagctaactctttaccaaagcaaaatacagcattttgcttattatttgggcctgaccaagttaatgccccaataaaacttcttaacccaaaagcaaaacaatcttcttgttaactttttttgtgcttcatctgctcattcttgtctgtctcaattgtaggatcaatcaaaggtagtcaactttcaacaagtttttcagttgtaataagagtctctttcgcagttatcgttgtatttatttgtgaacaaaacctaacttactgccattactcttaataaaatccaggagtttggaattatcaaattactatggaaagcatgatcattgttaaaagacaaaaatggaattattataactttttcataggtaaaaagctttttcttagtgctgaagtgttttatggatccgcaactaaccacacattacaactaccacaaaaagtgagaagaaaaaagaagcacaattacccaaggaacaaactcattttgattatcttcacaaccaaagataaagcccaaaaatgttttttcaaaccttagacaaaacctaaaagcaacttaaagaataattttgtattcatttacttttttttatttttttatttttttcttttctactcacaatagtttttcaatcgaaaataaaataaaattaggttaatcaaaaaattttttttatctaacatcgttgttttatcatactagacataaaatagacaggaaaaaaaacacattgttttatcatagtgttttatcatgcatgatgcttctaacgatattgtttagataggcattaactagaatttttaatgaaattttttattcttaaaatgtcaaataagtcctatattgaaatattttttaatggtatactaatttttatatccttttcctaaaatacataagacttttaagtttgttcaattaacaagtatctgtcccctgtaatcaatcaaaaccttttatctcagatttaattaggaaaagccacttgttaagaagaaggaatattaaacgaaaacgcatgtagttttcaaactttaatccaccgagatttgctttactagttcttcaaaacgacacgcatggtcccactcattacaaaaaccaaaccccattatgcaaaagctctcttcttttgcccaaactctcgctttcccttttttacacacaacaaaaaacaaaagttctgttattttcctatttaatccataaccattacacatttccaattttcctttcattgatcacataactcatgccaaatctacctcatcttcctcctccaccgcagttgcaaccgcccgaaacgccatcatgggaaacaccatcgtctgtatggtatactccaagaaccacaccatggagaacaccacagagcacacaatccacaccagttggccaaatg

SEQ ID NO: 6728 - DNA, 3000 bp, Unknown
  misc_feature (1)..( 3000): cDNA_ID_1815368_gDNA_ID_1621102_Annot_ID_55905 3000 nt of promoter + ATG
tagtacaaactccgatctcggttcttggatagagttcactaggtctttttcttttatacaagttgtgggtaagcaaatagaaatatagttgaataaacatgccaaagctaaagactttgaagatgactactgactcagagaactgtaccgtattctttttcatttcttcgtcgtgcaattacgagaaatcaggattccggttggtggaccggtcatctgaagttggcacctcccgtgcagctgataagagtaatgaatcattccaaaatgagctttgactttgaaggtacctctaatctcatattctatcttgttgttttccagctgtctcctgagttccaccgcgtggtttacaggcaagcctaccaaactagagatcaaacggattggttccaacctcgtctcatgctttttctgcaagaatggctggaccacttgcgctgcaatcaatctattgaagaagaagagctcaatccgaagcttctcaaacttcacttctatcttcttattagggttagtgaaattcaccagcatggacaaatcgccgttgaaaaactccggcgtgtcgaagtagatcgtgtgtaggtttgcgtttgggatgtcgaaaacaggtattcttggtctaatcgcaagaaacactatcaaagtggcaatcgcaaaaaagataagcaaaaggctgaacacaaaacagaaaccggcaacacaccatatccagagactggtcctgctactccttggctgacggagaatcaccctatctttcctcggctctgcatcaagaccgttgaatctaaccgttgctggctttgttaagaccatttggccaactggtgtggattgtgtgctctgtggtgttctccatggtgtggttcttggagtataccatacagacgatggtgtttcccatgatggcgtttcgggcggttgcaactgcggtggaggaggaagatgaggtagatttggcatgagttatgtgatcaatgaaaggaaaattggaaatgtgtaatggttatggattaaataggaaaataacagaacttttgttttttgttgtgtgtaaaaaagggaaagcgagagtttgggcaaaagaagagagcttttgcataatggggtttggtttttgtaatgagtgggaccatgcgtgtcgttttgaagaactagtaaagcaaatctcggtggattaaagtttgaaaactacatgcgttttcgtttaatattccttcttcttaacaagtggcttttcctaattaaatctgagataaaaggttttgattgattacaggggacagatacttgttaattgaacaaacttaaaagtcttatgtattttaggaaaaggatataaaaattagtataccattaaaaaatatttcaatataggacttatttgacattttaagaataaaaaatttcattaaaaattctagttaatgcctatctaaacaatatcgttagaagcatcatgcatgataaaacactatgataaaacaatgtgttttttttcctgtctattttatgtctagtatgataaaacaacgatgttagataaaaaaaattttttgattaacctaattttattttattttcgattgaaaaactattgtgagtagaaaagaaaaaaataaaaaaataaaaaaaagtaaatgaatacaaaattattctttaagttgcttttaggttttgtctaaggtttgaaaaaacatttttgggctttatctttggttgtgaagataatcaaaatgagtttgttccttgggtaattgtgcttcttttttcttctcactttttgtggtagttgtaatgtgtggttagttgcggatccataaaacacttcagcactaagaaaaagctttttacctatgaaaaagttataataattccatttttgtcttttaacaatgatcatgctttccatagtaatttgataattccaaactcctggattttattaagagtaatggcagtaagttaggttttgttcacaaataaatacaacgataactgcgaaagagactcttattacaactgaaaaacttgttgaaagttgactacctttgattgatcctacaattgagacagacaagaatgagcagatgaagcacaaaaaaagttaacaagaagattgttttgcttttgggttaagaagttttattggggcattaacttggtcaggcccaaataataagcaaaatgctgtattttgctttggtaaagagttagctaattaagagttgttggagtctacgcataagtagtgctgcttgtgtaggtgagtcagtctagtgtctggaggtaaaatgaaagtatgtgtgcaagtgtgtgtagtagatgaaagtctactataagtatgagtgtaagagttgtagtaagattgcataaaagtatgaaggaaaagtttaagtgaaaacgattctaaacaaagagaagaaagttagagataagcataagagctaacctgaaacaaatatgagaataacaacaaaacttcatatttaatcagtaatatactaatatcttgataaaacctcacgtgttttaatattggcaataatttggtttaaccatagaatgaccaagatattttattttacagtgagtaaactagttttctataccgaattaaaggtaataatttgaagtttcaaatacgatatttaagatcctaattatgagtagaattgaatgtgaaacggttttattagtacaagaaaagggtatatgaaagggttaagcaattaggttcgaaatataaacacgcacagaactcgaagagccgaatttaacaatgaacccaaaattaaacgacactgaagcaacctttgtgttgtgactctatatgagtgtatatatatatggtttatagaatacaaagtcttcagatatgtaatggagatttcagaaaaatggataagacactatagtagcacacacaaaatccttctagttggagaaggaaacttctcattctcactatgtctagcttcagcttttggctcggcc

SEQ ID NO: 6729 - DNA, 3000 bp, Unknown; identical to SEQ ID NO: 6722
  misc_feature (1)..( 3000): cDNA_ID_1815356_gDNA_ID_1621102_Annot_ID_55908 3000 nt of promoter + ATG

SEQ ID NO: 6730 - DNA, 3000 bp, Unknown
  misc_feature (1)..( 3000): cDNA_ID_1815348_gDNA_ID_1621102_Annot_ID_55910 3000 nt of promoter + ATG
ctagcttcttccctaacacctcaaccaccgtttccaccgtggaaaacgtgttgtctccgattgcgcaacctaaatcggctattttcaggtgagaggagcaaccttcggtgagctttatggagttgatggctgtcgtcagcattggtttgctcaaggctaaacgtgccgctggaccgtaacagtttttgacgtagctcgcgtcatcctcgccaccttgcatggagagcacgtgctcgaggctccgtgacgactccatatatagttgtaaatgtgtaagaaaaggtgtgaacgttatactaagaataagtaaattaaagaaggattgatttggttttagaccttgatggctcaacgaggatcaaatgtctctatatatacactcggtaacagtgtgcagtcaaaggctagtgcgtcgtcgttttaacttcagtttaacatgtttacatgtccttcaaataacttagaatacaatttatgaaagatcctacaaaaatattataacttttgtataaaaaaaaattaccaccaaaatcctaaaattctagctggaatttccacatataacttaattagttgtttgtgtcattaatagagtttcgaaactcttcctaaaaccgaaaatagaagagaatctgttaattggtagtggtaaccattgaaacttgcacaagtgtggatcaagttggatattaagttacttgaattagtgaaactgctgagctgagattttccatattttgctgtccattggtttttaataatgttagtctccatggagaattagttaattggtatatgattatacttatatgggttatagcgtgaaaaaaagaaacatctactttaagcaacagcagaaagcattaaagaatagataaccccaatttccgagaggaacgttaggagaaagtttttgaaaatttacaaaactttctgttagtagatgcttaatttcatcagtgttttccaagcaattttgaattaaggattaataaaattgttatgtatattatgaaataatgaagatatttcgctatctctagagtctaaagagattagcagttggtgccttggtggttgacaaaagaaaagaagaagagattagcagttgcgtttaacattggttttatctagaaagatgaactgatggttacatataaaactagtcgttgtctgtcagtgtccactaaagactattttcttcttttgatatacatttctaaatatacaacaatatcatttctccgaggtttgtgaattgtttaggtataaaatagttttctacaataacttttgctatcgggtgcaaagacattctaccatagaacgagtttagtatagtgtcatttcgtagattctttattcggattggtttttcaatatcaacaaaattctggttcattttcttccctcctataaacgaaggtaaaaagaatgaagaaaaaagaaaagaaagaatattttgttaatgcattatctaacgtgttaatgtgtcactttcatttttcttaatcgtttgttgaaaactttttgcagttgatttcaggaaaacggaacacacatatatatatatatatgtcttttattttcaatacggaccaaatccatcatttgctaatcagtgagaaaactaaatcgtggtctactagtttatataaattgaaaaaagaatcataaataatatgtcacatatccaacctaaagatttatgtctatacatgtaaaaatgtaaatgagcatattcccaaatttcccacaagtatatagcactacctacactcacgcttcttcaaagtgaaggcgatggtggaaaaaagcgtagacgatgacttgataagattgactgaagaaaagaaaaaaagttatcataagtcaaaaagcatgtcgttagagtttgacgagatcccatgcatgattatattgtcggatacaattgtttgaacaatacggttggaaaaatctaccgtaatatgaagacttgaatgacataactaaagattgtaccttgcaagccagcaatgtgttaatgatatgagtaagggtgcagaggctgcggctggtggctactggctagtgataagcaatttacgatgtaatgacagatatatcataggagactaggagttatatatggtatatatagaatctaaaataacatatttatcaatttactatattaagttttatggttccaaactcaaaactaattgtttatgagtagatttggtttatatactgtatattactcatattctatttccacttttaatgtgggatttctcataaactatatacagttatatttttaattaatgaaataacaataatacagatttaaatgtagccttaactatttttatgaaatttaaatgaaatttaatttaaaagattgcattcagaatacaaaactgtaatattctgtaaaatattgataggtactacttacaacataggaaacatatttaaagatatgttatataaactaaaaatagtttaaaatatcaatatatatatatatatatatatatattacgaaaagaagaattaaaacagactacacacataataaaattttaatagtaacacttacaaacatatccaataatattaaataaaattaattcattatgatctttatgttatttctatatactcaaaccaaaaaaaaagaagtaaatgattcaaaatccaatcataattatttttcaaattcattaaaatacaagaaatttcatattaaaaaaatagatatttctttcaaagatttatattcaaattataaatatatactaaaacgctaaaaaattaagtacatgctataatcttttccattatttttctaacaaaagaaagttatatatgggctaaacttagaaggaaagcccaagaggccaagactatataaagattcatgacccgagtttaagatccgatttcagaatttgggactaaaggaggacaacgacaagcgccgggaaaaaatcgagagcgacaacaatg

SEQ ID NO: 6731 - DNA, 3000 bp, Unknown
  misc_feature (1)..( 3000): cDNA_ID_1815344_gDNA_ID_1621102_Annot_ID_55911 3000 nt of promoter + ATG
tatcaagagcaggatcgaatatcagctcgaaactgttgaagatctcaaccgtacgacctctctggagaccgatgacgcagccataaaccctagggttttgcagtaacatcgcgtcggcgttgttggagccattcccggtggcgcaagaagcggcgggaggattaagctgagttttaaccctagtgaagtgatcggatatgttaagcatcaccagaggatgtagcttgaacgtgagaccgctcgacgaagaaggcgccattgttgtcgctctcgattttttcccggcgcttgtcgttgtcctcctttagtcccaaattctgaaatcggatcttaaactcgggtcatgaatctttatatagtcttggcctcttgggctttccttctaagtttagcccatatataactttcttttgttagaaaaataatggaaaagattatagcatgtacttaattttttagcgttttagtatatatttataatttgaatataaatctttgaaagaaatatctatttttttaatatgaaatttcttgtattttaatgaatttgaaaaataattatgattggattttgaatcatttacttctttttttttggtttgagtatatagaaataacataaagatcataatgaattaattttatttaatattattggatatgtttgtaagtgttactattaaaattttattatgtgtgtagtctgttttaattcttcttttcgtaatatatatatatatatatatatatattgatattttaaactatttttagtttatataacatatctttaaatatgtttcctatgttgtaagtagtacctatcaatattttacagaatattacagttttgtattctgaatgcaatcttttaaattaaatttcatttaaatttcataaaaatagttaaggctacatttaaatctgtattattgttatttcattaattaaaaatataactgtatatagtttatgagaaatcccacattaaaagtggaaatagaatatgagtaatatacagtatataaaccaaatctactcataaacaattagttttgagtttggaaccataaaacttaatatagtaaattgataaatatgttattttagattctatatataccatatataactcctagtctcctatgatatatctgtcattacatcgtaaattgcttatcactagccagtagccaccagccgcagcctctgcacccttactcatatcattaacacattgctggcttgcaaggtacaatctttagttatgtcattcaagtcttcatattacggtagatttttccaaccgtattgttcaaacaattgtatccgacaatataatcatgcatgggatctcgtcaaactctaacgacatgctttttgacttatgataactttttttcttttcttcagtcaatcttatcaagtcatcgtctacgcttttttccaccatcgccttcactttgaagaagcgtgagtgtaggtagtgctatatacttgtgggaaatttgggaatatgctcatttacatttttacatgtatagacataaatctttaggttggatatgtgacatattatttatgattcttttttcaatttatataaactagtagaccacgatttagttttctcactgattagcaaatgatggatttggtccgtattgaaaataaaagacatatatatatatatatgtgtgttccgttttcctgaaatcaactgcaaaaagttttcaacaaacgattaagaaaaatgaaagtgacacattaacacgttagataatgcattaacaaaatattctttcttttcttttttcttcattctttttaccttcgtttataggagggaagaaaatgaaccagaattttgttgatattgaaaaaccaatccgaataaagaatctacgaaatgacactatactaaactcgttctatggtagaatgtctttgcacccgatagcaaaagttattgtagaaaactattttatacctaaacaattcacaaacctcggagaaatgatattgttgtatatttagaaatgtatatcaaaagaagaaaatagtctttagtggacactgacagacaacgactagttttatatgtaaccatcagttcatctttctagataaaaccaatgttaaacgcaactgctaatctcttcttcttttcttttgtcaaccaccaaggcaccaactgctaatctctttagactctagagatagcgaaatatcttcattatttcataatatacataacaattttattaatccttaattcaaaattgcttggaaaacactgatgaaattaagcatctactaacagaaagttttgtaaattttcaaaaactttctcctaacgttcctctcggaaattggggttatctattctttaatgctttctgctgttgcttaaagtagatgtttctttttttcacgctataacccatataagtataatcatataccaattaactaattctccatggagactaacattattaaaaaccaatggacagcaaaatatggaaaatctcagctcagcagtttcactaattcaagtaacttaatatccaacttgatccacacttgtgcaagtttcaatggttaccactaccaattaacagattctcttctattttcggttttaggaagagtttcgaaactctattaatgacacaaacaactaattaagttatatgtggaaattccagctagaattttaggattttggtggtaatttttttttatacaaaagttataatatttttgtaggatctttcataaattgtattctaagttatttgaaggacatgtaaacatgttaaactgaagttaaaacgacgacgcactagcctttgactgcacactgttaccgagtgtatatatagagacatttgatcctcgttgagccatcaaggtctaaaaccaaatcaatccttctttaatttacttattcttagtataacgttcacaccttttcttacacatttacaactatat

SEQ ID NO: 6732 - DNA, 3000 bp, Unknown; identical to SEQ ID NO: 6721
  misc_feature (1)..( 3000): cDNA_ID_1815332_gDNA_ID_1621102_Annot_ID_55915 3000 nt of promoter + ATG

SEQ ID NO: 6733 - DNA, 3000 bp, Unknown; identical to SEQ ID NO: 6720
  misc_feature (1)..( 3000): cDNA_ID_1815328_gDNA_ID_1621102_Annot_ID_55916 3000 nt of promoter + ATG

SEQ ID NO: 6734 - DNA, 3000 bp, Unknown
  misc_feature (1)..( 3000): cDNA_ID_1815437_gDNA_ID_1621103_Annot_ID_55922 3000 nt of promoter + ATG
attattcctctgagtttaccgactctaagcacagtcaagctccaaatgtcgaagagactctctcagcttatgaagaaatgggtgatgttgatcagttccattacaacgaaatgatgatcaacaacagcaactggactcttaacgacattgtgtttggttccaaatgtaagaagcaggagcatcatatttatagagaggcttcagattgtaattcttctgctgaattcttttctccatcaacaacgacgtaaattgcgtttattgtaatgtaaatcaaatttctaaggcaaaaccggaaaaaaaatgttttgttttttgttttgtcttaaatgctttgacaccaataaggcaaatagcatatatggttaaaggaatggcaatatgaaagaaaagaaaagaaaagaaaatgatttaaaagattcatcaatatcattgaagattttacacaccagaagtagcaaagccgtaacacacaaagcttttcgctacaaatgcatcatacataaatggagttttgagagtacaaggggcgatacagatgtaacgtggaatgtagaaagtgttttatatagcagaataactgaagtcaacactatcatcattggagacggaaggagaaggagaaggagactcagcagaagcagtgagtaccacaaaggcaccaaagagaatagtgataatggccgtgaagttgataagaaatgcttcggatccatacttgtcaagccctccattctccaagaaagtcagcttttccagaaaccctaaagctgcattcccgacagcaagtatgtaaacaaacaggccaagcattgcgtgccacggaagcaatccgcttttcaaatttgttgatcctcctgggaagaagaacactatgaagctgtacacccactgtaaagttcaaaactcttgttctggtcaggaacaatatacaacaataggtaaaaacatttttccatagaaattgatcaacttgttagccattttctatgaatcagccggtccaatagctttatatacagtgttttctgctgtctgtaattgttctttcagtttgatacagagaactcagaaacatttataaggttgatttagtagctgaaccaaatgaaacacttatcaaaaggattcctatgtaaactgattacatgtataatgggaaaatgtttgtctaaggagcaaaacgctatggaatttacctggaagccataaagagaaatgactccaataccaatccaggaatggagactgtagagattagggatatggctttcattgtggttcttaaaggctgcacagatgccaaatatcccaagagccagagcaatggcatggagtataaggtggatcaacttcttcactggtttctccagcggaagcgatttgtaacttatgatggctgcatttccattttcaacaaacaggtttatataaagtgatcatcatcaacaatactaatcaaaactgaaatgaaagtaatatcttatttctctcgttgttgaacagatgttgttatcagttaccttctcctcccaagattataaatccgatgagcatcagaacaggatgcagctggatcacataagaaaacaaaatggatcagaacacaaacacagacggattaaaaacaactgaagagatgtcccctttgctttggtaacacaacgataatgtcgatttttggatgctagttgtgaataccatcaactaaacctaaaccagaagatcgaaacatcatcttacgtacattcactcacactgtaataaacagaatacgaccccaacaacactcatagatcctaaatcacgtccatagcaaaacttgggacaaaccagaggactattgcttccaaaagagtcattttacaagctataacagatatcaagacaacaaaagaattctcctttacataataaagtcactcactcagaaacagtactgaggaacaaataagaagcttcgcagtcagatacaagacatacaaaaagtcaacgcagatgcgagagacagaaaagagaaaactttaaaggagattaaagaaagaaacatacattgaagatgagattcttgttagtagcttcccaggccaatccacctctgtaactgatactccaaaccagtaccataatcgccgctattaccgccagcgcgtgcgccacaaacgtcaccgccatcgcgtttatccggacagccatatctctttctctcctgcaactgtgtttctttcttcttgtcgttttttctactcttctaatctcctttgtccgattaatcttcaacctcggcctctgagacgaatcaatcctcagattttccatttcttcttttcaataatccactgtgggcccttcttcgcagacacgtgggcctcacgatccattttcgatttatctattcagacgtgtaatttcgtggggcagttctcgataaacgactaatgtttcgccacgtggatattgtagtagctgcatctactagttccgcttccgcgcttcgtgtctgtttcttctaccaccaaccaaaccattaaaccgcgatagagcatactggatcttttttaaggcccattatgtacatttctgttggaccaacccattgcgcaatggaaactattcatatgatatcatttcttgtcgttttcggatttcagtgactgtgttatgctgtttttccaatgatcgaaacggcatgttgttggaatgggctagtgggctaacttgtgaaagaaggtaacatcgacggttcttctcggataaagattaggctgagagcgccacgcacacaatcaagagcctgatacgtggcatgacacgtggtatttcgtaagataaagtacagaggacacagccatccagaggtagttcggctatgcgtcttcctcctctttcccatactctctgactctgtataaaactttgaagaagctcctcatattttctcagaaacaatttggatgcatagaaaggaaaagaacaaaatcaaatctagcaaataaaatg

SEQ ID NO: 6735 - DNA, 3000 bp, Unknown
  misc_feature (1)..( 3000): cDNA_ID_1839096_gDNA_ID_1621103_Annot_ID_55923 3000 nt of promoter + ATG
tgaaatctcttttgcaaaggcatagaaccttgttggcctgcctcacctcctcccgaacccgtaattcccattttattccctaaccatcattacaccaaattaaaagtcattaccaccgtcaaaagccgaaaacgttgtttaacaggaagaggcgtgtattaccaatggtggagccaagtgactgtgtagagtcttgaacagattctgtagacttttgcgtcacttcttccgtcgtaccagcgatccaagaagtaacagctcctctcagcttctccgcaatccctccttcgcctttctccgcatatgcttcaccctgtttcgtagctgcttccgagctcggatccttaaaccctcctaaccttttctccacctcctccgattgtgtcactatccctctcttcggtggcgcagtttcgccaccgcctcctccaagatgaagcttctcagtgaccacttccgacaaagccttgtcttcctctcccggactcagtttctccgtaaggaattctttcgccgagacgcccctgtcttgtccttgctctgtcccggtcccggtgaatggtaacttcgtcattacactagctcctgtctctttaaccttctcgtaaactggagtcaccatacttgcgaccgtacttccgtatccaccagcggagctaggattttctgctccttccacacgattctcgtggccgccttccccggagtaacctaacttcgaagcgacggcgtttttcgccgccacagctttgtctgctacgaccgaagtcgctaatgagatcttatcggtgtagctgctctgattaggctggtgcatctcctctcctctcctctgacctctggaatcaaaaccctgagggttttgtataccttgagttctcgtcggcaaatcttttcccagatcaaattcatcactccgctccggagattctttccccaatctagatccatagtctcccgccggtatgtgcttgcccatttcaggtcttgacttagtatcaaaaccatgacttttctcccggagatctcttcccagtcccatgtgatcatcttcacctgtttcgttcctcctcccaaaagctgcgacactcggttgttctccagctcctagaataaagaaaggacacaagtcaaaagatataaattcctgaatcagaattccgagaagaaaaaaaacttacctttaccggtgggatcagtaactttggactgataactcgacattccaccatgagatccctgagcagtcggttttgtatcaaggccatggcttttcttctgcagatcagttcccaaccctaaccttccaatagctgagacagtcgatgctgctccaatttctccagtagctagataaagaaacagacaggtgaaaagagttgaaacttcttagcaaaaaacgtagagctgaaactttaaatcaggattaagagactagagaaaagatcttacattttccgatggggtcagtaactttggactgataatttgacaacccaccatgagatcccggagcagctggatcttggtccaatcctttgggtctgtcgatattaactttactttggtttcgagacttgtgttcatcaggaacaaatgttcttgtcacatcttctgttgcagatagtaaagacacgggagtgttatgcggcgtcagtgtaggagcccctcttctctcttctttctccggtacaccggagtgttttataggacgagacattgcttcgtggccaactcctctcactggctcagagggttttgtatgtgaagaggaaacaactggaaaagctttcgatcctggagggactatctcctccttcaccggaatatgagcttttcctcgtgctgctgggaccaatccaaaacattaaatactctgttttggtcaatagagagatcaaagtgaagcgaaggactgacaaacctggtgcaccgccgtggagttggttgtcgttgtagtcatcttcatcgtcttcttggtctagatcgtgatcgtcagggatgtgttctccacgatcgtgctcatgaccatgtccatgtttagtaagaacattcttgatcttctttgctttttccttcactttcttcagaacttttgatggtcctttttcatgatgcccttcttcctctgcattcaaaacagaggaacacgtaaaaaacattcattaggctctctcacttccagattttagaatatcaatagaaaaaaaactttacattgagattagaatctggtttcgcaatacctggatggtgaatccttattggctcctgtgcttggtgatgaccatgagtacgttgcaactgcgcttgtgaatccattttatttgctagatttgattttgttcttttcctttctatgcatccaaattgtttctgagaaaatatgaggagcttcttcaaagttttatacagagtcagagagtatgggaaagaggaggaagacgcatagccgaactacctctggatggctgtgtcctctgtactttatcttacgaaataccacgtgtcatgccacgtatcaggctcttgattgtgtgcgtggcgctctcagcctaatctttatccgagaagaaccgtcgatgttaccttctttcacaagttagcccactagcccattccaacaacatgccgtttcgatcattggaaaaacagcataacacagtcactgaaatccgaaaacgacaagaaatgatatcatatgaatagtttccattgcgcaatgggttggtccaacagaaatgtacataatgggccttaaaaaagatccagtatgctctatcgcggtttaatggtttggttggtggtagaagaaacagacacgaagcgcggaagcggaactagtagatgcagctactacaatatccacgtggcgaaacattagtcgtttatcgagaactgccccacgaaattacacgtctgaatagataaatcgaaaatggatcgtgaggcccacgtgtctgcgaagaagggcccacagtggattattgaaaagaagaa

SEQ ID NO: 6736 - DNA, 3000 bp, Unknown
  misc_feature (1)..( 3000): cDNA_ID_1815434_gDNA_ID_1621103_Annot_ID_55924 3000 nt of promoter + ATG
gaccttaatatatagtcacaagctttatggatccaatgaacttaacctgcacttaataagagtcataaaagtgaagggtgccatttattgatgcatcttattgttccgtttctttcattgtttgtatgcaccattgcccttccaagctttaatattttcccatggagtatcatatgcttcaaataatttgcgtttgagtctagcaattactaccacctaatttgatttgattttagtgatatctctctaacctaagattcttcttaataccttatgctgcttaacatattaggtgcaagaacacaaccatcctcatatacttctgctacaaattggtaacacattctgcaaacttccaggtggacgcctgaagcctggtgaaaatggtatacagttaccacccgttagtaatactttctacactgttatgagtttcttggctgcttaagttttgggtgtactatgttgtgtctgcagaagctgatggtctgaaaagaaagctgaccagtaaacttggaggcaattcggctgctcttgtacctgactggacggtactattctggtttcttctttttcgttgagtgatagtgacaagatatttaggggtagatagatgccttaaaagaactaggttggtgttgcatgtgcttgctcttaaagcaaacgagaagcaattgaaattattttggttattacacttaagcatgccaggaatgagggttcataaaagaaaacaaggataggcctggtagctttgctagagaatcatatacgtactagatgaagaaagaagactttgccatgagtccacagttgtctgattgagttatgtatatagctctgtccctgatccgttgggtactttatgtccctttaacaggtaggagaatgtgttgcgacatggtggcgtccaaactttgaaaccatgatgtacccgtattgccctcctcacatcacgaaaccaaaggtagtaaaaaaacacaatgtaaagcttctcagaatttccctttactcttctccttatatctcctcttttttgtggaatggcaggaatgcaagagactctacattgttcacttgtctgagaaagagtactttgctgtgcccaaaaatttgaagctcttggccgtccctttgttcgaactctatgacaatgttcaggttttgcttatatccagaataccaacctttggaaaatggtttttacctcaaacatctaaccgtatattattttcttgaaacagagatatggaccggttatatcaaccattccgcagcagctatccagattccatttcaacatgattagttcgtgatttcgactcggtgtgttcaagaacaaggaacctatcagatgggtaagttacttaggtacggtagagagctgtagctaccggattagagatggggttttccaatgatgcgagttgggttttttgcattatagacttgttggcttttatgtagaaccggttcaaagtgtcagcacaaaaaacaaagattattgtatctcatttttaaaagcatttgtcattgtttgactaacgcctgtcttctctaaccgtaaaacatgtgtttcattcaatgttgaatgatgtttttattttggtgcataaaactaagccatgtttaaccttctttgtcaacatatttcataaagttttatcaacataccacaaggcctaatggtcgaaggaggagaagttttgttgtagacgaacaatctaaagtatcctagttatcataacattagatgtataaaatttattctccgagggctaaggattaagtcatcataacattagatgtataaaatttattagtcgtgtttcattggggattagtttgacggcaaattatattatgttatcaagacgaccaagacaaggtagacacttttttattgtttccctctcaattttctttactcgtcattttccacaggccaaaagagccaacaagtaaaaaacaaaatcagagtatttttaaaattgggacaggccatttcgatcgggacagaaggaattcaaattgttgaaattcacaatattcctcaaataactcttattattggtccacttgtcagtgtgaatgtaagaaaaacatcgtgagaggaaaaaatatgaaataattactagcagcaaataggagctcaatgttgacttcactacaaaattttataattaagagaaaaagagctctcaaatcatataataattatttcaagtacttgtattagcaaatgcaatttgtctgcttgctaatgatgctttacgaaaagattaacagattggatgattctctataatcattacttcattattcacaatcattggattgaatcagacagattattccacccggatgatcgtttctaaccaaaaaactcattgacgcgatttaaacataaattaaagaagtcgttaatataaaattcttgccgacattttagagatttttggatatgaagatgttatctgattagtgtgtaaattcttaaggcatcgtccattataaatgaagtaaatataaggaaaacaaacaataagaaaacaaagtgaaagaacaaaaacaagcaaagattcttctttttttttttttttataggtaggaatctcaaatcttatatatactgaaaattgctaatttattttaagttggaacattatatcaataatttaaatttatccaagcagacttttgacacctaattaatccttacatattccattatgacttttctcctcactgcttatacaaatgcatacagtatactcataagaaattaacacataaattatatcccaaattttcataaaaatagaaatatatatgtcatttgtcatttactctaagcaggcccatttggtcatttcttaacaccaagtatgtaggctctatctgtggacgtttggtgatatatatgttgtctcaatcaccatatatagtattgagacatgttttcttgtatcaggacagacagctgactaaagagaaatg

SEQ ID NO: 6737 - DNA, 3000 bp, Unknown
  misc_feature (1)..( 3000): cDNA_ID_1815430_gDNA_ID_1621103_Annot_ID_55925 3000 nt of promoter + ATG
cacaaagataccaatacgctgtattatttgccaactcacttcagagggattttttaatgattagacttggtttatcaatatacatgggggcgatttaaacttcctttgtggacaaaattattacagtattgcactatatgagttgaactaacttacacaggcacatacataagagggcaaaggacaggccaaatttttacctctgtggctttagcagtccgatgaaagattcttgttattccacgttgaatatcagatgatctagacatagctgtcaagactgaggagagcacgagataaaactcaggtgatacaattgctctctcagaaccttcttcaaccaactcactgctgagctgggaagaactatgagatcccatgcaagcagaaatctcagaaacagcatcaagccgagcagatatcaaatttctatcgcatagaggatgagtcacctgttgaaatgaaagtgtccacaaatcatgataagagatcttttaaaaaatttccctaccacttagcaaaaagtcaatgaggagtaagtacagaaatctcaaatctctccccttcaaaaactgaaagatgccagtaaagtcttttttttctttactataagacgacttactgcatctatagaactacaaataaacaaagcccttttgcggaaaatctaagaagaaaagagattgtgtcttacccagtgtctaagaagcctggaaccatatactgtaagtgtgtgattcatattatggaataaggagccagattccgatccatctgaattatttttcacaacctgaatatatataaaaattattttaagagaaactcagttaggaaacttaaaactgaacatgtgactagccaaataaagcggaaagtacctccaactgttgcagagtattggctgagagagtcatctctgtgttacttgacaaagagcgaaatgaggccccttggtaaaggatcctttcaaatccaaactgtttgagatggcaaaacgttagggcgagggcttgaacagtcagatgtggcatgttcataattgtctgcaccatcaacgaaggaataaattagcaggaattgcagtaagcatttaatagatgaaaaaaactttttgaaagcaagatgtggtcattaacaatatcgcattaacagatcatcataaaaaataaaataaagggaaagtttttagaaagtcaaatgacatacatgaactgtcaagcaagacattcctttttcagcagcctccagcttcatttctttatcatcttctaagttacctgcgctgattttttcacataatgaaataacctcatctactgcattaccattgctgaaacaatccagtgaggcacgttccactcgaacgtttgaggtaggtccagcatgtgccaccaaaaactgccaaacaaagataccacacgaacatctatcagtacatgtatacacatcgaccaagaacagaagttctagtcttcaaaactaatccatatagtgattatacatacagacaaagattcttgtcaaactgttcatcaggaaggattcagggattagtatagacagaatcttgtaaaactaactgaggagctaaattgttcaaaattaatcaacaatgcttgaattagtaatatttactcgtacacagataaacgtaccttctcagtttgttgtgaaagaggctggccaagcaacagctcagctggtgacaagctcaaaatcacagcctctaatccacttctcatgaaattatcattgaactcttcataaacaacttcacctgtcgaaatttcaacgccaacaacaccgactctaacatcaaaactcatttcaataccacagcctaatgtctccgacttaactctctcatccacaacacaaaccaagaaattactctgtgaaccaaaaccttcttcaccaccacaaccaccacttatatcctcagccgcttcaagcgtggctttggtatacaacgccgacagtccccggaaaaaagggccggtccggtttgcaccatgggacttaatggctgcagtttcagtctgcttcactacaccaatcttgtatcctgcattcaccagtcttctcacatggaaattcaatcgaaatgttggcacactcgccgtcatgaaattgtgatccatatgagcgtaaatacccaacacgcgtgctgcgatctccgcgtcttctccgaagaatctgtacctgtaaccaacttccaccatcaaaaccacatctgggtacttgctctttagctccaccacttgctgttccaatggtgtgtatttcctcgatgatgacgtttcgggaacatattcctccggcgagggttccagaaatctctggagaaatctttggtgtaaattgggatcgggtactgggttttgagtgtgaggagaaagtttaggctttttgggtgacgcggcggcgaggtggtcggagagaagcttacgcttggaaggagagaaggatacagtggcggatatcttcggtggcggtgttgatgattcggctaccggattcggttcgtgagtcggggatttgggtttgggagcgaagaaacgagaaatcgtctgctgcttttgcttgcccataattgctttattcgtaatctcctccgtttaagagaaatggaaggtcgtggtcgtggctatggcgaacttgggttgccaattttcgcgcgctttcttaggttgccaatctctctaatccatcactgtcactgaacaacaaagtgacgaagccatcggttcggagcggttattatgggccgggtctttataaatgggccggtattttttaaatgggcctaaagtgccactataacaaatgagtatactctagaagttggtggtgtcattaattctccgtcgagatcgcttctctccccgttgccgtccgtccccaccgctgagtgatagatcgaaacagagaaacacacacggcgaagaagatttcaccatattttgtctaagtggattctgttgagagagagagatg

SEQ ID NO: 6738 - DNA, 3000 bp, Unknown
  misc_feature (1)..( 3000): cDNA_ID_1815418_gDNA_ID_1621103_Annot_ID_55928 3000 nt of promoter + ATG
acataagcgaaaaacagacaaatcgggaaccaaaatcattctctaaacaaaatgtaaaaaaatctgatttttggctgaaaaaaacaacaaaaatctgattgtcagtatcctacaaatcgataaatcgtaagaagaaaacataaaaataatattaaagttgtgtgctaaaagcaaccttaaacaaccaaatagcacttcgaccaatgtcgaaaagcaaaaaccgtaaagcggtgctcgtatgaatgttgaatgggataaagagcggcgcaagatctgatatttggctggaaaaaacaacaataatctgattgtcagtatcccacaaatcgataaatcgtaagaagaaaaacataaaaataatattaaagttgtgtgctaaaagcaaccttaaacaaccaaatagcacttggaccaatggcgaaaagcaaaaaccctagagcggcgctcgtatgaatgttgaatgggataaggtatatatgagattctcgacggaaagatgtatgggcttcgataaagaatatatgagattctcgacggaaagatgtatgggcttcggcccataactctttgatattagtatagaaccataacaaaagaaaaaaaaaaaaccttaaacaagtaaacactaaacccaattgattctttactaaatttagtaatcaatggttattgtgaaatgaaatttaacttttctttcatatgaaaaaaaaaattgaaaccatccatggatggcctagttttatttagataactaaatatctatgttttgaaatagtaatctattacatgacacaagaacgaagattaactaaatcgagaaagaaaaaaaagtgtagatttggtagacgctgaatatataaaaaaactaaagtgataaaacaaattgtctttttaaaaaagtatggaattttcaaatttcccattctttcggtatatgatgagaaccttcacatggattttatttttaacaacaaaaatcaatgttgaaaagtgtatgtacctatgaaacaaaatcagggtcttaactagttttttgttttggttttggttttaatcttttctagttgctttgccttatttataagcgcagatgaggaagagaaaggcgaaggcacatcagctgcatgggacgttgctgaagctgtggcgctctcattgtgtgatatcttcaatctctgttaatagctttgtaatggtggtaacaatccaaaaatacccaattacaatcttataagtaccaatcatcatccatcctatggtttttcttttttaaacaaaatccgatataaaattaataaaaatctattgtattaacactaaaggtctatttacgaaaatttatagttacaatgatatgaaatgatagaaaaaatgaaagattataaaattgtattgaccgaaaaaagaagtttaatatatatatatatatatagggatactcattagaaaatctatatgcttagtgaaaaatgactccttcccataatattaaaaacagataaacgaaattgttaactaaatttattcaacaataataaacttttaacaatgacaggtcacactttaaatggaaatatgcattgatagactttctcggttgaagttgtaactctagatttatttttgtagaatttaaagatgtattttgttccttttgttgtgagctatgaaattaataccttataattgtaggttttaggaagcggttgatgtatagcatgtgcagagtaagctcgaaatggctgagacgaaaaaaagtgtcgccacaatgatttactttttactactatacttttgatcattgggacctaatggatgaatgttgtgtgttgtggacgagtttatgacacataacaatattgtagacaaattgtctaatttgagtagagatactaaaatttatctccatataattgtatactgtatatgtataacaaataattcaattcattggcctaagatgttttattgtatctttgtagaattttacactttagagaaaaatcattgcaataactcgatgaaaaaaaatgtttatcttatcctagttacaactaactatctatctatctctttgtggtaggagatttgcatctgatcgaacgattcatatggtgccacgtaactatggtcccacttctattacgagatctactaagacatcagcacgtgtcggtgtcgtttgatccacgaggtcggtgacgcttagagctagttgaccggtacagtcggttattaccggttatactatatgtatgttttttggtcaaagatttggagctattttatagttaataaatcaagagttttttttttccacaactaggtcttaatttgtgattgtttttttcttccatttttccaaaattctcttatcaatttcaggttagtatttttgttactgtccctagcttttgactattgtactactgtataccctttttttttggcttgagaaattagattttgttatgtttgcgtaaaatatttgtgaactcaaaaataaaatctctttttttttcattgccgatattttttcttccatgaatgctgctgtaaagtattaatttccctctctactgagtttcttccaaatttctgatttttgggatttgtgcaactcccaagtcgatttcagtttctgggttttgatttgagttcgccgattggatttgaagttttagtctttgttggtaagttctatcctttttgagatgttgaatttgctcttctgataattagggcttctgattattagcctaccaatctttgatttggttttcatttccttcagctaaatatttgtaattcttggatcctgaatgattaaccatcttagtttgattggtgaaagtataccatagctgcttaggatccgtttggctttgttatttgctcagattctgaaaggaagggtttaaagtttcaagcttttcattccgctgaatcagtccttgtatttggacggcttgatctgttatctgctctcgtgggtggggc

SEQ ID NO: 6739 - DNA, 3000 bp, Unknown
  misc_feature (1)..( 3000): cDNA_ID_1977112_gDNA_ID_1621103_Annot_ID_55930 3000 nt of promoter + ATG
gccaacgccgcttcagcagccgctttttggatatccttggcgcatgttgactccgggattcgtagccgccaagccgagtcagcgaagttgagacatgctgatcggccacggagggctaatgcagcgacgtcgtgagcacgagctgccatctcagcggtttggaaagtcccgagccaaatcctggttttcttgtttggctctctcacttcagaaacccacttaccggagtttctttgacgaactcctctgtaaattgggtgacgagtctcacgaaacttcttacggcccgccggtttcttcggacaactcgtggccaacgtcggacaataatctccgccttgaggctcgtaatcggagccaaacatttcagaaaaagctgaaaatgagttcattgatcagagtactctgtttcaagaaactggataaggtttaagtagtacgtagttactagagttctcagtctttttggattaataaaagatagtatatctgtcttggtaaagctatttatatctctctctcttttttttcttttcaggtagattctttttcaagtgtgtagttagtataaaaagtgagagtgagaattggtgtttatattggccggaggagagataacggatatgtggggagcacacggagtttttgtctctgtgaatgacacgtgtatagtacatagcgaagcaatcccacgatgttccactcgctgtctgacgtgtgtcctttgacccttgtaaagagacttttgactcttcactcgttaacctttatgagttctttaaattctatcgagtgtgtgcctgtgtggttggctggctgctgttgttacaatcgtttttaaattcctatgaataaacaaattgtcattaattgtcacccgtctataacataatagacataaatatctctgtgaaatgatattttaaatactcatgtagtatttgtattggaagtagatgtcctaatatttaaccaaaaataatactacaatatagaaaagcttgattttttaaaaaaattaatcagatttggtaatggataattatcaatttcgatggacggttaaaaatgagtcataaatgcatatgatgaacaaaattattcagtttaaacaaactataaccaaaaacatgtaaatggaccaggacaggactaagcgaaggattagaccaatacaaaatagcaagttatcttgaatcccaataattcccacaaaatatctcaatctcaataatagctatattgtattgacaaaaaaaaggtataaaaaatcttcacaataagatatgcatgaaatatattcgctgacaaaaatatctctctcgttacctctcgctctcacgttattgacatttaggagaaaagaagacacaacaaagagggaaaaaaagagtggtaaggtgaagaaaacaacaaaattggctttagtggaaaatagaaagtaaagcttgagagtgacgtatggggccagtgaaggctggtggggaaggtagggacagtgtttccgcggccgaaccacgggtttagaggattttgacgtccccacgcattatcttgtggaacccatctttctgtttttggaaaatcgtacggacgttcgtttttgaattatttgctgaatcgggttgtttgggtttctactctgttttgggattcttcagtggattggactggatcttttgtagctttttgttggtagatttgagacgcctctattttatgaatatcttaatagctttttgttgcatattcaagcgagataagaagataattgaggctttatggcatatttgaaaagtcgaaactcgttctcattccacgtgtgatgatatgttcgtggccacatatcattcggccttgaaagcaactactaaactcttaacataagtgaagcaatccaatgaagaggaaaacaatttatttaattaattgtaatatataaatatacacatttctttataacaacaattattaaacttactaacaaactcatatgtttcatcgaatccaaaacttgacatgtgggatcttgagagtgttaagttgcaagactttttaaaaacttgtatgcattattcattgtgtagatgttatgtgatacatgttctagttctattaatcagtatattctaatcaaaattaaaaaatctaatatttgtttgtcttcataatctgttattgttttgtttttttagaaagcagcttcaattttgtttacttgttgggcttcttataatttgtttaacatataggcccaatactcctaaaaagtagacgttctcgacttctcgtccttcagacaaaataagaaagtcaaaatgtgttctgaaaaaaatatctttgaaactaaaaagaaaagaaaataaaataaaaatccaaatgatctctcttgccttctttatctaaatcgtacctaactctgttttcagtttcacctatctctcgacgcgagcttcttcttcttctagggcttccacgcgactacgcctgccaaaatcattctacaggtaaattgatgcagtttattcactctctatatcgtcgtggttctcatctccttcttccttcttttttttttggttggtgaaaagtagaacaagagaattggtccatctcgttttttataagttgaatctcatcagagccttctttgtttttctggtatgaaagattcatgctttcgtggattgttctcgttttctctatcttgtgaatgatattcagatctaactgtagttagattagatctgttgcattgtacttttgattctaatactgtctagttcagttcctagatttaactgatttggagctcgaatagatgagtttcaagtcctaatttactgcaaaacaattcgatttagtgtgagggctctagtttttagtgttaaaagttttcatcttggtgacaaattagttgtgatattcgtgtttaaattatcatttaaggaagtctcatgaatcttttttactattgtggttgtctatacaggaagcatg

SEQ ID NO: 6740 - DNA, 3000 bp, Unknown
  misc_feature (1)..( 3000): cDNA_ID_3100805_gDNA_ID_1621103_Annot_ID_55932 3000 nt of promoter + ATG
tgcttttaccgccgccgtctgttcaatggaatcataattatgacggcgaaggagatggtgacgtgtcgctttggagttactaatattcgatagtcgtttccatttttgtactatagtttgaaaatattctagttcctttttttagaatggttccttcattttattttattttattgttgtagaaacgagtggaaaataattcaatacaaaacaaatcgttttctacttctttgcttcacataagttaaaagtcaaatatttaacaaaaaagatattaaaagtcatattgtagttgctttcaaggcaaaatatgtggacagatcattacacgtggatgatgtttgtaaatatgccacaaaacctgcattacattattttattctatctcatgtaagttacagatcttacaatttagcaacagaaagccacaaaatattacataaattggctcgtctcgaatctagcaaccaaaaaaattcagcccagttcactataaagaatataaaaaaaagtttcctaaaatagtgtataaaaccgaaacaaactaattcaacaaacccgaaataaacaaatccgtacgacaaccaaaaatatctttcagatgggttccacaagataacccagtgccaatcagaattctgaaagcgtggctcgaccgcggaaaccattgtccataccttctcttctttgtccccccttacgtggctcgctgtggagtctcgtaccacgtgtcgcgtcacttcactctttactttctattttccactaaaatcataatttgtctttttcttgaccatacccactcttttttcttctcgttgtcgtcttgcttctcctaaatatctcaaataacgtgagagacttgagtgtgagaggtaggtaacgaggcagactttttttggaagcgaatataacttatgctgatattttatttagctttctgattggagttgagatattatataggtattattgagatattatatacgtattattgagatttgagatattttgtagattttatagttctatcggactaattcttggcttaatccactaacatgtttttgtttagttaattaaactgattattttctgcgctatagttttgttaaacaccttttagacgtaacaaagcaattacgcttgatcatccatcgtagactctttttctttttttacatctcatagaagttttgtttaaacacagcaggaagtaaattattttcttattacgtacgtatgattgtttttagactattttagtactttgagaagtaaaattggggatacgagataaaagacaattgattaacatgctttttattttgacttccgaaactaatcatggttgtctatgtttataaattgtgttctttttgttgaaaaactcagataatgattaaatcagtagcgaatggatggagaacacatgattttagattgcataccgtaaaacaaaaaaaatcatgatggatgtagaacattcaaatgggtcaaataaatacgtatgtgatcaaaagaaagtatgtgatcaaaagggttagcacgagtaccttgggaggaaattcttctaattatgaattatgcaagaattttcgtcaagggaaggtggggaagaggtagctaaagaatagagaatcatatgactaaggacgtggtggttgaaggaaatgagagaatacatgaagaagagaaacttctttgagtgagaaggaagtgcgctggctggagagaaaagagagaaaagagtttcgagtgagagagagggcgttgagattgtgatcaacttaatgtaatatgttcttttattacattttctttttgtcatatactcaaaccttttactattttgtctcataaatctaacacaccccaccatttgttaatgcatgatggtagaaaatattaaatataattaactacttttatgtgatcaaaattaggtttcagactcgtttcgcgatccgatctacaattacaactgcatgcttctaattgatctaaattctaaattttttatacatattaaaaaaacaactttttgttaaattctcaatcatcatttttgtgattaacaattttttataactctaaaccaataatatttgattatttattttatatgtataatgatgattgagaattttaattagcagtctatttagggttttcctaaagttacaatatgttgttacccttctagttaaattttccaaaataccatatttcataacttttcaaactgtttattaattcaaccgtaaaaagcactaaaatgttacatttgatcattcacccaaattaaattcaaaagtttttccgccaaaactacttggtgacttacgtgcttatatacggacgactattattatgttctatacttttttatactttgttgcacaaatatctactctcccaattcatattctagaaggatgtgctataagaatgggagaaattacacaagaagagcatctttaaatatcctctcacaatctttatgtctaatacacgggtgaacaattaacgacaatttctttattcaggaatataataatgaataacggttaccctacacctagtacactaaatccttaacagccacacattcatacgcaaagagtttataaaactcataaaggtataataataacgagtgaataagtcaaaaaaagtcttctctggacacatggcagatcttaatgagtgaatccttaaactactcattttacaattgcttcgctgtgtatagtttacgtggcattaccagagacacaaactccgtcttcgccttttcttttgcctctaaaatatcttccgccattataaaacagcatgctctcactccaacttttatttatctacaaacattaaatccacctgaactagaacagaaagagagagaaactattatttcagcaaaccataccaacaaaaaagacagagatcttttagttaccttatccagtttcttgaaacagagtactcttctgatca

SEQ ID NO: 6741 - DNA, 3000 bp, Unknown
  misc_feature (1)..( 3000): cDNA_ID_3048857_gDNA_ID_1621103_Annot_ID_171501 3000 nt of promoter + ATG
cttttttagaatggatcttcttctttttttggttgtgagaaacgaatgtaaatggtaaaagttgttgtcaaatgcaaatgtttttgagtgcagaatatataatctttggtctccccataagcaacaaatcaaaatataatactattacgtaattcagtgaattgaaaacaaaaagtttgggctcacctgtaaaattaaagttagatgattctggcatttccgtgtctaagaaaagttctaggcacttatgtaaatagcaaaagttccaggttggttgatagcaacagtttctgcctttctgctaattcagcaaatatcaagactcaaggacgtttggtaaatatccaaagttccgtgagtttttgtaaatatgataaattataggcactatatagatatctaacgtttcaaaaaatgtttgaccccaaaaaaaaaaaaaagggtttcaaaaaatgtctgcaaataaaaaaaaaaggatgcggagacacttttaatttagtcaaagctttaggcagtaatgtaactgagaaacgatcctatgtaaatagcaaaagatacaaaaaaaaaataaaaaaaaaaaaatagcaaaagatacaagatagtgatagtgtataagtagtatcaagagatttatatacagtatttatggaaataacaaatgtttcgagattgtaaagagaaaatgatccatatagtaaaaatctacgggatattttattggtgagtagcagtaaaatccgaacacttgtatatagcaagatacctacccggcaaagcacttcacataagtttcgggtacttcgttgaatatcaaaagatctaaggcagtaaggctctttggtaaatagaaagttgggtaacgctttggtaaataaaattttgggtaacttgggttatattcttctttgaatagcaaaagaagaagtgagcaactggggtaagtagtacagttttgatgatagcaaaagttccaagtgctatttggatttctcaattaggagacatgatgatcaattttgatgacagctaaagtttgcatcgagtccataacccaagaagaactttcacgtaaaccttttcttttggaaaagaaaaaagtgtaactatcatgatttttgtttttctttgttttgatgacaagtatttctcctcgtgaaatcagttttttttttcttttaatgaatataaagaataaatcagattattgagattcacaaaaatccatcatcgcaagttcttacgtattcgaaagacgttactacggttactaacttactgtatatgtatgtgatgtcgaaaaagaagaagagaagacgttacgtcactacttgtatgttcatcgatcagtccacgtggctttttgtaaggtccgagagaggaaagtgaaattcagacgccgcttttttttttttggatgaagttccaaaattagccattttatacagtggttaagctcgttggaccaatatcaatggcgtctgcaacgactcttctcttccaccacggttccactcgagtcctcgtcgctcgtagacggtgccaagcttcagtccttagaccctacggcggtttaaagccctttctttccttctgcagcttacctaactccactgcgccgttccgggattcgttgagagcaaaatccgatggattggctcgggcctatgttaccggagcgccgcctatcgtggaagaaccagacccaaagattgaagaatccaaatctgaggctgaatcgaaggatttaattagttgggggcttctgtggagcttgatgagcaagcacaagctcaggctcagtgtttgcttattgactctccttggatgcagtacttgcactctctctatgcctgttttttctggtaatcggttcttcaatccactctcccaccattagcaaattgtaactgtactctttttttctctttgggtttgatgtagtttaagtttgggtatgatgatttagcttgtcatctgtgtttctctttatcttggtgaagctgttttataatggtaagtgttattgttttgagtaaaggtagattctttgaagtactgattggggtgagaccggagcctttgtggcggctgctgagcaaaattgctgttttgtactcgttggaacccatctttactattgcttttgtgaccaacatgactgctatctgggaaaacgttatggcaatattaagagctcagattttcagaagggttttgatccagaaggtatgttttgtttagtatgatcaaagttcgcttaagctatattgttggctgtattgaaatatcattgatgggtttcttttttttgtcttttatatattcaggcagagttcttcgacaaatacaaggtctgttccttttattcttggtttgctcaggtttgagacattttggcacaaaccttccttatgttagattgagttcatttgttttaggttggagagctaacggggctactcacgtctgatcttggtgctctgaatagcattgtgaatgataacatctcacgagatcgtggatttagggcatttacagaggcaagccatttctttactatgcaaatgtgagatttttgtgtttgtacatacatttttcataatgaatacagatttaatcttagcctggtgttggtgtctgctgttatttttggagttctataaatgacaaagactatcctgttgcatctcaagaatgcccagttctcatggcttatgcgttatcccttttgtaggtttttggaacaatatgtatcctatttactctatctcctcaacttgcacctgtacttggtctattgatgctagctgtgtcagttctagttggtaaattctctatgtctttttcattctcctaaactttttatttttggtaattactttggtcatctttgcttactttgcttacctctacatctactccctcggtcaaatctcaaaagctgtgtacaagagatcgactgttcctgtttataaatcgcatggattagctcaagcaaca

SEQ ID NO: 6742 - DNA, 3000 bp, Unknown; identical to SEQ ID NO: 6740
  misc_feature (1)..( 3000): cDNA_ID_2990367_gDNA_ID_1621103_Annot_ID_171498 3000 nt of promoter + ATG

SEQ ID NO: 6743 - DNA, 3000 bp, Unknown
  misc_feature (1)..( 3000): cDNA_ID_3073941_gDNA_ID_1621103_Annot_ID_171496 3000 nt of promoter + ATG
atttataaacatagacaaccatgattagtttcggaagtcaaaataaaaagcatgttaatcaattgtcttttatctcgtatccccaattttacttctcaaagtactaaaatagtctaaaaacaatcatacgtacgtaataagaaaataatttacttcctgctgtgtttaaacaaaacttctatgagatgtaaaaaaagaaaaagagtctacgatggatgatcaagcgtaattgctttgttacgtctaaaaggtgtttaacaaaactatagcgcagaaaataatcagtttaattaactaaacaaaaacatgttagtggattaagccaagaattagtccgatagaactataaaatctacaaaatatctcaaatctcaataatacgtatataatatctcaataatacctatataatatctcaactccaatcagaaagctaaataaaatatcagcataagttatattcgcttccaaaaaaagtctgcctcgttacctacctctcacactcaagtctctcacgttatttgagatatttaggagaagcaagacgacaacgagaagaaaaaagagtgggtatggtcaagaaaaagacaaattatgattttagtggaaaatagaaagtaaagagtgaagtgacgcgacacgtggtacgagactccacagcgagccacgtaaggggggacaaagaagagaaggtatggacaatggtttccgcggtcgagccacgctttcagaattctgattggcactgggttatcttgtggaacccatctgaaagatatttttggttgtcgtacggatttgtttatttcgggtttgttgaattagtttgtttcggttttatacactattttaggaaacttttttttatattctttatagtgaactgggctgaatttttttggttgctagattcgagacgagccaatttatgtaatattttgtggctttctgttgctaaattgtaagatctgtaacttacatgagatagaataaaataatgtaatgcaggttttgtggcatatttacaaacatcatccacgtgtaatgatctgtccacatattttgccttgaaagcaactacaatatgacttttaatatcttttttgttaaatatttgacttttaacttatgtgaagcaaagaagtagaaaacgatttgttttgtattgaattattttccactcgtttctacaacaataaaataaaataaaatgaaggaaccattctaaaaaaaggaactagaatattttcaaactatagtacaaaaatggaaacgactatcgaatattagtaactccaaagcgacacgtcaccatctccttcgccgtcataattatgattccattgaacagacggcggcggtaaaagcatgccttcagccatattatccaacaaagtcggcatcccaaacattgtctcctcatccatataaaacgcaccttcgctctgttccggtgtataaatagcttccaccatcgtctcctccatgtccaggccatgattcgtggtcgtcgtatcacacgtctcatcttgaaaagccaacgccgcttcagcagccgctttttggatatccttggcgcatgttgactccgggattcgtagccgccaagccgagtcagcgaagttgagacatgctgatcggccacggagggctaatgcagcgacgtcgtgagcacgagctgccatctcagcggtttggaaagtcccgagccaaatcctggttttcttgtttggctctctcacttcagaaacccacttaccggagtttctttgacgaactcctctgtaaattgggtgacgagtctcacgaaacttcttacggcccgccggtttcttcggacaactcgtggccaacgtcggacaataatctccgccttgaggctcgtaatcggagccaaacatttcagaaaaagctgaaaatgagttcattgatcagagtactctgtttcaagaaactggataaggtttaagtagtacgtagttactagagttctcagtctttttggattaataaaagatagtatatctgtcttggtaaagctatttatatctctctctcttttttttcttttcaggtagattctttttcaagtgtgtagttagtataaaaagtgagagtgagaattggtgtttatattggccggaggagagataacggatatgtggggagcacacggagtttttgtctctgtgaatgacacgtgtatagtacatagcgaagcaatcccacgatgttccactcgctgtctgacgtgtgtcctttgacccttgtaaagagacttttgactcttcactcgttaacctttatgagttctttaaattctatcgagtgtgtgcctgtgtggttggctggctgctgttgttacaatcgtttttaaattcctatgaataaacaaattgtcattaattgtcacccgtctataacataatagacataaatatctctgtgaaatgatattttaaatactcatgtagtatttgtattggaagtagatgtcctaatatttaaccaaaaataatactacaatatagaaaagcttgattttttaaaaaaattaatcagatttggtaatggataattatcaatttcgatggacggttaaaaatgagtcataaatgcatatgatgaacaaaattattcagtttaaacaaactataaccaaaaacatgtaaatggaccaggacaggactaagcgaaggattagaccaatacaaaatagcaagttatcttgaatcccaataattcccacaaaatatctcaatctcaataatagctatattgtattgacaaaaaaaaggtataaaaaatcttcacaataagatatgcatgaaatatattcgctgacaaaaatatctctctcgttacctctcgctctcacgttattgacatttaggagaaaagaagacacaacaaagagggaaaaaaagagtggtaaggtgaagaaaacaacaaaattggctttagtggaaaatagaaagtaaagcttgagagtgacgtatg

SEQ ID NO: 6744 - DNA, 3000 bp, Unknown
  misc_feature (1)..( 3000): cDNA_ID_2175786_gDNA_ID_1621103_Annot_ID_171494 3000 nt of promoter + ATG
gctggtgagccttttttttctttctttctttcttctgcctcttactactctgtctttgtggttaacctgaatgaattataataagcagtattgttatccactaagtacaatgaaaaagcgaaattcaaatgcatttcatgaaatccactctcgtcttcattccatccacgagaaggctctggtggactatctccctttggaaggagtactaaacattgaccacattcacctggccacctgatgcagcctgcttgaactttggaaagtacttcagaggaataagatttttagaaaaaaaattagtgtaaaaccgcattttctttgacgcaggatgtgtttgataatcttgggacgcctatactcacacctggccatgaatggaccatagggaaatccatctcttatccctcaaaatcagtcactttccatccgcattagcactgccatcttaattgcatttcattcctcatcactttgcacacttggacatgcctctgcaatggagaaggctctctattttcattcatatccccgtctgacttccacattttcagttgttccttgacatattaattccataatgcaaggtctgtaactgcttcactggtcatttggagtttttttaaggttctaggaatgttcaaaatttaatatgttctaggagttaagttaggcgttgaaggagggaggacagtgttcgtgtatgttgaaggttcttaatctggtccacttcctcactgttaatgtactcagatctttgcttttggctttttcttttttctccagggtttgcttttgtatacatggaagatgaaagggatgcggaagatgccatccgagcacttgaccgctttgaatttgggcgtaagggacgcagacttcgtgttgaatggacaaaggtaggatacttaccccaggatttatttctttccagacttagttatgaggtttgaaatactgataacataaatggttctgtgtatatagagtgaacgtggaggtgataaaagatctggtggtggttcaaggagatcctcatccagcatgagaccttccaagactctctttgtgattaactttgatgcggataatactaggacccgggatctagagaaacactttgagccgtatggaaagatcgtaaacgttaggatcaggaggaattttgcatttatccagtacgaggcacaagaggatgccaccagagcattggatgcttcaaataacaggtttgttctgtccattttagtatctaatcactttcctttcttagactcacgtttcatctgtgttttcattcagtaagctgatggataaggtgatctcggtggagtatgctgtgaaggatgatgatgctagaggaaatggacacagtcctgaaagacgccgtgataggtcacctgaaaggagaaggcgatcacctagtccttacaaaagagaaagaggaagccctgattatggccgaggagctagtcctgttgctgcctacagaaaggaaaggaccagtcctgactatggtcgaagacgtagcccaagtccttacaagaaatcaagacgtggcagtcccgagtatggtcgtgaccgcagaggcaatgatagccctcgcaggagggagagagtcgcaagccctactaagtacagccgcagtcccaacaacaagagagagaggatgagccctaatcacagcccgttcaagaaggagagtccgagaaatggggttggtgaagttgaaagtcccattgaaaggagagagagatcgaggtctagccccgagaatggccaagttgaaagccctgggtcaataggaagaagagacagtgatggtgggtatgatggtgcagagagcccaatgcagaagaggttagattctgaaataggtcgatacttgtttatatattattgatgacatgaatcgtaaaccatttctcttgttgttgcagccggtctcctcgttcgccaccagctgacgagtgataagagtggatccacaatctctatcaaagtaggatgttgtaactgtttgtagtcaacaacgctatgtcgtcgtgattagtttttgtcgtttggtttttgatagattcgaactcggatcacttttattgtcggattgaaaaacttatgtcaagttactacatttccgtttttttttatcacctctcagtttgaaccccaatcatgtaatgctttcccgtgacaataagatgcgaacctcaaaacatcttgcatcgaaacaccttgagagtgacaaaatcgaacgcatcgttaagtaacttaaatggtacgccgaaattatggaaggcaagaacggttctattgacttaattgggtctaaaaactactctaaacgcctcttgtcaacgttcgaactagtccctaacctttgactcaaatataaatattggctacaaatagacttatagttctgcctacattggtcgtctgctttagtatatttgttaccaagtaaaatgctgctgtagagtttaatgatctctttgtctactgggtttctccaattttctgatcgttgggattcgtgcaagtcgagagagtctacttggttgaaactttctgggttttgatttgagttgcccattggatttgaagttttagtcttttgttggtaagttttaccctttgagatatgctcgtctgatagtatagggctttcgagtgttatgaaaaattcgccttttcgtcttctgatttggttttcatttccttcagctaaatcttcgtaatacttggatcctgaatgattaatcatagctagaatccgtttggctttgttatttgggtcagagattctgagaggacgctttaaagagtcaagcttttcattcctctgaatccgtccttgtattggacgtcttgatctctgtatgctctcctggagctatcgaatcgagtttctcattgactgatgctcttggttccgaagctgtatatatgcagaggagcagtggcatcaataatctgcatatcccgacttcgccaatg

SEQ ID NO: 6745 - DNA, 3000 bp, Unknown; identical to SEQ ID NO: 6738
  misc_feature (1)..( 3000): cDNA_ID_1815418_gDNA_ID_1621103_Annot_ID_171493 3000 nt of promoter + ATG

SEQ ID NO: 6746 - DNA, 3000 bp, Unknown; identical to SEQ ID NO: 6736
  misc_feature (1)..( 3000): cDNA_ID_1815434_gDNA_ID_1621103_Annot_ID_171489 3000 nt of promoter + ATG

SEQ ID NO: 6747 - DNA, 3000 bp, Unknown
  misc_feature (1)..( 3000): cDNA_ID_1839096_gDNA_ID_1621103_Annot_ID_171488 3000 nt of promoter + ATG
agccgaaaacgttgtttaacaggaagaggcgtgtattaccaatggtggagccaagtgactgtgtagagtcttgaacagattctgtagacttttgcgtcacttcttccgtcgtaccagcgatccaagaagtaacagctcctctcagcttctccgcaatccctccttcgcctttctccgcatatgcttcaccctgtttcgtagctgcttccgagctcggatccttaaaccctcctaaccttttctccacctcctccgattgtgtcactatccctctcttcggtggcgcagtttcgccaccgcctcctccaagatgaagcttctcagtgaccacttccgacaaagccttgtcttcctctcccggactcagtttctccgtaaggaattctttcgccgagacgcccctgtcttgtccttgctctgtcccggtcccggtgaatggtaacttcgtcattacactagctcctgtctctttaaccttctcgtaaactggagtcaccatacttgcgaccgtacttccgtatccaccagcggagctaggattttctgctccttccacacgattctcgtggccgccttccccggagtaacctaacttcgaagcgacggcgtttttcgccgccacagctttgtctgctacgaccgaagtcgctaatgagatcttatcggtgtagctgctctgattaggctggtgcatctcctctcctctcctctgacctctggaatcaaaaccctgagggttttgtataccttgagttctcgtcggcaaatcttttcccagatcaaattcatcactccgctccggagattctttccccaatctagatccatagtctcccgccggtatgtgcttgcccatttcaggtcttgacttagtatcaaaaccatgacttttctcccggagatctcttcccagtcccatgtgatcatcttcacctgtttcgttcctcctcccaaaagctgcgacactcggttgttctccagctcctagaataaagaaaggacacaagtcaaaagatataaattcctgaatcagaattccgagaagaaaaaaaacttacctttaccggtgggatcagtaactttggactgataactcgacattccaccatgagatccctgagcagtcggttttgtatcaaggccatggcttttcttctgcagatcagttcccaaccctaaccttccaatagctgagacagtcgatgctgctccaatttctccagtagctagataaagaaacagacaggtgaaaagagttgaaacttcttagcaaaaaacgtagagctgaaactttaaatcaggattaagagactagagaaaagatcttacattttccgatggggtcagtaactttggactgataatttgacaacccaccatgagatcccggagcagctggatcttggtccaatcctttgggtctgtcgatattaactttactttggtttcgagacttgtgttcatcaggaacaaatgttcttgtcacatcttctgttgcagatagtaaagacacgggagtgttatgcggcgtcagtgtaggagcccctcttctctcttctttctccggtacaccggagtgttttataggacgagacattgcttcgtggccaactcctctcactggctcagagggttttgtatgtgaagaggaaacaactggaaaagctttcgatcctggagggactatctcctccttcaccggaatatgagcttttcctcgtgctgctgggaccaatccaaaacattaaatactctgttttggtcaatagagagatcaaagtgaagcgaaggactgacaaacctggtgcaccgccgtggagttggttgtcgttgtagtcatcttcatcgtcttcttggtctagatcgtgatcgtcagggatgtgttctccacgatcgtgctcatgaccatgtccatgtttagtaagaacattcttgatcttctttgctttttccttcactttcttcagaacttttgatggtcctttttcatgatgcccttcttcctctgcattcaaaacagaggaacacgtaaaaaacattcattaggctctctcacttccagattttagaatatcaatagaaaaaaaactttacattgagattagaatctggtttcgcaatacctggatggtgaatccttattggctcctgtgcttggtgatgaccatgagtacgttgcaactgcgcttgtgaatccattttatttgctagatttgattttgttcttttcctttctatgcatccaaattgtttctgagaaaatatgaggagcttcttcaaagttttatacagagtcagagagtatgggaaagaggaggaagacgcatagccgaactacctctggatggctgtgtcctctgtactttatcttacgaaataccacgtgtcatgccacgtatcaggctcttgattgtgtgcgtggcgctctcagcctaatctttatccgagaagaaccgtcgatgttaccttctttcacaagttagcccactagcccattccaacaacatgccgtttcgatcattggaaaaacagcataacacagtcactgaaatccgaaaacgacaagaaatgatatcatatgaatagtttccattgcgcaatgggttggtccaacagaaatgtacataatgggccttaaaaaagatccagtatgctctatcgcggtttaatggtttggttggtggtagaagaaacagacacgaagcgcggaagcggaactagtagatgcagctactacaatatccacgtggcgaaacattagtcgtttatcgagaactgccccacgaaattacacgtctgaatagataaatcgaaaatggatcgtgaggcccacgtgtctgcgaagaagggcccacagtggattattgaaaagaagaaatggaaaatctgaggattgattcgtctcagaggccgaggttgaagattaatcggacaaaggagattagaagagtagaaaaaacgacaagaagaaagaaacacagttgcaggagagaaagagat

SEQ ID NO: 6748 - DNA, 3000 bp, Unknown; identical to SEQ ID NO: 6734
  misc_feature (1)..( 3000): cDNA_ID_1815437_gDNA_ID_1621103_Annot_ID_171487 3000 nt of promoter + ATG

SEQ ID NO: 6749 - DNA, 3000 bp, Unknown
  misc_feature (1)..( 3000): cDNA_ID_2175774_gDNA_ID_1621103_Annot_ID_171483 3000 nt of promoter + ATG
atccctcattttgcaatcattatcacccacctacctgtgatacctggtttcttctttctagcgatgaatctagcttttaatccaggatttgttttctactttttgcagtcggaaggagctccgagataaagaaattacgagtaagagtgatgatacacaggcgagttatgttttaggatctaaatttgtggacccgacacgtgttcttcaactttcatggctaccaaggtcaggtacttctgattgatatctggttctaccatcatggatcatttctgcacataggaatgtatgttttactgcttcaaattttaggggtctgaagcaatttggtatgtatagggtctttctataccgcgggttcttgtcggaggaagagtgtgatcatctgatatctctggttaatttccagttcttttgtgtttgagatatagtgatacattgttctttgtgtaatggttacttcttttctgttagagaaaggagactacagaggtttactcagtggatgctgatggaaagacgcaacttgtaagttctttgtattcttcaactttccaattagatattgtcatgttcttataacactatgttgtaaagacgctagtgttgttgtagactttgagatatatgtttggagttttatgtaacaccctttctcatatattgtcaagttaacacaaatgatttcacaccctagtatagcagtttccatcttggttgatcaaaatggcctttacaattgtcatgttccgttccttattttggtatcattttggataaactaggatccagtagttgctgggattgaagaaaaagtttctgcgtggactttcctcccaggaggtaactttacttatcttggttttgtaatctacggagactttgtgattgctcttggaaggtctcttttcttgtggccaaactgctggcttatgtttctctcttgacgcacatttttcagaaaatggcggctctatcaaggtaagaagttacacttctgagaagtcaggaaagaagttggattattttggagaggaacctagctccgtattgcatgaatctttgctggcaaccgtcgttctctacctctcaaacacaactcaaggaggagagcttctcttcccaaattcagaggtcagtttgatttctaacctgagaggcaaaaagatgacttttatttggcacaccacaatgaatgttgagttctcctttttttccagatgaaacccaaaaacagttgcttggagggcggtaacattttaagaccagtaaaaggaaacgcaattctgttcttcaccaggctcttgaatgcatctttggatgggaaaagcactcatttgaggtgccctgtggtgaaaggagaactgttagtggcaacaaaactgatctatgcgaagaaacaagcaagaattgaggagagtggggaatgcagtgatgaagacgaaaactgtggacgatgggctaagcttggggagtgcaagaaaaaccctgtctatatgattggctctcctgattactacggtacctgcagaaagagttgtaacgcttgttgattcttcaatcttatcgcaaataattgaacattttcatactcaagtacttgagctgtttttggtctataagatagaataaatagtgaatagttaagggtcgtggtggtaattaattcctcttggccataggagaaaagaatatactcacttagatcttctttgatataactagaagtctttgtctatgttgttatctatgtttctctcgaatcataaatttgcatcttgctgtttcttacgcagcatagtccctttctcttgctagttccaacatttttaaaattgcaatttcctataaatactagatattttaaaaacatatcaaccagtgtacttgttggctaaccaaaaaaaacaaacaaatgttttatcacaagttagagcactattgatgaaaagttggactagtttaacatgttatggtcccatcgaagagattatgatctaagcccaaaatttcatagtttttaaaaaatggtaatcaaaagttaagtagttaagtatacaggaaaaattttaaattgtaatattttttcctataaaaattggatatttatctggagaaaataaatactccatttggttccatcaattttgaaaaaaaatcagaagaaagaaaaaattagaaattgtatcactctcctatcatcggaccaacaagatctagacaattgttcatgaatcataatttttgtatgtctatcccaataactttcttcaaacataacagtctattctaatatcttacatgttaagaaataataaaataaaggattgataaagaaaaaaaaaagttttttctttcttagttatttttaaaacaaaaatacaaatttactgatcaaatatttgctggatttttttgtgatttgagcctcaagggttgttttgtttgcccgtactaggcctttataatttttcttccagagctcttttgcctcctcctcctctctccgaaattttctctcatttttctctcttctccttttttgcgtcccatcactttctctgattttctcggcgactttcttccgtcccaagctcctctgaatccccagaaggatcgctctcgattcttctcttcctcctattctccgcccgatctgttactgtttttttttttactggtacgtgatcggactaaccattctcttctcatgaacacacactaaatcgatttgaattcattccttcgtctatacatcactggtatttgattagatttcaaaccgcgaatactatgatttcaattccgatttttctctgttaggtggcttagtcatggaggaaattaggcatctgtctgtgttagtgattttgacgctatttgaatcgaatactgttgatttatatagttgcttaggggaagaatcggttcagtatataggtgctttgtttataggaatttgtgttttgtgaatgtatgttgcagtcgaattcaatg

SEQ ID NO: 6750 - DNA, 3000 bp, Unknown
  misc_feature (1)..( 3000): cDNA_ID_1815395_gDNA_ID_1621103_Annot_ID_55935 3000 nt of promoter + ATG
taaagaataaatcagattattgagattcacaaaaatccatcatcgcaagttcttacgtattcgaaagacgttactacggttactaacttactgtatatgtatgtgatgtcgaaaaagaagaagagaagacgttacgtcactacttgtatgttcatcgatcagtccacgtggctttttgtaaggtccgagagaggaaagtgaaattcagacgccgcttttttttttttggatgaagttccaaaattagccattttatacagtggttaagctcgttggaccaatatcaatggcgtctgcaacgactcttctcttccaccacggttccactcgagtcctcgtcgctcgtagacggtgccaagcttcagtccttagaccctacggcggtttaaagccctttctttccttctgcagcttacctaactccactgcgccgttccgggattcgttgagagcaaaatccgatggattggctcgggcctatgttaccggagcgccgcctatcgtggaagaaccagacccaaagattgaagaatccaaatctgaggctgaatcgaaggatttaattagttgggggcttctgtggagcttgatgagcaagcacaagctcaggctcagtgtttgcttattgactctccttggatgcagtacttgcactctctctatgcctgttttttctggtaatcggttcttcaatccactctcccaccattagcaaattgtaactgtactctttttttctctttgggtttgatgtagtttaagtttgggtatgatgatttagcttgtcatctgtgtttctctttatcttggtgaagctgttttataatggtaagtgttattgttttgagtaaaggtagattctttgaagtactgattggggtgagaccggagcctttgtggcggctgctgagcaaaattgctgttttgtactcgttggaacccatctttactattgcttttgtgaccaacatgactgctatctgggaaaacgttatggcaatattaagagctcagattttcagaagggttttgatccagaaggtatgttttgtttagtatgatcaaagttcgcttaagctatattgttggctgtattgaaatatcattgatgggtttcttttttttgtcttttatatattcaggcagagttcttcgacaaatacaaggtctgttccttttattcttggtttgctcaggtttgagacattttggcacaaaccttccttatgttagattgagttcatttgttttaggttggagagctaacggggctactcacgtctgatcttggtgctctgaatagcattgtgaatgataacatctcacgagatcgtggatttagggcatttacagaggcaagccatttctttactatgcaaatgtgagatttttgtgtttgtacatacatttttcataatgaatacagatttaatcttagcctggtgttggtgtctgctgttatttttggagttctataaatgacaaagactatcctgttgcatctcaagaatgcccagttctcatggcttatgcgttatcccttttgtaggtttttggaacaatatgtatcctatttactctatctcctcaacttgcacctgtacttggtctattgatgctagctgtgtcagttctagttggtaaattctctatgtctttttcattctcctaaactttttatttttggtaattactttggtcatctttgcttactttgcttacctctacatctactccctcggtcaaatctcaaaagctgtgtacaagagatcgactgttcctgtttataaatcgcatggattagctcaagcaacaatgtctgattgtgtatcagaaacgttctctgcaatccgaactgtaagttcttgacttcatcgtatttgtatcttttagggcagattaaattatctgaagaaactttgatttacccttgaagactcaagtaatttgtatctctttataggtaagatcattcagcggcgaaaaacgtcagatgtctatcttcggtagtcaggtcatatttcagacttcttactagctaaaactgatttcttctaaacaattgttcttttttctaactgatccataatctattaatctaaacttttgtttgatgtacagattcttgcttacaagcttagcggcttaaagcttggtactttcaagtctataaatgaatctataacaagagttgctgtttatatttctctgttggctctttactgtcttgggggaagcaaggtgaagacggtaagatatacctgcctgtaagacttgttgattgccattatgatcattcaagttgaaattatgcttcttgccccctaaaacataaagagaatcgtgtttttatgaatttctattgcagaagatagtgttactcgttgtttatactttctggaacaaatgactggatgtttctagctagaatcaagttactaccttctgaatttttaaataaaaaaaaactaagaatcaaatttctctgtatctctcttttgtgtagtttcttatgttgttacattttagctcttttgcactttatttttcttggttcttattcttaaaatttctccaacccagggtgagctcgctgttggaacagttgtttcgttcattggatacacattcactctaacatttgctgtaagtacctctgtctacacatcatttactgtcacacatatgctatacatgtaatttagtttaccataaccagtgattctgttatccaggtccaagggcttgtaaacacgtttggagatctacgtgggacttttgctgctattgacaggatcaattccattttaaacgcggtggacatagatgaggctcttgcctacgggttagaaagagatatacatacaaagaaagtccaagatgaaaaccttaaattgttcttgtctgctggcccaaatgtgaatatccgtcacctcgataagtactacatgtcaaatctgaaatcaactaacaatctacgtaccctaacatgggctggag

SEQ ID NO: 6751 - DNA, 3000 bp, Unknown; identical to SEQ ID NO: 4715
  misc_feature (1)..( 3000): cDNA_ID_1815496_gDNA_ID_1621104_Annot_ID_55939 3000 nt of promoter + ATG

SEQ ID NO: 6752 - DNA, 3000 bp, Unknown
  misc_feature (1)..( 3000): cDNA_ID_1815488_gDNA_ID_1621104_Annot_ID_55941 3000 nt of promoter + ATG
tttcttatgatgtgaaataacatacgttagtaagagtgtgtttttccatagttggtacggacgaatatatctatttaatgtcactatcttatttatgtcattcgaatgagcattctttgtttaaaaattttatgtttaaaattttataatattgctttaaataaaaaaaaataaaaaaaaaagtaaacgaggaaatatggatctacaacagacggattaaatcatgtaaataaaacttaaaaaaggggatcaaaatggctgccaaaaaaaaaatcggatcaaaatgacatggaactaggtatgcatgtcaaaacaacttttaacagcatgaaaactttgacttttgaggttaagaaggatagagataccaaatttgcttgctcaaagaatatagtactacattgtttaaaaccgaaccgaaccaataacccaatatgtttattaatttaattaactaattatattaataatattgtaataactaaactaagtaattattatctacaaaattctaacctttaaaaatctaaggttctacttctaactaaataactaaactaaagtatttattatttctaaaactttaactcttaaaaacctaaggttatacttctaacttctaaaaaataaaactcaaaaaaaaactttcgtatttcatttgttctttcgtttatacggctaattgatttttttgaagtaaactaataccaaaccaaatccaaccgaactaaaactggttcaaacacaaaccaaaataacttcggttgagtatggttagagtattacaaaacccaaataaaccgaacccaaaattaaaccgaaatgcacccctgataaatattattactatataaaatatatataactttaataattacataataacacctaaaaatgacataaaaagcaaaaatcccataatcatattttctacaaaattgtaaaacgaaaacctttatctgcgcatccagggaatcgaaccctggtcagtaccgtgggagggtactatgataccactacaccagatgcgctatttctgacaaacaataatcgttttatatacttatatttacattttctcggttcaaaatcgttattcctgtaatatattgatccatcccacgatcttcttttcttggtcgtcttctgaaacgctaatcggatccagaagccatggacaaaagcatcagcatcacctccaacgttagcacgacgacttccatggaaaagatcgaccacgccgctagctggatcagcgcaaccgtaatatccgctttcttcacctccctcgaacgctgcgcctgcgtcaatctctccacctctcatgacgacgacgacgacgacgacgacgaatcccatcaccgtcctctcgctctctccgccgctcctcatccaaacgacaccgtttagctctgttttttaacctctggtaatttataaatttaatccctcgtttgtttcttttgataatcgattggtgtggatttgtaatttcttgatttgaaaatgtatgtctactgtgtgtaaatgtgcatgtctcagaatttgattgttttgcgtgtatctgactttatatacttgggtttaaaatcagaatgaatcatcgtttttgcatttacattgaaaaaatatcaagaagagaatttggtagagatcatttgtttgttttgaagttttcttttgtgatcaatgtttctcgatttacctttttcatttcatttctgatctctgcgttcaactattaaaaccggaacagcatcagtttcatgttttattttgtcaatgtgtcagagatcctgtcactttagatttcatagtttcaaaagtgattatttgatcatgtgggtccctgctgtgagaaccagtgggcactggcctttagtttggttaaaagcaggattcaaaacttcatactagtttctttgttctaaaatgtatttagcctttttcaaactcaagttgcacttgttgtacaaaagacacttttcttttgaatctaatttaacattacattcaaaaaaaaaaaaaacttcatactaagtaaatgtcgtgtttgatccaaacttttcccaatttgtttgcttagcagggtgcaatcttgtttaaatatctttgtcatgtataatgtgattccatctcttcatccatatagagaaaatcttgtttaaatgtcttttgtcatatgaccatattctcacttgggtttctagaaaaagttttgggttctttgagtttgttgaattggatctccttatggcttagaccgtcgttccaactgctgaagaagcaagtatgttgactcaaaacagtcacgttatatctctgtctctttgataattcttggcttttatgtgttgggtgcctagtatcatttgttttaaaggtttagggaacaaaaggtcataaactataataagaatactttttacaatgttatttcctcagcaaaagtagcacgcattcacattctccaagtttcatcatttgttatttatgaacgcaaacaaaaaaactgtactattaacaagcttttgttaagaaaaaagtaaggaaaccctcttaggatatgtatgtttcaacaataagcttatatctttactcattaagcccactagacaactttgtgagatagatcttataagaagcgtatcactttatccccgtgattacttctcaaaacaacgagttttgatttgtgctactttattaaattcacgttctgttttcagaaattttgttttttctgataggttcgtattgaaattgacctctttggaaactggatctttcataagatagaaagagaggtccccatttcccaagtttatcaaacaaaaagaaaaaaaaatctaaattgttctcatcttgagacaaccaatcagaatgaaccatctgagtcagccaaagggtttaatagtcaccatttgccaattgtattcatactctttcctttttggtgcgttattctaagagccctagtcagaattcaaacatttggca

SEQ ID NO: 6753 - DNA, 3000 bp, Unknown
  misc_feature (1)..( 3000): cDNA_ID_1808204_gDNA_ID_1621104_Annot_ID_55942 3000 nt of promoter + ATG
agtatatatcaacatcatcatgattctaaagatgtactttgggttgaatgttgaaagtgacgatggaaagcatactcaataaccaattttcaggaaataaaatgcagagacgagtgtattacttaagtaaataaggcagagatgatttcatgtgatatattttatttacataataaatgttaattttaatacacactaaatattgttaatcgaccttcacaaatacaaataaaaagtattagtccaaggaagccgtatgtatgtaggaaatgaaaatgggtccccattttcgttggctagccaatacaagtgctcttaaaagctgattttccattatctctatatttccaatttttccctttgtcttaaaccgaaagtgatttttactttttagtttaagtggttaagaaagtaacgttttcaatcttttttggacagatttttgcctttggcatatactctttaacattgccatgttgatgaggcgacaatatcgatatttttttttttcacaagtgtgattggtaattatatgagccacacaacttttctcatttggaattcatagtcaatcgacagtgtcagttgcataacaaaattcatagtttgatccaatattaggtcattgaactgaagcaagtttcttatatagaaaagtctctgacaaaactagagtactcgaagatactagatcaaaaagagtactttctacacattatctccaagaaaaaaaaaggtgggtaagaaaacactgattgagagtaagagttcaatattcactcgaactcacttttggataagcgtaatcgagctaccaacgtgacaatgagctggaatcttgtactcaagacacaacaaggacaatacgaaaaaggcaaggagggagagaagctttgcatccccaatcatctattgtcgtttgtatgaaagggaacacacatgaagctctcagatgtgccaaacaagagagataaagaaagcttcacataagcatcatggtttttgaatgtgttcaaagtttgtaaagaatgagattttttgtgtgaatttggggatataaacgacatgtgaatatgtgataaactgaatatattaatttcgttctccttctacaatttaacagaattttatttttattatttttatcaatttcatacttgtaaaactctctgtccttctcttattgatatttgatttgatttttttgtatagtaaatatgttcatccgtgagagatgcatgtgagctttatatgttcaacaaaatttcaagcatatataatcattggctgaatccttacaaaaacttataacaatatgacttaaaaacggtattggatgttacggagactgaattattgaaaaataattgatcattagcaaataataaccaaactaattagtaaacaaattaaatatatttttttgtctatgaccgtgttccaagggagaggagaagcgatccagcacgcggtgagtaaacctcacgtgcgtaaaccttctcacaagattcttctttaacgtttctacgagactaattacttccttattcatccacataccacattgcctctcctgccgttttcacgtttactgctctaactactcgttgtctccatgtacttactttatattgtctacggtagtcccaagaccgcgcttattccgagattgatataggaaatacaagtatttaaaaaaaattaggattagtaaatgaggaaagaataatgagataatgagtgacactaagtatacaactaatacgtcacgattgtataattgtcccctacaagtagtcaaaccttagcccttttgaccgttaatatcttgcatttgacgataatcttttccgtgttttgatctgtttccactgtacaaaactaaacgttaataagctcagtattgggtacgttagtaaaaaatcaatcataaaatataaaataatctcactttaagctccaaccagagactgacagctgttagttagtttgaatactcaatagtaatcaattaggtttgaccaaaatagcttcataaattattcatcaatccaataagtcatttaagtgataattaccaaaaggcacatgatagctctctaaatatagatataccaaaatcaatccataccaaaagttgatgatttctttccctctacaccatcgatatgttgaatagtttagattttttccaatatttgtttaattattatttatattgcctttatatatcaaaagtgaaaaaatccaaacaaaatcttgtcaaagaaattaacactggataaatatttagttatttttggataacttgttttgaaattgagtttaccattccaaaatcagcttaactttgtccaaaaataaggaaaaaatcagtctatatttaacacatgtattctttgtaaagattaaatctaaaattctttaagacaaacttgtgtttttttttctgtatacattgtttccctagtattttatgtttcatcgtaatgcagcatcttttgctaacctctctagtaggttttaaacaagaatgaatattgttgacaataatatcataataaaaatattatactgtatacaacaactagacctaccactacgaaatgatttaaaacaagaagagagtacaagaagaatatgataaatttaattttaaaaaaattcaccgatcgtattgataaaaaagttgtatctacttttctctctttttacctcatcaattaaaaagttgactataaataacacattactatttcttctctctcgccaggcggcgttgcctacaaaaacctgacaatcgaaacacagtttttctgataataatatagacatttaccattatgcccttctaactgaaaacggcaattacgttccttgttatttgttttcttccttctccttctgtttcttttttgtggctttaatttttttcatattaattcggaaagagaaagactcttcactcccataacagtcgccggtaacagaatcactccg

SEQ ID NO: 6754 - DNA, 3000 bp, Unknown
  misc_feature (1)..( 3000): cDNA_ID_1815477_gDNA_ID_1621104_Annot_ID_55945 3000 nt of promoter + ATG
gttttttttttattgtgagtgagtgatatatacgcatatggttgtgatcgcataaatcattgtgaacgcaccaaacattcaaatattgttcgtaaaatatatgacttgtaagcttcaacgcattgctagaacgaaaacaagattaataaaacagaaattgaaaaacacatgaagatcaaagatggtcaactcatatagaaccggatcatgttttaatttgcagtcttttcatgtccttttaactaaaccttcacactgtcaagttttccttggtcacatacacggatacaactagtttcaactttgcacctaggtctgaattatttgtctcaccttgtctcaaactagttacattaacaccaacaaattagtgattcattgtagatttactaaaaaacacgttatctctcttcgagaaagcccaagtccatcatcacttattgggccgagagatctgagtgctagtttggggttacttcacgatccaggaaacccgaaagtgaagtctgtcatgagggtggctgagacggcggttttgggatctgatccggctaacggcggagcttacttggcagggatggcgacggcacaggacaaagccgtggatctaaagtcacgtgggtatcacatgatactcggagctactgatgtgcctttgtttaagaaggcggtggttgacgacgtcaaaagttttaagcttgggtcttcgtaaatttattatgatatattttgacgtaattataagttttatatgatgatgaataagttgtttttgtcggagatgttttgtgccaaggatatgtatgtaagagcagcctcaacgggaggtctaagtagggtactaaacacaaaaagatctaaaaattaaaccatttgtttgtcgtagacgatatgtaatgaaccatttgtttttcgtagaacaattgaatttgaaagcaattttacttgttctctttgatacgaaagatgtttaaactacctgtgtcaaagaaaatctagattgtgagaatgagacaagagaaagcaattgctcttgaggatgaacctgacaagagacctgatgttacacaactgagctcttttacaatcttttcttgcctttacttggttgattttagtgcatggggttatctcccggagatcaattccacaagacaaaaagttagtagctcgtaagaacattaggcgtgattcttatctgaattagcctaattttggtacgattttcgaatggagaaagaaaaggtcggagatttcaaagcacaaccacgatcaagacgctctacgactatgttgattggcttgggatcttagaaagcaagagagtatagtttaatatcaaacttcctgaggacaatgtacggtaaagacaaactctcgatgtctctgaaagatacatgtctgcatcctcaggcgagtctcttcataagcaaaaaccagataattctcttttgtttcttcgtttttatgtttcgtatatgcatgagaatcttgagcgcttaggttagatataatgtaggggatcctctagagtcgacctgcatttggtactcatgaaaaaaaaaaaattggttgattatttttccaaacataaacgatatactagtaatcttgaatgcacaacacatcaatatatgaaaaaatcattaaaatctcaattaaataaagagctacattatgattaaacaaaaaaaaacttcatggcgaaataccgataaatatagcaggagcgatatgctattctatagaattaattttcataattagatagttcataatagaaaatagttaagaagcagtaggatgaacccgatcatgataaccaatacaaccccatagagcaaacgcgatgaggatgatgaccataaggatggtggcaacgattgttacgatgaacgaagtatccatattgtttcttcaccgcaccaaattttttatttttttctaacctttcctcgtgtcttcttcttcttgaaattacatttatattgtaagtaaattggaaatagtggaagtaatttacattttgtcatcaagaaacatactagcaaattttttgaaattttacatttagtctcttaaaaatattacctaggagtaaaaattttgtaagtaaatcgggaaaagtggaagcttttacatttgtcatcaagaaacatactagcaaaatctggaaaattttacatttagtcacttaaaaatattaactaggaatatatataatagaaattttacatcttttggtattttgttggtcgtcaaagtaaacatgactatgttgattcgcttgtgcggttgtacgaagacaatgtactgtagagacaaactcttgatgtcgacgctatctggagactgcagtcttagataaccttttcatcgagttggaaataattagagaaaccaaacaaaatgcaagaccaacttaattctcttctcttgtaattctggagcttaagttagagattgggtgttgtcatattaaatttgttaatcatactgattactttcactcacatttgttcttgttattgtttatgttaaatcgtcactcacattgtatgcacatgtcagattcagaccaatgttaaaagtgcattattttgtttggaagcgtgtgagaaaacaaaaagtttatgtacataacataaatccaaaagtactactcgaataaagtacaaactttatatcttttaaactccacgtaataactcatttttgtttgttttaatcaaaaattcaaacgtctaaaatttcgtcttaaataagaaatgatattaagaaaaatatctttggattaataacagatcaccgaaaattagaatatggttttaccaacccaattaaattctcaaattaattggaaagagaataatgttgacaacaacaaaaaggaaataaatcgcatgcaatgaaaggaatgaatcttcttcttcttcttctctattaacgcttcttcttcttctccttcttcatcaccctcctccacttctctcagtcaca

SEQ ID NO: 6755 - DNA, 3000 bp, Unknown
  misc_feature (1)..( 3000): cDNA_ID_1815474_gDNA_ID_1621104_Annot_ID_55946 3000 nt of promoter + ATG
gtacggtaaagacaaactctcgatgtctctgaaagatacatgtctgcatcctcaggcgagtctcttcataagcaaaaaccagataattctcttttgtttcttcgtttttatgtttcgtatatgcatgagaatcttgagcgcttaggttagatataatgtaggggatcctctagagtcgacctgcatttggtactcatgaaaaaaaaaaaattggttgattatttttccaaacataaacgatatactagtaatcttgaatgcacaacacatcaatatatgaaaaaatcattaaaatctcaattaaataaagagctacattatgattaaacaaaaaaaaacttcatggcgaaataccgataaatatagcaggagcgatatgctattctatagaattaattttcataattagatagttcataatagaaaatagttaagaagcagtaggatgaacccgatcatgataaccaatacaaccccatagagcaaacgcgatgaggatgatgaccataaggatggtggcaacgattgttacgatgaacgaagtatccatattgtttcttcaccgcaccaaattttttatttttttctaacctttcctcgtgtcttcttcttcttgaaattacatttatattgtaagtaaattggaaatagtggaagtaatttacattttgtcatcaagaaacatactagcaaattttttgaaattttacatttagtctcttaaaaatattacctaggagtaaaaattttgtaagtaaatcgggaaaagtggaagcttttacatttgtcatcaagaaacatactagcaaaatctggaaaattttacatttagtcacttaaaaatattaactaggaatatatataatagaaattttacatcttttggtattttgttggtcgtcaaagtaaacatgactatgttgattcgcttgtgcggttgtacgaagacaatgtactgtagagacaaactcttgatgtcgacgctatctggagactgcagtcttagataaccttttcatcgagttggaaataattagagaaaccaaacaaaatgcaagaccaacttaattctcttctcttgtaattctggagcttaagttagagattgggtgttgtcatattaaatttgttaatcatactgattactttcactcacatttgttcttgttattgtttatgttaaatcgtcactcacattgtatgcacatgtcagattcagaccaatgttaaaagtgcattattttgtttggaagcgtgtgagaaaacaaaaagtttatgtacataacataaatccaaaagtactactcgaataaagtacaaactttatatcttttaaactccacgtaataactcatttttgtttgttttaatcaaaaattcaaacgtctaaaatttcgtcttaaataagaaatgatattaagaaaaatatctttggattaataacagatcaccgaaaattagaatatggttttaccaacccaattaaattctcaaattaattggaaagagaataatgttgacaacaacaaaaaggaaataaatcgcatgcaatgaaaggaatgaatcttcttcttcttcttctctattaacgcttcttcttcttctccttcttcatcaccctcctccacttctctcagtcacaatggcgaccaaaaaatctctgaaatcacgtctccaagatggagaaaagcttctcggccactttcttctctccttttctccggagcttgcagagatcgctgcaagagctggatttgacttcattgtcgtctaccttgagcacggtgccggcgggattcgtgaagcgcttcactgcattcgagcaatcgaagccgctggttgctccactgtcctccgtgtacccgacattagtcaggcttgagctaagaaagcgttagatctcggacccgacggcattatgttcccaatggtcgaaaccggaagatctgcatccgaggcggtctcgttttgcctgtatcgtcctgacggtgttcgcggctgtgcttactccgttgtgagagactccagcttcggatttaacgaagggtatttgggtaattacgctgataagctcttcattatgtgccaggttcgatcctcaaatcccctttgattttcaattttattggacgaaattgttaaattgaattctaaaatgcctacttgtgaaaaaaatggaagttagaatttttatgcaattgatatattttgtgcagattgaatcagaggaaggtatgaaaaatgtgaaggagatcatagccgttgatgggatggattgtgtgatgatggggccgagagatctgagtgcgagtttggggttacttaacgatccaggaaacccgaaggtgaagtcggtcatgagggtggctgagacggcggtgttggcctctgatccggcgaatggtggagcttacttggcagggatggccacggctcaggacaaaaccggtgatctcaaggcacgtgggtatcacgtggtgctcgggtcaaccgatgtgtcgctgtacaagaaggctgtggttgatgaggtcaacgcttttaaagcgtagtgtcggaattagattagagtctgaataaaacgggaattagagtgctttgtaataagtgatgagtttatgtaccccatgattatcttctactttgttagttatgtctactactttgttagttttgacttttgagcaagtcttgttaagattcgcattatccaaaagaaaatttaaagccgcattaacagtgtttagctctggtgttactaaagaaaaagtgattatgcgggtcaaacacttctcaaatagtttgctttgatttctttggagaactgaaatgcatgccgtttcgaaatattagaatgcatgtcgtttcgtggatttcagtaccagtaaaggctaatgctgatgcatcgttgcattttaaaaatcgtgtcgtttttcattccgttttagtggccactcttcgcaaccagataagaactcgaagattttctttttctttatcaaa

SEQ ID NO: 6756 - DNA, 3000 bp, Unknown
  misc_feature (1)..( 3000): cDNA_ID_1815470_gDNA_ID_1621104_Annot_ID_55947 3000 nt of promoter + ATG
tcgggtcaaccgatgtgtcgctgtacaagaaggctgtggttgatgaggtcaacgcttttaaagcgtagtgtcggaattagattagagtctgaataaaacgggaattagagtgctttgtaataagtgatgagtttatgtaccccatgattatcttctactttgttagttatgtctactactttgttagttttgacttttgagcaagtcttgttaagattcgcattatccaaaagaaaatttaaagccgcattaacagtgtttagctctggtgttactaaagaaaaagtgattatgcgggtcaaacacttctcaaatagtttgctttgatttctttggagaactgaaatgcatgccgtttcgaaatattagaatgcatgtcgtttcgtggatttcagtaccagtaaaggctaatgctgatgcatcgttgcattttaaaaatcgtgtcgtttttcattccgttttagtggccactcttcgcaaccagataagaactcgaagattttctttttctttatcaaaatgcaatctttatctctgcaatcgcttccatggaaaccaaattcagtgactttacctgaaattaatcttttgaatcccaagcaattgactgcctcgagttctcagtatcgtagaactcgaaactggagaattagaagttcgtcggaagataatgtagcaatttcgagtgacggcggagatttgaagaattctctgtccggtattgtgggaaatcaagtggaggagctattgagcagagaagagaacaaaggtttgcttgatggtctggaaaaagcttcgttgagagtggagattgcgaagagagagctcgaagatatagagagacaagaaattgaggcgaaattgctacaggattatattaatcagctcgaatcaagagccgcagaggtgagagcttgttctcgaaatggtgttagatatgaaaatgattgaacatttgattcttttgctctttggaatttgaggtttttgggaggttctactatagagtatagattaaggttgcattgagaatgattggtttatattacaatggactagtgaatttgtgcagtatatatttatatgccaggataagctcaagttgtgcattgtatgcttaggataggataggtaattcaaagtatcaatcaatatcaatggtgttgcttttgtgcttgaaacctggaaatggggtttctcttagtttgtgtgaaggtacttcattagataaggttactaactaaatcatgagtttggttgcattttgtgttttctcgtgttttggaacaaagtctctagtttggttttgtatttgtagacagagcatgttaatcttattcaatatctgattcaagattgcagaatgccagcaggagattgacgcagcaagatcaatggttgaggaagcagaacgctccttgtcattagcagataactcgacaattggaagttcggagaaaggttattcgattgataaagacaaggagaggttagaatctgcaaaagcggcagtgatcgcagctgcggttgggaccattgcggaactcccatttgctctttctcaagtcgcaagcatggagcagcttgttctgcccctgggaatagcgtttgcaagctgtgcattgtttggagtcacattcaggtatgcagtcagaagagacttggatgataatcatctcaaatccggagccgttgcagcttttgggtttgttaaaggtaacaacacatttgattactgtttctatctaacttctttgaattgttcaaaagcaattgcgttttgtgattgaataagcttaacagaaatggtaaaagaaaaagactttctttgtctttgtcatgttatatattgtgtggaagtatgagctggcaaagttcccatcgttgtcccgccctttggttgtttttaaattataatctgccagtaatagattactaatcaacgatttgatttattctaaataattgatgagttgattattagtctctgacctgtattatttggatctgtctttttttaaaaacagatttattatagattcgattttttttaatgtgttatataggacttggtatgttgagcagaggaccgccattggagctgagctgggaaagcttgttttcacatgggatagacggcgccgttttggtgtctcagagcgtcttgatatttgcgtttgcgtccataggtttggacttctgtttcaagatgaagctcttaagaccatttcctagctctgactagattgaagagcaaattaaaaatgtagaaatgaacaaaatcttcttttgaagactttatttgtttttttttatattattaattttggtctaaaatgtaaatgtttcatcctagatttttatgatctttaacttgtcacaaaaaaagttacacctgattttaaaagcatgatcataaggaatattgaatttagaatgatgaatccatacataattcaaattttgctataaaaaatgaatcagttgggataattctttcttttaactttgtataaaaagttatgaggaatatttatctttgtcaagtgatgaagtgattagtgacttgtgaacttaaccaaagaggtagatggggtcaaggccattcctagccattcattatttatagtaaagccacgtgtaataatcttagaagcttacagatataccacgtcagcacaaaacagttcttttgtctttcgatcgctctcaaatcgcgttttgtcgtggaggtcaactgatcagaaaaatatagcaagcagaaagtgaaaaacagctgaattattatttttctatacaaaaaattaaaaaattagtatccaatttcaatggggtttcgacttgttctcgagtaaactactagtctctatctctctcagctccagattttgtttcttcttcttctgtgttaaattcatttgatttgttgtatctgaaggcgaaattactggtttctgatttttggtggtattcagggcggttttaaagcgacggaagaag

SEQ ID NO: 6757 - DNA, 3000 bp, Unknown
  misc_feature (1)..( 3000): cDNA_ID_1808803_gDNA_ID_1621104_Annot_ID_171528 3000 nt of promoter + ATG
ttgggggaagaatggaaataaatattgcggcaaaaagataatttaaagaataaaactacttatatccttttatcaattgggtaactatagttgtctacttgtctttgttgtcgtatacccctaattataggaccactcacctaggttcaaatgtcaaaacatatggactattaagttcattgttagtaagtgatatatagtaggcctaacttaatcggtggttatatagtttttaataaaacatgtgtgttttaccaaaagaggactacattttaaaaagactccaaagtgaaccccaactttttggaaatcaggaaccactccaataagagacacaatgctcatataaactcatgataatatatgtgagcatttgtctacatatcacaaacatagtcgaattaaaccatctatattcctttgtacggtctacaaaatgacacaaatttcaattatggtgataaaagaatggaacataccttcaacatcaagctcataatggcatttgtcgactaacaatagtttgcttttatcctgcttgcctctgtaaatgtgagcattaacctgatcagaaagaagtaaaaatgtgcgtacaagcaatgatagattcagagataagagtcacctctcaagaacagagttggaaagaaccgacttgtctacgtaaggaatcccaagaagcatcctcattgttggaatgactagaatttcaaactttgtgcatttctcaaacaaatcttagttgctgacaaaatcttacttgttaaatgcactcttgtatgagaaatatcacttcaaaaaatgatagacattttgtctcttcatattccattgtcttctgagtaaaaagacacgtcttaacgtgaacttggtctctcagagacattaatcaaacaagttgaatgcaaaactgcaagtaacaacaaaataaaatttgggcacaataggagaggaaaacaaacacgagcgactctgatctgtattacaaaaagactagtgtctagtgacataagatcgtcgatgatctgagatgcgacggacgtttggtatctgtacaatctctggctagggtttcttgacttgccgatcacgacaccttcagcctcgcatgggccgctataatagctcaataatggcccactactaaaaatccatatttctgttattgagtaatcaataacttaacacatgttttaaattccccgccaaagtatgatcatgagagagaacaaaaattatgaactttttaaaatggaaattgatcttcttcttctttttctggttaaaacattcaacatttgtattgtagtatatgtagtaaattttatggactaaacgaaagatagaaatatataggcaaatccaagggaaataaaaattctaaatatatatatgaaattgcatggactgccacgcagtacgataaccaaatatccaaatttatacaacaaagaaatagtattgcgtcaaaattaaaatacactcgggagtgaaagaaacaaatttaatttgatagaaagacatcataccccaaagatcatgtatgtcattttcttaacctacgtgatccgtaccgttttacagttagatgtgtcgattatttatttaacaccggaatgttaggaagtcttgatatatatttgtcataactagtataatggtatattagttgttgccttggtggtacgagtgaatagaatttttcacatataaggacgaatcaaccatatcgccattagaaaaccttatacgtccagaaacggcaatgtaacaaacaaacaaaaaaaagaattggtgatatattgtttattaaaacctctacgttggtctgaaaatagatataattgcgtgtcatgaaacaaagaaataaacgagttagataagaaataattggattagcaaggtttagaggaacaagaaatgattattcaaatggaaaagtaaatacttttgtaagaaaataaaagcttattgaaatgaagaattgtgcatgatcatttgataaagccaagtcatggactgattcttctgtttcacaggacggttcaaccaccatgcacctctttttctttgggcgtttaatgacacaaaccacatttatctttttatatccttttttgttttgaatttatttggttacaactgttatttacctcttttatcttccaatctttctcaatttctaagttttttccatactaagtattttgttcatctgaagaatctggcacctttgtacattcaagaaagttttaaatgttttcactgcaagacaaacaatactgtgtgtacaattatgatagaaaacatttatatatggagaataatatagtcatgtgatacaattatgtaccacatctatacatatagaagaaacaaaaaccaccaatttgtcactcccaacttcattcacaactcacaagttaagaaaatacacatagtttctcttacacgcattactatggaaccttctgaattcgtttccagcaaaagttattttcttatttcaaaaataagttccatttttttatgtataaaaaataaagttaattgcaataaattcgccatcttcctatcaacatatatagatttttcgacaaattcatataaggagagtctaaaattaactcacagccacatgttatttagccaatgtttttaataccagaccggtcaaaccggtggatccgtgaccttatatagtaattctagagtctttaacaaaatctcaacttatgacatcatattatatattaatcacgtatcatctatagactatatacattcatacgactctctgattcttcgtttctctccataatatctcctagtctcaactctcaaatagagagagaaaaacagaaagacagagagaggttctatatattatagataaagtacattacacaattgtacaagtggaaaaatcatcacggatctctcttcaaatatataaagaagatttgtatatcaaactctctaagcttttgttgagccatg

SEQ ID NO: 6758 - DNA, 3000 bp, Unknown
  misc_feature (1)..( 3000): cDNA_ID_1815462_gDNA_ID_1621104_Annot_ID_171527 3000 nt of promoter + ATG
ggactaagattctcaagaaatcaggatttgttgcgaaaccattcacaagacaagagaacacaatgattcagacatctgctgttgcttgttacggcatcgctgtcggaggttaatttaagaacataaatttgcttttatttatttcttaatagtttattttcttgcgaaacaagcaaagattcagtgaaaggatctgtgaaacagttccaaacatactaaaatatattaactttttgaaaaacttttgggttagttgagtcacaaaaaagggttgatattgcttttgcttttgggtatgatataaaatctaagttgtaaaattttgatttaaaatatttgagtatttgtttttctttttcaggtgggtttgcttcatatcttctggggttaaaccataagacatatgtgttgtctggtgtgaacttggaaggtaactctccaaagagtgtgaaagaacctggccttggttggatgactgcttatctctttgttgtctgtttcatcggtctttttgtcctaatccctctccgaaaggttatgattgttgaccttaaattaacatatccgagtggtttagctactgcggttctcatcaatggcttccacacacaaggagatgcacaggccaagtaagttcattaacctattttacaaaaagtgatattgttacataagtttcctaatctttaattggaatcgatttgcaggaaacaagtgcgtggtttcatgaaatacttctcatttagtttcttgtggggtttcttccagtggtttttctctggtattgaagattgtggctttgctcaattcccaacctttggtttgaaagcttggaaacaaacgtaagcattaattatacaaaaacaaaacaaaaatatttcagtgaaacgagttcttgaatcatataataactaaaaacttttttttggtaggttcttctttgatttcagcatgacatttgtgggagcaggaatgatttgttcacatttggttaacctttctttgcttttaggagctatcctctcttatggcttaatgtggcctcttcttgataaacttaagggctcttggttccctgataatctcgacgaacacaacatgaagagcatttacggctacaaagtcttcttatccgtagctctaatcctcggcgacggtctttacactttcgttaagatcctctttgtgaccattgccaatgtcaacgcaagattgaagaacaaacctaatgatctagatgacgtaggtcacaagaaacaacggaaagatctcaaggaagatgagaatttcctcagagataaaatcccaatgtggttcgcagtttccggatatcttacattcgctgcggtctcaaccgtcgtggttcctctgatatttcctcagctcaaatggtattacgttattgtagcttacattttcgcgccttctctggccttctgtaacgcttatggagctggacttacagacattaacatggcttataactacggcaaaattggtctttttgtcatcgcggctgtgacgggaagagagaacggagttgtagccggactcgccggttgtggactgatcaaatccgttgtttcggtttcttgtattttgatgcaagatttcaagacggctcattacacgatgacgtcacctaaggctatgtttgctagccaaatgattggaacggtcgttggatgcatcgtgacgccgttaagtttctttttgttctacaaagcgttcgacattggaaaccctaacggagaattcaaggctccttacgctttgatttacagaaatatggcgattcttggggtgcaaggcttctctgctctgcctcttcactgtctccaaatgtgttacgggtttttcgggtttgctgttttggtcaacgtcgtcagagatcttactccggcgaagattggaagattcatgccacttccgacggcgatggctgttccgtttcttgtcggagcttatttcgcaatcgacatgtgtgttgggactttgattgtgtttgtttgggagaagatgaatcggaagaaagcagagtttatggttccggcggtggcttcagggctaatctgtggcgaagggctttggactttacctgcggcggtgcttgccctcgccggagtaaaacctccgatatgtatgaagttcttagcttcataggatcagtcaaagagataagaagacttgtgaagttagagtacttagaagacgtcaatgatattaaaatcatcctattcttagaataacaggtagacttctgaacaagaacatctcttcttctaggaattaagactaaaatctacttacatccggatgattcatgctctgttttttggtttggtataatttgtcaacacatctagatctgttccatttccggttatcttctattgggttatctctgaaactgttatgggctcggcccataaatttaaaccttggtgtaacaaaaagtaataaaatcagctatttaatcctatatatttgtttctttttttattatataggaagaaatccttgcctttagattgcatacactagaattttagtattttcaaaaaagaacactatatttcaaataaaaatggtatatatgataagttttgttaagatattatattcaataaattgcctaattcaataagcatattttagtaaaaaatcgcaaaatattcatcatctactaaacaggtcaagatgtatttgactatcttaagaaagaaatattaattcactttgaccaaataaatggacaattaggtaaccaaacaaaaaccacatgaaagtaacaagacagagaattaggcaaaccaaataaataactcacacaacccaccgctcaaccacctaccccttgtaatatatctctccccttcttctttttatttcattatcttccaaaatcctcaccacaaaacattatataatttcctcttcatatttcaagaaaactttaatctttttttgtgtgtagaattctatatttctggtaactaa

SEQ ID NO: 6759 - DNA, 3000 bp, Unknown
  misc_feature (1)..( 3000): cDNA_ID_2123342_gDNA_ID_1621104_Annot_ID_171526 3000 nt of promoter + ATG
tgctggttttgggttctcttttcaactcacacttcttcaaaagcgaatttgcttgtaacatgttaatataaaattattattaaatctataggattgtccttaatgggccggccttttacgatataaaatttggttcaaataaatgtcgaatacgtcttttcgttcagcccatgaattgactaaacaaaggggattagaatccaaacaatcaaatttcttctatagtttagtttagaacaagaccatgaccatgaccaatattatatatatcgattattcgtttttatatgttctatatgcttaaaccaaacttaaaatgtaaaagaaaaacactgtgaatcattttcagagttatgatgtattttgttaggaaaccaaacccctgttaaaaactaatactgaaagtctgaaactatgacgatattcactttcaattggattttttttttctatttgatttaaggaagtacttttgaacccgaaaactaactgaaacttaaccacacacaaaaaaaaaggatttgtatcttatattgaacactacagaatttcgacattagattttttatgattttggttttcataagagtttaaaaatgtgatcatctgttttggacactgcaaatagagattttaaaacaataaaccaagtagatataatagtccgtatagtttgtccttatatataacattataggtgtaaaacacggactacataaaagtggacacataaatgcaaaattgttactacgaaactttacactgcatgtgactgatattttacgctcattacatttggatcattcgtagtgataaattaattcagggtaacatggcaagtaagtgagaacgtggtcattaatttcccccaactagttactaaaataactaaggtaaccttcgaacaaaaacaaaactttggtaaaccaaaatacaaaaacttaggtaacatgacaatgaaagtaaagaatatatagtacttgttgataagaatatagtactcgttaataaaacgctgtcggtagaagcgggtttggacgcaatcgcaggaattagatggaaaacaaacaaaaaagaaaaagaaatagagttttagcaaagagtcaaaaagagtcattttcatatatagtttggggtcaatgtagggctataggaggataagttgtgactttaagagtgaatgagattctttctcaaatgaatggtgtcaaggactagtattcattttttcttctttcgtctccatccacctatcaatatccccaatcttttttacatttttgaaatgttttttgttttgttttgttttcctcaattttagataataagtagacgaatctaatccctactaggcctaatccctatataatacacgcattttatgtcatattagaaagcaacatgttagttgaaaagtttaaagtgttttggtttcagctttgtacccactattagattttaattactaatttttttttgtaactgatttatcgtttttagtattgatagatgttaggaactttatatcaaaaataaggtgagacctaatgtataaaagagaagcaatcaacacattaccaattcagtttaaatagaaaatttgctaaacttaaccccgcatgcccttgcgtaaagcattcaaagcacaagtgaaaataaacccacacttcagaagttatatgttagtcaattgtctaattttgattgctattttccttttctctttctttattttcttcatcgccgatgtggtgttccacaatctattattcacgtttacttaggttttgttaatatatattttcttcccctcctacgtgttttcaacatattttcattaattttctctattttcattctgggaattagatctttaacatcgtcactactcatcactgtcaccagtaatgagaaaaaatacaaaataaaaccacacactctcaaagctggatttcttgtcattgaactatcgctaattaatactgtggaactcgtagaataatcaagacgaagggattgcgtagaaagagaaacgaaaaaaaagaaagaagaaagtgcattgtccttgtcatgacatgtggaagtatcggtcttatatggtccattgagccacactcatttagaatctcactactttttcaccattttcacatctatacacgattatagcatctatatacatttactttttcaattattctgctattatgggttttggatattcatgtcctaatcattataattctcttaaacaaatatcgaatttcgaatattttttaaggttattggctatatgtactatatttctatagaatagtttttgttaatatcatcgatcgatcttcagtcttattttgaactatctaatatattcagtggcttttcatatggacataaaacctaggccagtgtcgaaagttcataaacttcgaagtcaaaactagctataatggttatctttgaaaagtaactcaaatataaggagagtagaaattctacacgtaatgctgtccgagacatttaattatggacgatgtgattgcagaaacaattttgttttcaaaccctctcttgatcaaaaaggacatttaaatcattgcatccacttcaaccacacacattcatttggctgtaataacatttcaaagattcttacaaaacaagtgaaatgtcattaaatgtccttttagaacaagatgctaacgacaatctacttggccacttgacttgtataccaaatttctcccaactttttgttcacagaatttgcgtttacaactttggcgtttgtgttttgacggattcgtctaagtgggacaatgcgcgtgtcggacatgcgcacttaagagggtagagacagtgagttctttagctttccttatattctctttcaaaccaaaaaagagactactattttttgtacacttagactaaggaaagcaaagtttcatattcctaaaaattctggttttataagtatcaaagacaaattcagtctcc

SEQ ID NO: 6760 - DNA, 3000 bp, Unknown; identical to SEQ ID NO: 6756
  misc_feature (1)..( 3000): cDNA_ID_2175659_gDNA_ID_1621104_Annot_ID_171523 3000 nt of promoter + ATG

SEQ ID NO: 6761 - DNA, 3000 bp, Unknown; identical to SEQ ID NO: 6754
  misc_feature (1)..( 3000): cDNA_ID_1815477_gDNA_ID_1621104_Annot_ID_171521 3000 nt of promoter + ATG

SEQ ID NO: 6762 - DNA, 3000 bp, Unknown; identical to SEQ ID NO: 6753
  misc_feature (1)..( 3000): cDNA_ID_1808204_gDNA_ID_1621104_Annot_ID_171517 3000 nt of promoter + ATG

SEQ ID NO: 6763 - DNA, 3000 bp, Unknown; identical to SEQ ID NO: 6752
  misc_feature (1)..( 3000): cDNA_ID_1815488_gDNA_ID_1621104_Annot_ID_171515 3000 nt of promoter + ATG

SEQ ID NO: 6764 - DNA, 3000 bp, Unknown; identical to SEQ ID NO: 4715
  misc_feature (1)..( 3000): cDNA_ID_1815496_gDNA_ID_1621104_Annot_ID_171513 3000 nt of promoter + ATG

SEQ ID NO: 6765 - DNA, 3000 bp, Unknown
  misc_feature (1)..( 3000): cDNA_ID_1395585_gDNA_ID_1621104_Annot_ID_171532 3000 nt of promoter + ATG
cgttgagaaacttagagaggagactctcagagacaggagtcatcttgaggaacttctttctatatgcgagagtacttgagcaaaacttatttcttctttctttcttcataatttagttattaccaacaactaggtatatattgaatttgtggatttttttgcagctcagaggaagattggagagacatctttaaatgagattagctccagatctcatcagattctccgactggtactcactttcatatcttttttttttccccctttttgcattcttgatgaaagtttttgttcatgcagacaattgaaagctcgagtcaacaattttctccagagagctcagcgactcttgcagcatcagtgtgctttgttgatctagctggaagtgaacgtgcttctcagacattatctgctggttcaagactcaaagaaggttgtcacattaatcggagtttacttactctcggtactgtcatccggaaactaaggtcacttttgcaccaatttagtaattctttgctaggtctcatatcacttcatctttgagctgatatgagtcttttattgaaattactacagcaaagggaaaaatggacatataccatatagagactcaaagctaactcgtatacttcagaactcattgggtggaaacgcaagaacggctatcatctgtacaatgagccctgcacgtagtcatctcgaacaatcaagaaacactcttctctttgcaacttgtgctaaagaggtgaccacaaatgctcaagtcaatttggttgtgtctgagaaagctttggtgaagcaactgcagcgggaactggcgagaatggagaatgagttgaagaatcttggacctgcttctgcttcttcaacctctgatttctacgcgttaatgctcaaacagaaagaagagttgattgcaaagatggaggaacaaatccatgaacttaaatggcaaagagatgtagctcaatctcgggtcgagaatttgcttaaatcaacagcggaagagcggtcatcttcaagttcaatggatagcagaagaagaagaataagctacgattcaacggattttgatgagcctcgaatgctaaataacttggggaagagtaacttgtactctcctgatgaggatggtttcctgctggatgatactacccctcaatttccggggcataacctacatgataaatgggaggagatggctcaaagcaccacccaagaaccagaagatgcttgcaaagaagttagatgcattgaagtaaacagtggagaagcagaaagagttcaaatccaagactcactagatgacattgttgaaaagaaggaatatgaacaaaactatgagtcccaaaaggatgatgctgattcatctataaaaaacatagatatggagttgagtttatatactaaacctgaagctgaagatggggtaagtgtaaagaaattaatagaagacgtccaagagactgagcaatctgtggagaaacaaaagcaatctccaaagaaagaagaaatggaacagtatttgtctagagatatgtcagagcaagtaacgaagtcactccctgaagaagagcaatgtgtacaagaatatggagcctatgataaacttgaagctcaagatgtgctaactataaacaagttagaagaatcccaacagactgagcaatctgtggagaaggaagacacaaaaaagaatttgtcttcaaagaaagaagacttaaaacagaatttatctatggatcagtcagagcaattatataaatcacctccagaggatgagaaatgtgtagaggtgtatgaagggtctgataaagacgataatacatatgaggctctgaagaaaaaggtcaaggaaatgcagaagacaattgagtactttatgagtattcaatcagcagaagagaaacaatctccttcgtttaatattatagatgatactttgagtccaggagagtatttcaagatgagaagaagccgaagttgcagagaaaatctcttgtttacaaaggcggcggctgctgctgctagtagaggtttcatattcgagaccactaacacatcctttgattcagatatcactgtctccatggacgcacagagcatcaaagattctgatacagagactagcagtagcagcttccatgaatttatggcaggacttagagaaagaacaatgcagcaccattccacgcatagcgacgatactgatacaaagacgatgaagccagaaaacacagatgatggcggcgagaaaacagagtttgagagacaacaaagccaaataattgagctttggcaagtatgtaatgtacctttggttcacagaacatactttttcttgctcttcaaaggcgatccatccgactttgtttacatggaagtcgaactccgaagactatcttttctaaaagactcgaccgagacatcgaggaaacaaactgccaaagcagtaacacgcgagagggaatggttagctaagcaaataccaaacaagtttggaaagaaggaaaaagaagaagtttacaagaaatggggtgttgaattgagctcaaaacggagaagcctgcaagtaacacacaaactatggaacaacaacaccaaagacatagagcattgcaaagagagtgcttctctaatagctacattggttggattcgttgactcaactctaacaccaaaggaaatgtttggcctcagcttaacacctacaacattcaacatcaaaccctcctctggctggaaattttcaaactctttctctcgtattagcttcactggatgataaataatgaaagcagaaatattcagtctttgtgtgtattgtgaaagatgagtatgtattgattggaatcaaactcaatgaacagagccaaaaaaaaaaagtcgtatatataaagaaaaaaaactgactttgataaaagagaaaactttatagtttatagagtgtagattagataaagctctgaccttggaacgattttgccggagcttgca

SEQ ID NO: 6766 - DNA, 3000 bp, Unknown
  misc_feature (1)..( 3000): cDNA_ID_3048879_gDNA_ID_1621104_Annot_ID_171531 3000 nt of promoter + ATG
tttagccctgtttctgggtcattgtttcttagaggacgaaatgtaaaaggagagttttttaggttctatattagggatacgctgcttattagctcttttgggatgattactcttcaggacgccttatgtacaagagcaagtcagtattggttcaggaccaccaggttctaaaatcaggtggtttaggtctacgagcaatgagtcacgttacatcaacactgttacatttgatgccaaggagggagctcctacactcgtcatggttcatggttatggtgcttctcaagggtttttcttccgtaattttgatgctcttgccagtcgatttagagtgatcgctattgatcaacttgggtaagcaactttggtatcattcaacttgtcttcctcaactgtattagtcacaatatggccttttggttgcttcaagtgttaaagatttcatgctgttgccatcacttgattttaatgtcttaaaaatcgaagacaggatattgctgcccattttaaactacttgtatacattgtgaatgtataataaggtagttctctctttttcttcgtaggtggggtggttcaagtaggcctgattttacatgtagaagcacagaaggtatttattccctctactgttaatgaatcgtggctaaactttcattggtaccctctcagtctcttaatggcttgtatatgagttgatataccagtaatgaaactgcattgttccttctttaattgtgcagaaactgaggcatggtttatcgactcctttgaggaatggcgtaaagcccagaatctcagtaactttattctattaggacattcttttggaggctatgttgctgctaaatacgcgcttaaggtgaattctcatatttggtataactaaattagtaagtggtgacagtttttgattattatgatatctgacttttcattgggcatatctctggatctttcagcatcctgaacatgttcaacacttaattctggtgggatctgctgggttctcagcagaagcagatgccaaatcagaatggctcactaaatttagagcaacatggaaaggtgcagtcctaaatcatttatgggagtcaaatttcactcctcagaagctggttaggtatgctcatataatcatttcccattcaccaataggttgattagatagatactcatttcgttgatacaaatttatggcactcaattgagcatgggaacacttattcgatgaaattagttggcaggagtaatatattcactatatttctgtaaatgtgctttgtgtgcagaggattaggtccttggggtccaggtcttgtaaatcggtatacaactgcaagatttggtgcacattcggagggaactgggctaacagaagaggaagccaaattgctaaccggtaagtaattgtttctttaagttccatagaagttatggagagtgataatgcaatcgctgatagtgatggttcgttttgcaatgtagattatgtgtaccatactttggctgcaaaggctagtggagagttatgcttgaaatacatcttctcatttggagcatttgctaggaagcccctcttacaaaggtatgtccaccaaaaacattgctgataaagtttctgcatactcacactcgatgactcctcttttgtgtgcagtgcatcagagtggaaagtgccaacaacgtttatctatggaatgaatgattggatgaactatcaaggtgcggtggaagcgaggaaatccatgaaggtcccttgcgaaatcattcgggttccacaggtaaatctctaaacacattcatttgttttctcatttaagaggtgaatatagagaagaagatgacgcttacaagagattttgtttgatcgcagggtggtcattttgtgttcatagacaacccaattggttttcattctgcagtgctttatgcttgccgcaagtttatatctcaagactcctctcatgatcaacaactcctagatggtctacgattggtttagtcatagtatcttgttccttttaccttccaaatttattctatatgtgtatacaagtatatatgaaaaagaacataaaaaagaattactttctttatttgaatattcggttgtgtattggagtttcaagtcctctttccatgtctaaaagttctatttgtaacgttcttgatttcactctaaaacctcttaaagtgtttcaaatgtgatctcattatcgacatccaagttgtaatctttcacaatccacaataatcttttatctcattttttacattttacatatgaaacaaaattatatgtgcttgaaatggggaccactaggtctggtaaattcttattgttttagacttttagtcatcaacataaggttaactttccttgtacagcaaggaaatagtgtatttaccgtagcgggaagggtaaagagaggttacaatttggcatcattcttattttagtagagagacctggacttggtggtcgaaacatttccaatggccatgccgacatgttctctctcagacagctcaatcagctgaaaacttgaggaagaagaaactagagagggttttttgacctgattatttattttggctgactcattcttctcacatcccaacaaattttcgttgatatctgtctctgtcttcatttccgacatggaatttgttcaacatcaattcttttctttagctttatgatccctcacaaataaataatgtccctctctcaatttgcagcaaaccgctgacgatcaaaaggtgagccaagtcttttacatgtcgataattaggtttggtcaatgaaatgtttgaatgtttcattcttggtttctgatacgatgagaagaagtttggtttcaacacatttttttgttgttgttgtgatatctaaattctgatcatttcaatttgatcaaatgatcatcaactgatttaagcatccttaaatgggtttggatttgcacaatagagaaatatagaaagcaaggaaag

SEQ ID NO: 6767 - DNA, 3000 bp, Unknown
  misc_feature (1)..( 3000): cDNA_ID_2123338_gDNA_ID_1621104_Annot_ID_171529 3000 nt of promoter + ATG
ggagatatcctccagctcaatcttggaacgtccgctacaagaaaatcaaacgaaagtaaatttcaaatattctactcctagggaaatattggccagtagttctaaaaaaaatgcatgtcaaatgttatagtaaatatgttaaatgatagtaagatatttcgttgaggtaaaaaaaaacagaacaatcacatgtaatgatgtaaaataaatagctatagattatatgagttttatttatttattatagatatctattatatattagacgaaaagattcattattgtctcttgaaatattacggttaataaaacctgtttagaggctctttttaataaacacatctttgaacaattctgatatagtgatatgagtacattttgcattaattaataaaacataaacaataatgaatatatatacccgagttcttgaagcggagaaagagtgaggatcttggactcgccattattgtgagacaaaaggatcttccctcgagttgtggtgatgggttccttgtccgacaagcaatagcaaggcttccactcggcttcgaagagataatcagctgctttgtagaggagacaaagaaatgaatcaacgatgtctaagatacagaacacgacgaagctaacggcttcgttcagccatgttcctgctacggtcgctgctccttttatcttcatcacagccatggctcaacaaaagcttagagagtttgatatacaaatcttctttatatatttgaagagagatccgtgatgatttttccacttgtacaattgtgtaatgtactttatctataatatatagaacctctctctgtctttctgtttttctctctctatttgagagttgagactaggagatattatggagagaaacgaagaatcagagagtcgtatgaatgtatatagtctatagatgatacgtgattaatatataatatgatgtcataagttgagattttgttaaagactctagaattactatataaggtcacggatccaccggtttgaccggtctggtattaaaaacattggctaaataacatgtggctgtgagttaattttagactctccttatatgaatttgtcgaaaaatctatatatgttgataggaagatggcgaatttattgcaattaactttattttttatacataaaaaaatggaacttatttttgaaataagaaaataacttttgctggaaacgaattcagaaggttccatagtaatgcgtgtaagagaaactatgtgtattttcttaacttgtgagttgtgaatgaagttgggagtgacaaattggtggtttttgtttcttctatatgtatagatgtggtacataattgtatcacatgactatattattctccatatataaatgttttctatcataattgtacacacagtattgtttgtcttgcagtgaaaacatttaaaactttcttgaatgtacaaaggtgccagattcttcagatgaacaaaatacttagtatggaaaaaacttagaaattgagaaagattggaagataaaagaggtaaataacagttgtaaccaaataaattcaaaacaaaaaaggatataaaaagataaatgtggtttgtgtcattaaacgcccaaagaaaaagaggtgcatggtggttgaaccgtcctgtgaaacagaagaatcagtccatgacttggctttatcaaatgatcatgcacaattcttcatttcaataagcttttattttcttacaaaagtatttacttttccatttgaataatcatttcttgttcctctaaaccttgctaatccaattatttcttatctaactcgtttatttctttgtttcatgacacgcaattatatctattttcagaccaacgtagaggttttaataaacaatatatcaccaattcttttttttgtttgtttgttacattgccgtttctggacgtataaggttttctaatggcgatatggttgattcgtccttatatgtgaaaaattctattcactcgtaccaccaaggcaacaactaatataccattatactagttatgacaaatatatatcaagacttcctaacattccggtgttaaataaataatcgacacatctaactgtaaaacggtacggatcacgtaggttaagaaaatgacatacatgatctttggggtatgatgtctttctatcaaattaaatttgtttctttcactcccgagtgtattttaattttgacgcaatactatttctttgttgtataaatttggatatttggttatcgtactgcgtggcagtccatgcaatttcatatatatatttagaatttttatttcccttggatttgcctatatatttctatctttcgtttagtccataaaatttactacatatactacaatacaaatgttgaatgttttaaccagaaaaagaagaagaagatcaatttccattttaaaaagttcataatttttgttctctctcatgatcatactttggcggggaatttaaaacatgtgttaagttattgattactcaataacagaaatatggatttttagtagtgggccattattgagctattatagcggcccatgcgaggctgaaggtgtcgtgatcggcaagtcaagaaaccctagccagagattgtacagataccaaacgtccgtcgcatctcagatcatcgacgatcttatgtcactagacactagtctttttgtaatacagatcagagtcgctcgtgtttgttttcctctcctattgtgcccaaattttattttgttgttacttgcagttttgcattcaacttgtttgattaatgtctctgagagaccaagttcacgttaagacgtgtctttttactcagaagacaatggaatatgaagagacaaaatgtctatcattttttgaagtgatatttctcatacaagagtgcatttaacaagtaagattttgtcagcaactaagatttgtttgagaaatgcacaaagtttgaaattctagtcattccaaca

SEQ ID NO: 6768 - DNA, 3000 bp, Unknown
  misc_feature (1)..( 3000): cDNA_ID_1815466_gDNA_ID_1621104_Annot_ID_55949 3000 nt of promoter + ATG
actcacacttcttcaaaagcgaatttgcttgtaacatgttaatataaaattattattaaatctataggattgtccttaatgggccggccttttacgatataaaatttggttcaaataaatgtcgaatacgtcttttcgttcagcccatgaattgactaaacaaaggggattagaatccaaacaatcaaatttcttctatagtttagtttagaacaagaccatgaccatgaccaatattatatatatcgattattcgtttttatatgttctatatgcttaaaccaaacttaaaatgtaaaagaaaaacactgtgaatcattttcagagttatgatgtattttgttaggaaaccaaacccctgttaaaaactaatactgaaagtctgaaactatgacgatattcactttcaattggattttttttttctatttgatttaaggaagtacttttgaacccgaaaactaactgaaacttaaccacacacaaaaaaaaaggatttgtatcttatattgaacactacagaatttcgacattagattttttatgattttggttttcataagagtttaaaaatgtgatcatctgttttggacactgcaaatagagattttaaaacaataaaccaagtagatataatagtccgtatagtttgtccttatatataacattataggtgtaaaacacggactacataaaagtggacacataaatgcaaaattgttactacgaaactttacactgcatgtgactgatattttacgctcattacatttggatcattcgtagtgataaattaattcagggtaacatggcaagtaagtgagaacgtggtcattaatttcccccaactagttactaaaataactaaggtaaccttcgaacaaaaacaaaactttggtaaaccaaaatacaaaaacttaggtaacatgacaatgaaagtaaagaatatatagtacttgttgataagaatatagtactcgttaataaaacgctgtcggtagaagcgggtttggacgcaatcgcaggaattagatggaaaacaaacaaaaaagaaaaagaaatagagttttagcaaagagtcaaaaagagtcattttcatatatagtttggggtcaatgtagggctataggaggataagttgtgactttaagagtgaatgagattctttctcaaatgaatggtgtcaaggactagtattcattttttcttctttcgtctccatccacctatcaatatccccaatcttttttacatttttgaaatgttttttgttttgttttgttttcctcaattttagataataagtagacgaatctaatccctactaggcctaatccctatataatacacgcattttatgtcatattagaaagcaacatgttagttgaaaagtttaaagtgttttggtttcagctttgtacccactattagattttaattactaatttttttttgtaactgatttatcgtttttagtattgatagatgttaggaactttatatcaaaaataaggtgagacctaatgtataaaagagaagcaatcaacacattaccaattcagtttaaatagaaaatttgctaaacttaaccccgcatgcccttgcgtaaagcattcaaagcacaagtgaaaataaacccacacttcagaagttatatgttagtcaattgtctaattttgattgctattttccttttctctttctttattttcttcatcgccgatgtggtgttccacaatctattattcacgtttacttaggttttgttaatatatattttcttcccctcctacgtgttttcaacatattttcattaattttctctattttcattctgggaattagatctttaacatcgtcactactcatcactgtcaccagtaatgagaaaaaatacaaaataaaaccacacactctcaaagctggatttcttgtcattgaactatcgctaattaatactgtggaactcgtagaataatcaagacgaagggattgcgtagaaagagaaacgaaaaaaaagaaagaagaaagtgcattgtccttgtcatgacatgtggaagtatcggtcttatatggtccattgagccacactcatttagaatctcactactttttcaccattttcacatctatacacgattatagcatctatatacatttactttttcaattattctgctattatgggttttggatattcatgtcctaatcattataattctcttaaacaaatatcgaatttcgaatattttttaaggttattggctatatgtactatatttctatagaatagtttttgttaatatcatcgatcgatcttcagtcttattttgaactatctaatatattcagtggcttttcatatggacataaaacctaggccagtgtcgaaagttcataaacttcgaagtcaaaactagctataatggttatctttgaaaagtaactcaaatataaggagagtagaaattctacacgtaatgctgtccgagacatttaattatggacgatgtgattgcagaaacaattttgttttcaaaccctctcttgatcaaaaaggacatttaaatcattgcatccacttcaaccacacacattcatttggctgtaataacatttcaaagattcttacaaaacaagtgaaatgtcattaaatgtccttttagaacaagatgctaacgacaatctacttggccacttgacttgtataccaaatttctcccaactttttgttcacagaatttgcgtttacaactttggcgtttgtgttttgacggattcgtctaagtgggacaatgcgcgtgtcggacatgcgcacttaagagggtagagacagtgagttctttagctttccttatattctctttcaaaccaaaaaagagactactattttttgtacacttagactaaggaaagcaaagtttcatattcctaaaaattctggttttataagtatcaaagacaaattcagtctccatggaaatagagcaaagaaggatc

SEQ ID NO: 6769 - DNA, 3000 bp, Unknown; identical to SEQ ID NO: 6758
  misc_feature (1)..( 3000): cDNA_ID_1815462_gDNA_ID_1621104_Annot_ID_55950 3000 nt of promoter + ATG

SEQ ID NO: 6770 - DNA, 3000 bp, Unknown; identical to SEQ ID NO: 6757
  misc_feature (1)..( 3000): cDNA_ID_1808803_gDNA_ID_1621104_Annot_ID_55951 3000 nt of promoter + ATG

SEQ ID NO: 6771 - DNA, 3000 bp, Unknown; identical to SEQ ID NO: 6767
  misc_feature (1)..( 3000): cDNA_ID_1815458_gDNA_ID_1621104_Annot_ID_55952 3000 nt of promoter + ATG

SEQ ID NO: 6772 - DNA, 3000 bp, Unknown
  misc_feature (1)..( 3000): cDNA_ID_1830973_gDNA_ID_1621104_Annot_ID_55953 3000 nt of promoter + ATG
tccaagcaccctcctttaaaacgccgttacacttaacggagctttatcctcatcttcatggtacgatgtagtttgagaatgagacaaaaagagaagacgttacctaaggtcgaagtaaaagcttttgaagaggcggtgtaatggagagagtgttaacggcgttagtgtaggaaacgacaacgtgggatgctgctgtctgtgtcagggagaagagagagagagagttaatgaagatttttgtctgtattctgaaacaaggtcgaatgttggagactaaggaaacaaaaataaagctttttgatggcttatgagtctttgaaatagctacaccgctcctctcaccttagtctttaacctaataacccccccccccccccccccccccccccaattttctctccctatcctctcatttttgtagtgcgcactgagagagacaaaaaaacaaaaaaagatggagcctttgtttttaaggttttctttatgttgaggacattaggctaagacaaaaagctctgttttctttctttgttggatttttgggtgttgcttgtttgaagaaataaagctttgagtatctccaaggtttccattacagagacaaaaggggtatttgagcttagtttctctgtttatgtgtttgttgtgcttttaaatcggggtttaaggtttatagaagtggtgtttctggtaacagttgagactttttgaggggatattacagagttcaggaaataaaaaatatagaaatttgtgttttgtgtttaatgggaacaagagcagaacgcaaggaagattttgttggtgggtttggatttggtgttgtagaaaattcgcataaagacgttatggtgctacctcatcatcactattatccatcatattcatcaccttcctcttcttctttgtgttactgttctgctggtgttagcgatcccatgttctctgtttctagcaatcaggcttacacttcttctcacagtggtatgttcacacccgccggttctggttctgctgctgtgactgtagcagatccttttttctccttgagctcttcaggtttcaagttctcacctttttgttgacttctgagctatgaaaaaattgaattttgttgttatgtgttggttttgatgtgattttggtggataaaatccaggggaaatgagaagaagtatgaacgaagatgctggtgcagctttcagcgaagctcaatggcatgagcttgagaggcagaggaatatatacaagtacatgatggcttctgttcctgttcctccagagcttctcacaccctttcccaagaaccaccaatcaaacactaacccggatggtaagatctccctagcctctcacttaaacgtttcccatttttgtcaatttgtcttggtttcatgtgttcttgatctcttgttatcatgtttgatgcaactaaaagccattatgatggtattagaatgtcaagttttttaccagtgttacctcttagtggatacatataggagtggaatgtttagtatttatgctgattacaagaatctgccgttgtctatgtggatgacagtaactgtggcagtggcgacaggaggctcattgcagctggggattgcttcaagcgcaagcaataacacggctgatctggagccatggaggtgcaagagaacagatgggaagaaatggaggtgctctagaaacgtgattcctgatcagaaatactgtgagagacacacacacaagagccgtcctcgttcaagaaagcatgtggaatcatctcaccaatcatctcaccacaatgacattcgtacggctaagaatgatactagccagcttgtgagaacttatcctcagttttacggacaacctataagccagatccctgtgctttctactcttccgtctgcctcctctccatatgatcaccacaggtgcttttacttacattcttgtagtcaaagtattcaaatccttcccctttgaaatcatttgaaagactgaaacttagtggttgatatgtgaagaggactgaggtggtttacgaaagaagatgatgccattggaaccttaaacccggagactcaagaagctgtccagctgaaagttggatcaagcagagagctcaaacggggattcgattatgatctgaatttcaggcagaaagagccaatagtagaccagagctttggagcattgcagggtctattaagtctaaaccagacaccacaacataaccaagaaacaagacagtttgttgtagaaggaaagcaagatgaagcgatgggaagctctctgacactctcaatggctggaggaggcatggaggaaacagagggaacaaaccagcatcagtgggttagccatgaaggtccatcatggctctattcaacaacaccaggtggaccattggctgaagcactgtgtctcggtgtctccaacaacccaagttctagtactactactagtagctgcagcagaagctcaagctaaacaaatggcgctcgagttccggtttagtgattagaaaccatcgttgttagtgttttgtttgaaaaactgagaccttttagctttctgttggtgttttacggttggattttgcagtagactgctcttatgaatggaaaattgtttgagacaacgctttactttcactgctggattagtgaaaagtcagaataatcacttttgctaaacatttgactaattatttcaagagttgaccagaccgacaggtccaagtattgccaacgggaagcttctgtgattttgcaggatacgtgacgtcggcaatgacgcgtgcgaagaacaaattaaaaagcatatatccccttaaagcgacttcgcagcaaaacctcttgtctcgtttatctatataaagaaaatttagtagcaaacttctcgattccttgattcgtgggaaaaagaaagtctagatttttgtggattttgattttgtgattccgtgattgtatgaacttgagccgttttgcttcgagattaaga

SEQ ID NO: 6773 - DNA, 3000 bp, Unknown; identical to SEQ ID NO: 6766
  misc_feature (1)..( 3000): cDNA_ID_1815454_gDNA_ID_1621104_Annot_ID_55954 3000 nt of promoter + ATG

SEQ ID NO: 6774 - DNA, 3000 bp, Unknown
  misc_feature (1)..( 3000): cDNA_ID_1815548_gDNA_ID_1621105_Annot_ID_55958 3000 nt of promoter + ATG
cataatcaacaacaaaaatcgaataaaccaattcgaaaacgaagatttaagctaacattataaaatcaaacctgggaaacgcaagagattcgacggcgacacacagctctacttacgacggcgaagatgggttttcacggcgagtaaactcattatttccgacggcatgggattcaacggcattcacaatttccgatggaggaagaagagagagaatgaagaaatgaattaggtctgtggatagctcattaagggtaatttggggagaaaagtattagaaagggtagaaatgaaaatggggaaaaaaagggtagagttgcaaaagggcattgaaaaaagggcattagagtgaattattcaaaaaacaatacactattctcactatcttaatggaaaaatatcgaaaaaactctaaactttcaaattttggatgaaaaacttttaattaacttctcaataattaaaaattaaacgtaactaaataataatagatttaattgcccgttaaaaaccaaaatgacgtcgttttaaagctaaaaattatacgtaaaaaaaagttatccaccatgtactcgaatcaaaaacatgggaaatccttaacaggcttttgaaccatgtagtcacttaaatctgttatcattttgttaacaaaaattgaatgttatttcttaaacgatctgattaacaaaacttaaattttttattgaaaagtcaattaaaacttcataattaaaataacatttttaaagtttaaattttttcgtctgacatttagtttttttttggacatgtttccctatcttgattcaatacctgaaaacgcaaatcttttaataaattaaaaataaaactatatttaaacgataaacatgaactacattatcttttcctaactttattccgtgtcaactatgtcgccatctgaatcttgaattacttgcactatatgaacaaccttttgacacgtgggcttaaggagagaagaaataaaagtttgaaacttgagagtagttccaaatatttttcatttgacaaaagttttaaaaaaaaatgaataattgctaagaatgatctttcaatacgggaaaaatgtcaaaacaaatcacgaactttcaaatttgggacgatttaattttgaatttcaaaaaaaacaaataaatcgtaattttcttgttgactttcgaaataaataacaaagtttttgttgacttgtcatttgagtcatgtcgttaagtaggttaacaaaaaaaatttacggcgttaatgtctcctttatctcctctgttagaacaaaaaaacgttgtttattgcagttcgttttgtctgttgacacaaatttaaaccctaaatccccaaatcgattttattatctgcgattttgaagtcaatgtgggtctgtgattttgagataataaaatcgatttggagatttagggtttatatttgtttcaagagacaaaacaacgttgttttgtctcttcaataaacgacgttgttttgttctaacagatcaaataaacattaacaccgtaaaaaaattctcttaacctatttaacgatatgactcaaatggcaagtcaacaaaaactttgtcatttatttcgaaagttaacaaaaacttcacaatttatttgtcgaagtttaagattaaatcgtcccaaatttgaaagttcgtaattttttgacatttttctcttttcaatactatctttttcaattatgttattttctctttctcatttttatttaccctctcttttattttttaatgaccatttacccatattttgaaaatattttaggttaacaaaataaaatattgatttgtcccgtctaaaatatttccgtcaaaaatttccaacaaaatttatttttgagaaaaaatactctcgatatatttttttagcgggaactagatttacaaagatttttgaatgatttacaagagttttaaaaccctattaaaactcttgtaaattttgtcataaccttttgtaaatattcacaagagtttttcaatggttcaaaaagagttacaaatgtattcaaatttttacaaatttttttaagagtaaaaaaatggtttaaagattttataagagttttaaaaagatttacaaaagttcctaaaatccttgtaaatcctttaaaaactcttgtaaatattttaaaattattgtaaaagattttaatatgatttacaattaaagagattttaaaatatttacatatgtatttaaagattttataaaaatttaaaaaaaaattaaaataatttataaagattttaagaagttttaaaatgatttataaagccttttaaacactttacaaagcttttaaaaaattttataaggttttttaagagtttttaaaaatttctttacaattttacaaagatttttaaatatattttttttgctggaaaatattttattacgggaaaaaggttttggtgggaaaaacttttttgaccgggaaaaaaataattttgttgtctgtcattttaaggaaggatactgttctctgtcttttactttggggttcaacttaaaaaactatttttcattcgtctgatgcaagcccatatcgagattgtttcaaaacatagagattcttttttgggccatacttctttaggttcagccgttttcagggtaacaacttctgatgaaactgaaaccaagtaaattacccattcttcattttgtgggcttaatagacatatatttgtaaagtgaggatccaatttcgaaaattttaggtatcctattttccacagcgtgatagcgacaatgctaggccacatgtcattatttccttggtccatcttctgaccattaatacaaattaacaaaattacaaaacattaaattcaaaaatctcagcaaatatagaggatttacgttttagtgtatccgattatggttcgacagagagcatagaaacaaaagtttcctccacttgttgtttcaacaaaacaaaatcctcccctttcat

SEQ ID NO: 6775 - DNA, 3000 bp, Unknown
  misc_feature (1)..( 3000): cDNA_ID_1815544_gDNA_ID_1621105_Annot_ID_55959 3000 nt of promoter + ATG
cttaaaaaaatacattaaacttgcaaataattcaataaacttgcaaagaattcaatacaaatacgaaaacataaaacatagtacatcacacttacaaataatataatacaaatacaaatgaacttagttgtattggttgaaccctttctgcagttggccaggttgttccggtttaaccttttctgcattagacttaatcttcctcaggctgcagccaagcctccaaatttattctcctctttcgcgcttcaccaactgatggaaaccgcttctcttgatttcgtcctggtccttttggtgtgtattccggcggaaaggcaactaactctttaatatgggcaggaagaacccaaaccgactcatgtgggactacatacaacgtccggtaataggccaatgcccaactctctatcaagtaatacacagagcagagtccgtagatggttgtattcgcatttctcccttccttgcgggcgaggtgcctggctgcggccatagcatggacacacgggatcttgtctatatcaaaacatttgcatgaacaacttttcattttcaaatccaccagaaaacttaccgagttgagatcaatcacgttgtattcttggttgtaactgttaagctcaaacacagttaatttggctgcaattggacatctaatgtgcaatatgttctcgacagtaggcacaacttgtgctgtgattggacaagaacttgaatcttgcctatgctcgttgaaccattcagaaaacttagaaatcatcacatcaatcattggtaacaagtgatattttctcgcttttttaaacacaccattaatggactccgcagaattactagtgtcaatgttatacttgtctcctttaaaatggcacctcgaccatttctcaaaccctactttcacaagaaagtcagcagctttaggccataaacttgtaaaatgaccaaactctttctcgaactcactctcagtatatgcatgagcacaatccctgaacttgacagcagctccatccttgtcaattttcacacgatctctcatgttttgacacaaatgccatatacaagctgcatgaagcgcattcgggtacaccgtcttgacaaccttctttatgctttgatgcctatcactaataaagaccaatccgggaacatccgaatatacagttttcagcttttctaagaaccaaatccaacttacatcattctcgctatcaatgattccaaacgcaagtggataatgatgatgattaggatcttgtgctgttgcaataaccaacatcccaccatacacagttttaagatgagttgcatccacaactatcactttccgcattgtcctaaaaccttcaatgcaagcgcctaatgcaatgaagaggtacttgaactttttctctccttccaactccacataagttactgtccctggatttaccttctctaacatgtaaagataagaaaataacatcgtgtagcttctttccggagtccctcgcacatcactaacatgtagcattttgcctcttaaggcagtggagtatgaacaatgcaccccaagtcttcctcttacaatcgacataatgttgtttggagttggggtctctaaatttccgggatagtcacaatgcaaaaccgatgctatcaatcttggtgtgcctcgctgtatactgttgcttgtagtctcaacactccgagagcatgtatgcatctttctatgcactctaacactccaaaaatgagatttcttagttctcgcaactcttagataccaagtacaccctttagaagcttggcggcatcgtagcataagtctcaacgggtctgacttaatagtatagactccaaaaacttcttgctttgcagctctgttaaccaattcccacacagcctcccttgaacaaaattcttgaccaatttcaatacccgtaccatcatcccattctataacctgcggagtaacttctacacttcgtggaatattgtgaatatcatcataatcaatcctatcatcctcatcttcttcctcaacagaattcaccggcctttccatcggcctttcgacagccacgatctccgtacctactacattctcacaatcattcacatcattatcatatccatcatgcaccatctcacatacttcatttaaaacatcatcttttcttacatttacaccaactgaacttcgacgctccggtacagaaatttcctctctcctctcaactcctataccatttaatttctccacatgcaaaacaggaatccgactctcttcatcagattctgttaaaaatataaagacatcctcatcatctacaatatatgtctctctcctaactttagacagattgtaactcagtttcaacttcacagaagcttcatcaatcgcaaccttcttcatgatcttgtcaactaacatgaaaccccccaaatctttaatatgaaatctcggaattcaaattcaactcacattcaacctacattcctttgctcatcacctcaaataacgtttcggcaacctctaatcgattactctttactttgcaaaccaatcatcaaactatcaaattgaatctgggaattatatataattcaaaatcctaatctaaaatcacaatgcaccaatgtcaaaggaaatatgagaagaaactgacctaattcgttgccttttacgacggatttcaagtcggcggcggccggaatcgatggtggccgacgaagaagatgaacgtcgacgcaagaagaagaacacgacgacgaagaagagagaacggagaatctcgattttctttatttagcttttgaatttcttttttatttttttaatcaactcattaagggtacaactggtatatcacattttcggtgacattcactgatggcagtccagatcagttttttaaaaaaagtggcataagtgataaaagttctcttctccgatcgatctccttcaaaatttcaacttcaaattccctctctgagatttcaaaatccgccatg

SEQ ID NO: 6776 - DNA, 3000 bp, Unknown
  misc_feature (1)..( 3000): cDNA_ID_1809157_gDNA_ID_1621105_Annot_ID_171557 3000 nt of promoter + ATG
tggtgtgaacatggtttaaccttttgtattgttgttataatgaaaacaggttgatctttatcatcgattcatttccaaggaattatggcatttcaacgtatacttattttacatctccattccaatatgaatgaaacattttagcatcaccatcagtcacaaattaacaaaatgttcatttttattcgctttatgtgtttgaaaaaaaaaaatatacgtatagatatatcatatttgtaatggatacatatttgtactatcatgcaaagtatcttttgcctttacgtcaatatatcaaagtattttatattcacccggcaactaacaaaagatagaaattggattgtgcgactaattaatgaaattcataaagagatggatagtggatttgaccctgaaatcgttccaattgcaacaataggtacacttctaattagtctgatccacgtccaaagatatgctatgtaaccaaattaggcgactagtgtatctcatatttttttgataaaccctaatgtatgtatctcattaattattgacaaaaagatgtacagattaagttaaaaattaagcatagaataatagaggtgatgttaacaaaataacatgtaaaaaaattgttcatttggcgactaatgaatcttatgattacatttttgtttcaagttaaactacttaattaagataaatacacacacatatatatattggtcaaaggaaagaaaaaaggtctataatacattagtttgggagctgggatttggtttcacatgcacttatctgatatctcactgctctttttcaatatttaaatttaaagagtttcacacttaccgttttttttggacaactcacacttacttcaatcctctttcaaccgtcaaatttaagagttcaaacttatctcaatatgctatctttcaatcgtcaaatttattcagagtttcacatcccgttataaaatttgaaaacgatcttaatgccattagcattgctttcttaagtgggttttaaaattttaatattcatttttgttggtgtcgctttatctaaaacgtctcttacaatttcttgcaaaggcacgtcaaaatgcaaagaagccaacaatagctatatgcacgtgatgcgtcaattgtgatccataaatttttggggtcacgaacttacgatacggcggccgacatatatatcactttgtagtggttctatttaaaattcaactcattaccaaaaaaaaaactcaactcttatcttaaaagtatatctcactttatataaagtaaaaaattactatatctccaattgcaactcttattttagtcagacaattgaagaaaaaactcactttttttttttccttgtatatattacttgtttcactttgtattttacatgactcgaagtgttattgaacttcagtattagtctattagaaatgttttcagaaaataaggcacatcgaaatttgatggagaaggcaacaataattatatgcatgtgatgagtaaatgcgatccataaagttctggggttactaaagttactatacggcccataccatatcttgctatatagatttgtaattgatgtattcagaactcaactcttttcttatatctcattttaatttcagtcgactataaattaactaaaatatcactttattaccctttttctacatgatattgtgttacttattacttattagcaaaaataaatattgtgttacttcatatatgacataagtcagaactgttggaggatgaaggccactaccaccgattcacgtggtcgtgagtattgatcgcattattttttctttttcttttgactaagaagatcgcattctttgtcacatgtcaatgttaaactaggtaactacatacgtcatgtaggaagtaggataaattgataacaatattaatttttaactttttccgtccaagaaaaaattaagtatggataatgccataaggaacaacatttttttggtatgctttatacatcaagtaacttcgaccggtcctggcaataaattatagaatttaagtttggatttggaagcaaataatgaagctttttgagctcggccttttctatttttgtttgctatttgttgttggtatgataattagacagaattaaaatgactcgctactttcactaaagagagacttaaattttatggaagatctccttagctgccacagttactcaaggcatagcttttcctcactcaaacctcttcatggattttgatgattatcgaaattaaaatggtattactctcattcatcttctcctacaaatgtgaacctcattcaacattttatgtttcaagccatgatctacttcttattggaagaaaaaaaaactccttgacgcgagcacgactcttttcttacccacaactttgaaagttttccctcctaaaaacgaattacacccactaatatatattctgaatagtacccattcctttttgtatcaagaaatcatttgtacaaaacatagatggagacttgaagtggatgtttttgttaactatataaaaccaagacgtacaacgacaccatagagcgggcctaacataacaggtttttgacaggcctagattccacaaacccaaacaacgcaaagaaaaatattatggtccaaaactaaaacgtcaccgtttttgttgctttcaagtaaaaacaaaaatgaaaactttaattaaaaccctagagaataaaaggtcttccttcttcaccaccttcctccgcagttgcacacaaattcacaaccgcaaaaaatcctctcccggcttaaaaacggtaaatattcatctttttttctctttggatccttaatttttgtgggttatatgaatcggcaactataaatgataaaaatacgatcttttgttgaagttgtgttgggagatttgttctgtgttgattgaatctgttcttatatatgtgacttttgcagagtgataaagaggtgtaacaaaacatg

SEQ ID NO: 6777 - DNA, 3000 bp, Unknown
  misc_feature (1)..( 3000): cDNA_ID_1815526_gDNA_ID_1621105_Annot_ID_171556 3000 nt of promoter + ATG
atttagacatgtaggctaaattttgattgcttcaaacgcaagtattaatgatgtagttaatgttaatctgatacatcgatcaaaattcaaaccctatatttgactactacgtacatctaatttgtattttaaggatatcaacttttggggctcaacgtacatcacttattttgctattcctcatcttcgaaaaagcaaaggaaaaattgttgtgatttcttctgctacggcaattatacctttgcaagcggcaagcgtctattcagtaagataaacaaaatccgtaagcatcattattggtggtatcttagccaaattcttaagctaagatttgtaaaaaaagggctcttatataagagcttttaggcttatatttaagcttttatataagaaccctttcttcacaaatcttagtttaagatttggctaagataccatcaataatggtggtcttacacgctttttttttatatgttatctttttacatacttctcatatacatataaaatttatatgatattgatactacttggtatgaccgtatgatgtaggcaagcaaagcagctttagtaaaattctttgaaacattaagagttgagatcagtcccgatatcaaaataacaatcgctcttcccggatttatatctacggatatgaccactcctcagtttaaagaaatggtcagtgataactttcttgtacataatttaataccttatatatatgacattaacgatgttatgtgtaatgttttttgtgctttgttgaaaattagtatggttcagatttcatactttcggaatcagtgagtcgatgcgcaaaagcgatcttcagaggtattggtagaggagaggcatacgtcatagagccatcttggataaaatggatctttttgataaaaaatgtttgtcctgagatcgttgactacttactcgactatatatttgttagttatctaaaaccttatttcaagcgtgattgatcatatcgatctatccaagttctctctggttttcaactgtggttgtgttgtcattatggccatgaaacttatactttatgttgtattagttattgcactaagtcttggcctttttccctttcttcgtatatgtttcaatttgttttagaaccaaacatttcatatagatagaggatttcttaattatttaataaagatgattcaaatgtatataattgttcaactagttcagttcgcttccaaaaaaacagcgacgtcttctctctcacggcgataaaaacagagaaccttccatttgtttctttgagcgcgtgaccggcgcgtggcggcttagttagcgccggcgtcggtcctccagtctggttttctttagggtttcattctctacttagtctggttcgtttttagatcctgatttgatgttggcaaggtgaagaatttttggatcttagatctgtaagagccatcgttgtgggctttgattcgtcgaaggttttgtgcgatcggaactcccttttctctgttttgagaaaattatgggtttctcctttgttcttgcagatcttgtttccgacgaaggttgcaaacgaaagttatgacggcggctaatgttattggtggtctggctccttctttgggatagggtggcaacggtacaccggtattttagtgttagttgtctcataattgggttttgcgctttcgttaaccttgttctcttcatttctcttttgggttcctatcctttagtcttcattgttggcttgttggtagcgtttatggaatcaactttattctcagtcttttgtggtctagtatcttgaactcttgcctattctatgtcctgccgagtttgcttgtttctcgatccgattcgttctcttgccgtctccagtcttcggtttgttgcgaattgtatgggctcggtccttgtctctacggtttagacttgatcgaggtctctcttttgcattggtgtcttactaggcgtgaaccaatcttggttttgtttgcttcgatttcgccgtttccagaagttgtgtgggatttctagtcgtctcccattcttgctggtatggatgctttggttctctttatttgtgaggtagtcttcatttggtataggaagagtcgctatccggtgtcgtggattttctcgtctccattggctagccactaattcaagcgtttctcgtttttggattgataatttgcaagatgtttggtgctagattctgagttatgagttttaattccctctgatgtttgctttcttagccgtcagtgttttgacttgtttcttttgtagtgttgttatttgctccccattttcttggacttagtttcctaggatatcttgttatccttcgggttagttttcgggatcatgtattgatcgtcgactccttgtatttcacctagtactcatcaatgaaaattaatcttccagtgaaaaaaaaaaaatgtatataattgttatggaatttctgtgtccagtccatattaagctttttacatatatatatagcatcgaccgcgaagtccgtaacaccatctcttctagaagactcggatttcattggcagaggcgtatgctcctttggatctgatagttaaaacaccaaatcttgtgtaactttcttgtatataatgctctgtttaactttcatttttttttagtaatatttacattcctagcaacaaatatttatttatagcaattaatatatatttttagtaataattacattcctagcaacaaatatatatttattttttaacaaatacacaaatatatttttagtagcaattaacctattttcctaacaagatacaacagaagaataagaaaatagtagacagatagatccacttgctaccatttcctctccctgtagccttctgtgtctattaaaatagacttcacttgtaaagtaaaagtttgaacattttaacatataaaaaaaaaaaccaagtagagaggtaagtggtggtattggttctgcaaaagaacatt

SEQ ID NO: 6778 - DNA, 3000 bp, Unknown
  misc_feature (1)..( 3000): cDNA_ID_1815529_gDNA_ID_1621105_Annot_ID_171555 3000 nt of promoter + ATG
gcgcttgacataattccacattcagtaatatttggtagttgaatcatatttatatttcagtgttgcacttgtactgatcttttggtttcttacaatggatcatatatacatttttatttttatttacctcatcagaatattctttttttctagccggtatatacttccactgaataattaccacactcgatttggactctgcatcaaaagtcttgcaacgagatagtacgttctgcgaaacatcacgtttccatgtatatcgtgactagacaatgagtcgaaatctactttgctcatttaacattaacttcccttaacttacacggaaactctatattttgaattttcattacaatgtaatatttttttaattatataattccaatcttcggtaattgacagccagataatgacattgacattttctcatggtaaacttttaaacattttcacggtgaaacaaaataattaaatagcaaagtgttatggttaaaacatttttgcagctagataacaaataaactggaactgatttgccacttaaacattagtggtatataaacgttagaaattcttgcacggttgatatgaaaatggctttgggttctcatacacaattcttgttattttatttagtaatgtgttatcatgtaaaatagtgtgtcatcatgtaaaaacaacagtctataaagcatgttatcatataaaaagtaacataatatatatcatgtaacattagtaatgtgtcatcggataaatgaacatgttatttattttcaaattaaacaaatataaaatcgttaattcttttgggttaaaatcttaaactcacctcaaaaatatttagcaaattaaaaaaaaaaaaaccaataaatcatgtctcatattacttcctaaaatttggctatcttttgttgatgtttttggtctgacctaaaaaaaggtttggctatctaaatctacctaaaaacacacactaatacaattcgatactgggcttcaaataaaaacaaactccttcattattgggccaccataatgatcgacctcacaatatctcagcccaaggttactttcgtcatttaaactctcctacacttaaaaaccctaatctctctaccgtcaataaacctccctatataaacacttccacacacaaaccattcctctcacacaaaattcttcagccgattcattctctagggttcatagcttagtcctcgaatccatatatctctgctgctgtgttcttcaattgctttagtattagcttgttcttagtgttcatagaatttagggttattagaatggcttcatcagatagtcgatgtggatttgtccgttcccatatgattcgttcccttgaagcaatattaatcgtgttgctctcgttctctaaattgctctctaatcatcaaagtaatcatacggttaattctagtatgataccgattagtgagcataacttgagcagctacataatcttctcttacgagggttttgttttgtcttaattcttgttttgttgtggaagaacagtgatgagtcagtttacagacctgtaatgattgcggtaatgatcgcattattatgaacatctaagggactgagttcttctatccattgtgttttagttttctttttgtcttggtggcttttacatgatagaaagattcaggctttgaatatattttagatgtgaagcttgttgtgaagtgtaattgcctacattgaatttagtttccctcgctatcctgttcttcaattttcaatgatgtttcttaggacgtcggggaacaatatgttttatattgatgttttgttattttgcaatgggatttcaaatgaggaatactttgccaagttgttgaatgctcagatttttctgggttttatgattcacttgtataggaagatctgatgatttccttttgcattgtgtttttgttttttgtttgggaagccagtgatgattagattcaatggttgctgaacattcaatgttgaaaagcatctaacttgactaggacggtctgaggcttttaatgaactttttgtttgctctatcgttagttttgtgtccatgattcaggattgttaatgttttgtgatgttttggatgatgagaaacaaaaatcaaaatacagttatccctggcttagggtttaaagcccgttgctgagtcttttgtaatctgacacacatcacaacaatttctctttacgttcttttggtacgatgcttttgtgttttcagtttatcttaactttgttttatttctcaattttacgattcatggttctgtaaatccatattgggcagtcttttcataaacaaaacgaggtgtgatgctaaatttcattgggacaacgctatattgtagaagacggtgaagattgttatacgttttgcaaggcagggatttatgatgacactctccggtcgttttgcttccttgatgcaattgtttttccaatttaggttttgaattattactcactattttatcagggtagcaacattacctgaaagtgtctctgagctatcacaaagattgaaagaagtttatgtgatcaaaactttccttttaactttattgttttcagtattagctatcttatgttatgtatatcaatgaatgtttttaacgattaagcacaccctttaatacagtcttgtttaagaatattatggatcaagatcaaaaatttagctgtacgttcaggtaatgaatgcgatgttctgaatgagaaatgaaactaaaatcatgcatttagataactttcacatcacttgatagagagggacgatatttttgcaggatttaacttcgtaattatggctaacaaagctaccgtctttacattatttgctcggggataactgaaatacctccctttctagctttaaatgtcacttaaatagccttcgcttgtaaaataaaagtttgaatatttaaaccagaaagctaagtagagaggttgtgatgggtctgcaaac

SEQ ID NO: 6779 - DNA, 3000 bp, Unknown
  misc_feature (1)..( 3000): cDNA_ID_2175455_gDNA_ID_1621105_Annot_ID_171554 3000 nt of promoter + ATG
ttaagatgtctaacatcaaactaatcatcacgtaattttgcacaatttagaatggttttaaagtgacaaaacaaataattttcttattttgaaaaccaaaaaaaaacagaggaaaaatgtattgcctgcgagaaagctcaagaacacgaactctcttggcctgagaatcatcggaacatcctaacacggcaagtattccacacatgttttttttttgaagaaagtgaaaaagatcacgaagaatgagaacagaaaaacagaattttccgaaactttaggggatagatattgtaaaaccccaaaaagagattacaagaaaatgtaataaacagacagatgtccaggaagagaaaggagaaaattgcacgtagaagtgtactatcgatattcgtgtttttgatgtcttggttttctacgaccgattgctctatttatagacactaaacggcgccgtgatgtcgcgtttggttctgaaggagtcgtgtatgggaacaaattatttttttacttgtaaccggataagttaccggataactctgaccagctgtttccacgtgttaattaaccttcttacgacgtccgatgggttcttacttcttagtctttacattctcttttgtccggtttcttccaattttgacggtggggcaaacttccggtttagggtttatccggctgagtcagcaagtggataggtacttatctgacggtgtaaaaactgtccaatgattgttctgattgctttagagccgtacacgtgttatcacgacaatggtgtatttgattgtaggattagcattttatcagaaagtgaacacatttcaaatgaaaatgataagtaaactgtgttaggaaaaattgattggtatttttttccttttgattaaaaatgagaagtaaagttaagacttaaatttaaaaaaaaaaaaacgttaaaaacacatatagaagaaatatatcgtactatagttagtaaataattttctcttcctataattagtaaatattcaatatcgtcaacgaattattatttgtatagtctaatagtacacacatattctcaaccttggaatcgaattataacaatacaaactgtaaaattaaaacacgaccctatatggctattgcaaatggtgatttcacaaactttatcataatattaaaaaatacatttacttcttactaatatacagtaaacaaaagtctttgtgttatagttaagcctattttggatatatgtgtatttaaaaaatatatatagagagatttgccatgtgttatataacaaatatataggagatagtggatcatatgcaactttccgcgaaatgaatatcggagaagtattcgagtgtatccataaatcatgtatattttaatataccggatcacatgtgaattgtaggtataggcatcgcacatgcctcacacgttgctacaatgtgcaagggcgagaagatgaatctcagtttataatctttggactttggataatgctaatatataaatcatcaaaataagaatatgacgtgttttttctttgattggacaaaacgagatatcagccctattcttgaggcagcaagacccaatcgcgacatgatacattgtaaatcgtttgatatttttttcttttttatatgtaaaaattgctggtgtccctatctatctatatggtacaccttcagctataaatgattgaaattctcttacaaagactgtaaatacatatccgaacagtttggatactagtaccaaaaatgataatgtggtgatttaggcgacgtgagtcgtgagtgtagctgttattattattttatcaatacttgagacgctaataattgttaagatccatgccgtgtcatgtttgtataagccagtttcgttatcaaataaacagataacgaagaagattcttatactttgtgaaaggaaaatagaaaaacagatgacgtataacagtttgttcggtgaaggaagcagataaaaacagcctaatattcaaatgtatgccaacgcaaaaattgtgtttaatatacaaaacacacaattagttacaagtaccctacaatgttaaccaaacgtcattttgtaaaagtaaaggactttcaaacgcctcatagtcctcacaaagcgacatcattcgtaatttaattacttccggctggtcataacatacttatatagttggtcaattaatgaattagtaagtgggattgcgtaagagaatatcccattagttaaaaaaataacagaagaagaaaatatcacgtttataataagtttgggcataattaaaaaaggtagcgactcgtcgtctttcatgaggtcacgatcctagtctatctggcaaatcatcatctacgagctacggctagaaagaaatagacgctaccactcgtgcacggccgtgccatgtcatcttcgggcataaggatccgaaccttagccagctggttctccgacttcaacttacattactagtttttcttaaatattattattacattacataattagtttggttaaattgtttttctcttattgaattcatataattgtatcttttgtgagttatgttcttgcaatataaatctgttgatctttttttcatcaatataaaaacaactaatattaccaaaataacaaaatcataatagatacggcaattcgacttttaaatgaatcaaagagttaatatccacagaggattaaaatagtagtttggaaaagaacaaatggtgatgaaactcggtcgcaaggttgcgtagtacatttcgttatcactgttctaaattaaattagaaaaatctcgtcatttgtctgactataattttatttcttaaaagttaattgtcatgcactcatgtccatttctttttttttatcaaacataaatattatccatctaagttttgaactttatatttttctcggaaaagtacgaaaacttttattattgtcattcacacaattcagagaagaaacaaaagttgtaaa

SEQ ID NO: 6780 - DNA, 3000 bp, Unknown
  misc_feature (1)..( 3000): cDNA_ID_3048914_gDNA_ID_1621105_Annot_ID_171553 3000 nt of promoter + ATG
tagagagcaatttagagaacgagagcaacacgattaatattgcttcaagggaacgaatcatatgggaacggacaaatccacatcgactatctgatgaagccattctaataaccctaaattctatgaacactaagaacaagctaatactaaagcaattgaagaacacagcagcagagatatatggattcgaggactaagctatgaaccctagagaatgaatcggctgaagaattttgtgtgagaggaatggtttgtgtgtggaagtgtttatatagggaggtttattgacggtagagagattagggtttttaagtgtaggagagtttaaatgacgaaagtaaccttgggctgagatattgtgaggtcgatcattatggtggcccaataatgaaggagtttgtttttatttgaagcccagtatcgaattgtattagtgtgtgtttttaggtagatttagatagccaaacctttttttaggtcagaccaaaaacatcaacaaaagatagccaaattttaggaagtaatatgagacatgatttattggtttttttttttttaatttgctaaatatttttgaggtgagtttaagattttaacccaaaagaattaacgattttatatttgtttaatttgaaaataaataacatgttcatttatccgatgacacattactaatgttacatgatatatattatgttactttttatatgataacatgctttatagactgttgtttttacatgatgacacactattttacatgataacacattactaaataaaataacaagaattgtgtatgagaacccaaagccattttcatatcaaccgtgcaagaatttctaacgtttatataccactaatgtttaagtggcaaatcagttccagtttatttgttatctagctgcaaaaatgttttaaccataacactttgctatttaattattttgtttcaccgtgaaaatgtttaaaagtttaccatgagaaaatgtcaatgtcattatctggctgtcaattaccgaagattggaattatataattaaaaaaatattacattgtaatgaaaattcaaaatatagagtttccgtgtaagttaagggaagttaatgttaaatgagcaaagtagatttcgactcattgtctagtcacgatatacatggaaacgtgatgtttcgcagaacgtactatctcgttgcaagacttttgatgcagagtccaaatcgagtgtggtaattattcagtggaagtatataccggctagaaaaaaagaatattctgatgaggtaaataaaaataaaaatgtatatatgatccattgtaagaaaccaaaagatcagtacaagtgcaacactgaaatataaatatgattcaactaccaaatattactgaatgtggaattatgtcaagcgcaggccacattttacaacttttgtttcttctctgaattgtgtgaatgacaataataaaagttttcgtacttttccgagaaaaatataaagttcaaaacttagatggataatatttatgtttgataaaaaaaaagaaatggacatgagtgcatgacaattaacttttaagaaataaaattatagtcagacaaatgacgagatttttctaatttaatttagaacagtgataacgaaatgtactacgcaaccttgcgaccgagtttcatcaccatttgttcttttccaaactactattttaatcctctgtggatattaactctttgattcatttaaaagtcgaattgccgtatctattatgattttgttattttggtaatattagttgtttttatattgatgaaaaaaagatcaacagatttatattgcaagaacataactcacaaaagatacaattatatgaattcaataagagaaaaacaatttaaccaaactaattatgtaatgtaataataatatttaagaaaaactagtaatgtaagttgaagtcggagaaccagctggctaaggttcggatccttatgcccgaagatgacatggcacggccgtgcacgagtggtagcgtctatttctttctagccgtagctcgtagatgatgatttgccagatagactaggatcgtgacctcatgaaagacgacgagtcgctaccttttttaattatgcccaaacttattataaacgtgatattttcttcttctgttatttttttaactaatgggatattctcttacgcaatcccacttactaattcattaattgaccaactatataagtatgttatgaccagccggaagtaattaaattacgaatgatgtcgctttgtgaggactatgaggcgtttgaaagtcctttacttttacaaaatgacgtttggttaacattgtagggtacttgtaactaattgtgtgttttgtatattaaacacaatttttgcgttggcatacatttgaatattaggctgtttttatctgcttccttcaccgaacaaactgttatacgtcatctgtttttctattttcctttcacaaagtataagaatcttcttcgttatctgtttatttgataacgaaactggcttatacaaacatgacacggcatggatcttaacaattattagcgtctcaagtattgataaaataataataacagctacactcacgactcacgtcgcctaaatcaccacattatcatttttggtactagtatccaaactgttcggatatgtatttacagtctttgtaagagaatttcaatcatttatagctgaaggtgtaccatatagatagatagggacaccagcaatttttacatataaaaaagaaaaaaatatcaaacgatttacaatgtatcatgtcgcgattgggtcttgctgcctcaagaatagggctgatatctcgttttgtccaatcaaagaaaaaacacgtcatattcttattttgatgatttatatattagcattatccaaagtccaaagattataaactgagattcatcttctcgcccttgcacattgtagcaacgtgtgaggcatg

SEQ ID NO: 6781 - DNA, 3000 bp, Unknown
  misc_feature (1)..( 3000): cDNA_ID_1815533_gDNA_ID_1621105_Annot_ID_171552 3000 nt of promoter + ATG
aagcaaattaggagggtttaagcaatggtataatcctccttggttcaatgaatctgttccttcaacgccttatgagcctcttgcgataagacgcgcctttgaaaacgtaagaaaacatctcttctttttaattgtatgtggtgtgtgagagggtaatctgaaatatgtttgtttttctctctaggctgtgattaagcggttgatgactgatgttccatttggagttttgctctctggtggtcttgattcttcccttgttgcctccatcactgcacgtcacttggccggtactaaggcggctaagcaatggggtcctcagctccattccttttgcgttggtcttgaggtgagatatagaacagagttcctctgtttccaaagcagagttggatgattttttttgataggagagttggatgatttaaaagtgttttttctaattcgaaattcaaacttagcatcatttatggttgttctgttagggctcaccggacttgaaggcagggaaagaggtggcggaatatttggggacggtgcaccacgagttccacttctcggtgcaggacgggattgatgcgatagaggatgtgatttaccatgttgagacctatgatgtgacgactatcagagcgagcacaccgatgttcttgatgtcccggaaaatcaagtctctaggggtcaagatggttctctccggcgaaggtgcggacgagatctttggagggtacctctatttccacaaggcacctaacaagaaagagtttcaccaagaaacttgtcgcaaggtattcaattcaaccaccaaataagacatcatcaattttttttacttatcttgatatgattgttcggtgataacttgcagatcaaggctcttcacaagtatgactgtctaagagccaacaaatctacctctgcctttggactagaggcacgtgttcctttccttgacaaagacttcatcaacacagctatgtctctcgaccctgaatccaagatggtaactacaaaactcacatcacaaactcaataccttccttcacaagttaacgttgaacaaattttctatatgggtttttctagatcaagccagaggaaggaaggatcgagaaatgggttctaaggagagcctttgacgacgaagaacgtccttatctaccaaaacacattctctacagacagaaagaacagttcagtgatggtgttggctacagttggatcgatggcctgaaagatcacgctgctcaaaatgtacacataaaaaatttcatatctcccctaattagctaaaatataacatttggattcatgttcagatctaatgattctgttctgttttaaggtcaatgacaagatgatgtcgaacgcggggcatatcttccctcacaacactccaaacactaaagaagcttactactacagaatgatctttgaaaggttcttcccgcaggtgagagtcttataagtctccatgatgtaacagaatctcctattcgttttgcgttaactaattcacaaacttccgtgttacgttttttctaagaactctgcgagactaacggttcctggaggtgccaccgtggcttgttcgactgcaaaggcagtggagtgggatgcaagctggtccaacaatatggatccatcaggaagagccgctatcggagttcacctttcggcctacgatggcaagaacgtggcattgaccataccaccacttaaggcaattgacaacatgccgatgatgatgggtcaaggagttgtgattcagtcataacttcgaaggagaaatggatgaaatatgtgttatatcttcccaatgggtgaagtgttttgtatgattttaaaaataagaatgtgatcctttttttttcctatgaagatctgaatgtataatctatcttgtaaaaatttgtttctttgtaagatttgaatgtaccgcttttacgtagatcgatgtacatcaatcttataagtttcaattatgtattatattatgtcgatttgccaaaaataaatctaaaacctcaaaaataaatctggttttagatacttgtatatagtactaactcgatgaaaaaatgattttttttttgttactgaatctgaaatataattataaaataaaaatactaattattaataaatcaatttaccaaaaattttaaattttgataacaaaaaattaaatctagtcaatttttaaaagttcttttttgatatttcaaatatccgaattcgaaataattccaaccgaattcatagtcgactcaaacatataaagtactcaaatgggtcgtaaaaaactaaattggaacaaaaagaccagaaccaaatctgaatgagtacccaaacacttcatcctaaacgtatcgacggctatactcacttcggaaattattcaaagaaatataccgttattctctgtttaatttatcaagtggttaatctaccatttagtttttctctttgggcctaatgggggttgtgagcttatttcaaaaatttattgggtgtacttgtactttcaaaacatgggggtgtaaaagtgtaatattacaaaaatattggacgttgtcatctatttaacacaattgacttcttctgttgtcttctccggagagctcacctcttatgccattattggagaagaaataatcactcgtgccattcttatgtttggaataatattattgatttttattaaaatcgaaaattgaggaaaggacgaaaaacccttgcgaaaccacgaaaactacaagaaaacttaatttgttggactcgggcccaaagaaaaatgtaaatactcggcccagttgtattatttaccctagaaactacagaaaaaacctaagttcttcccccttttcacttctcgacttcttcctcttctctccgtcgtcgtcttctctcgtctccgacgacaccaatttcaccggaaaaatcaatctcttctattcttctttcttctccgttttcgttcgtctttgtctctttcatatg

SEQ ID NO: 6782 - DNA, 3000 bp, Unknown; identical to SEQ ID NO: 6775
  misc_feature (1)..( 3000): cDNA_ID_2175436_gDNA_ID_1621105_Annot_ID_171548 3000 nt of promoter + ATG

SEQ ID NO: 6783 - DNA, 3000 bp, Unknown
  misc_feature (1)..( 3000): cDNA_ID_1029444_gDNA_ID_1621105_Annot_ID_171547 3000 nt of promoter + ATG
taagggtgcctttaatgtgtgaacatgagagattttgtgttttcccaaagaaattatagaccatttgatttctattgttcacatattaaagacaccctcatttttaaagacatctcttattttgatgaccaataaggatggttctgtcattttattcgaggaaaaagacacatataccaatattgaagttggtgtagaaccataaaaaaactgtattgcattatgttttacttttaatactcttgtattttactttgaatacttttattcaattatttgtggtttagatgttacacaatctccttagcaagtaaaactttaccctcattgatcccatccagctcgatcatgaatacaacaaccatttgccaacataacaaacatgtgaatcattgcttcttaaagcaactgcggtaacttccctcgtagaaggtatgccatcattattattaaataagattatgcaacttgagcatgaaggttgttttcgagatacatagaaaccaaattcttggatattctggacacataatgtgcgagtgaaatgcttggagcttaatttaaaacataccatcaaaatgcttacacttacattatggttttacaaacttatgaggtgtaaaggcaatgccaagactctatagacacaaaaagtttttcacttgcaccatagcgtatagctctaatggaatcgtcatggaaacccatcaaattcatccaccaaaataactggatatttttctctgtgaataaaacatttaaataaattaaagtaacaatcatattgaatactagatagatatataaacactcatctattctagcaagtttttttttaaagctagaaaatcaatctttgtgcaacaagataaaaaaaattacaatatcaatcttttaggaacatatggagtacaagttactaactacaacgatgaacaatgttgagtaattgtatgataaaaaaatcaataagccggtagggagaaaagagagaacaaaaaaaagtaaacaacttcttaaacacatgacaaaactaggtaaacctatttaaaaaaacacatgacaaaatttatgtgagttagacacggattgaatattataaaatatcaaaatatatgaatatgaatccgaatatgttggataaaaaaaaagaaattatatgttccgccagcgaatatatcaattcagatatataaaaagagttgaaaataataatataagagtatgaaaaactaaaaaaaaaaattattattaatatatatatatatatatatatatcatagaaaagttttcaaaatgattttataaacaagttagaacatcttataaataaaagtaagatttcacactatccttattaatccacttggcaatttatttacaaaaaaaatattttcaattaaaccacaaataaaacacatttaatgagagtcaaatacaatttagctgggttcaaagagagtcaaatatggtagctgattctttagcgaagcaaccgatacaaggaaatgtttcatctgtgtttcatttctatgttccttttaatatttctgatgcatttgcatcgtgactatgtagtatcatgttcttgattaataaagctgatgttcaaaaaaaaaaaaacacatttaatgatatataattaagtcacactattttttggtgcttacatttaactcacactttaatataaaactaaagtcatataaattatatatttactatatttctctacaaaattttattcacacacaatcaattagaattttcaactctcatatttatttttaaattgtaactctatcacttcccatcctacaaatattcattctctcattgactcatcctcttccactatatctcaaatctatttttattttttgtggttgttgttgtatgagttaaaaaaaatcaatttaaataccattgtaaaagcttaattttttcaaaaaaatttctaatgccaatacgttatacttatcccttctttatttttatttattttttatttattttgaattaacatatgtaaaataaaagtttttttttaattgacatatttttatttctgaattgacatatataaaataaaaaattgatggctataacaaaactttcaggtttattctcaaacattaccaatgtgtaattgtaggcttgtagctatgttcctggcttttagctttttggttccaatatgttttgttttgtttttaacatttgtgtattttttgttttttaatttttaataaaatagaaataaaagatttatgaaagacatattcaaaaatataccatacttttctatgtactcgatatttattttagttgatgttttagaataaattgtttttttaatttagatgatatttcaaatttcaatgcaaaattaattagatttcatattgattttggctatttatattttgcatattgttttatcatttgttaaatcatgtttagatagacaataaatattattttcgtttagaactaaacaaaagttaaataaattttttaattgatgtgcaaaaacctccaacatcaacaaaaaaaaaaacacggagagggtaatagacaaatgtggatccatatcgaaatccggaacaataatctgataatcccatgaacttcaggtatcgtatttttcatagcatatcgtatagatctgggattgagggtagaatttcagacattgtgcaccccttgatgtgaacaaatgtggggacaattctaagccacatgtcactatttccttggttgtcttccgaccattaataccccatctcccaaactaacactcttctttaacacacacacacacacacacacaacaacaacaacaacaacaacaaagaggctttaatgttttagtctcttgttcacgtgaaaaaacaaactgcaattggataaccacaaccagaatcgattttgaatcatcatttctataaatatatacgactcatacatacatatacatacctcttaaacaaaactgag

SEQ ID NO: 6784 - DNA, 3000 bp, Unknown
  misc_feature (1)..( 3000): cDNA_ID_3042610_gDNA_ID_1621105_Annot_ID_171570 3000 nt of promoter + ATG
ctgcatgaatctcaagagcttttggtccatagaatgtgaaacatgtttccggtagagcctgcaatatgtcaagtatgttaaaaaattctgatatccactgtgaaactgaaacataattctagtaataatagttattaccttcaagatgtcaatcctaacgagacctccccagaaaaatgtataaccgtttaagctctcacccttgggactacttgacgattgagttggcaaagttgaaatctgtaaggaacaaaaagcacaggaagatcatcacactggtgttacggtaaaataatctttacctggccgtaataaagcagacttacatcgaaagattggcctctgagacgattttgaggagcaagggcgggtaaatcatctgaatgaacgacagctgcttgcctgtggtgtaggtgcacacccggtgtgtcatacaacttctgtggtaataatgtattcttttagcagaatgtctactattgcaatttttggaaagttctagaatctgatcttggtttaagtttatacctctcctccgacgaaagcgttgatctgaattggacccaaggtggttccagggacagcagattgaattggtttgtacttttgtgccgctgctgcaacaggatccctttcggccatcgtttctgtatggtgaagtacatatacaatcattcaaactctctttataaattgtggagaaattggccatactagagatcaggctaaagcagcacccagaccatattcaagcagatacaaacttcaacaacaagtgacacaaacacaatggagaacaaatgacttactcagcaaagcattgatgaatgctgacttccctacgttagctgcaccctgtgaaagtatgaagaaataataaatgaatattttctaaaccgtcaaagaagtttctttataaatgcatagcctctatctccagtaaacgaatttatgaattagtggatcatatcgagcagtgttgtgtcgagtttgttgttctgatggacatccgagaaaattgattttcactaagcactgcctctatcatttaaagtgtgttaagctattaagtaaatagtaagaactcgcatcagttagcaataggtttacaaactaaaactctattttgttggtgacaaaattacgaatgcacataccagaatgtagacatctcgtccctgaaacaaaaacagggatacagaggtcaggttacagaaggtaaataaagagaaggttatattgtccgacactgagccataatggaaacaaaatgtacgctaaagaaaacagctttaaggtggtgcaatatataaaaaaaacgctacctttttctccttctggatctctgatgcaactccgctaactccatccagggactttgaacttgtgagatggacactcaagacactgaaaagttatatcacacccaaatcaaacactagctccagaaacattacatcactttctagcaacaaccatagtagataagtacttgatacctacttaagctttttcctcatggtcacttccacaacccaatccccgatacaattcatatccgttccttttggaagaagatcaatctaacaatacaaaacacaattatttaccatagttagaaagaattgaagaagtagccatgttataaaaccttaccttagttataacaagtataatcggattagctccaactaaatcacgaacacgagctaaaaagcttccattaaaatccactatatcaacctgcaacacaacaagttgacgatctcttggaacataaaacagaaaagagaagttcattctaacaatatctactcaccaatttaacaatcaaagctttctcatggcgtaaatgagaaagtttctcacgaagttcatcagctgatacaaattgtttcccacctggataacctccattaccaccaactgctgtaatcatatgtccatgtgacaatagctgacatcttccacatatcatagttcttaactggtgatgcttcttcttctacaataaacacagaagaaaccatctctaattcatcaatcaactaactcaaaattgagattctcaagctcgaattcataccaattcataagtaaccaaatcgacaaatcccggagaatcgacgtcggaagtttgtaacggagctccgcagccgtaacaacatgagactgaggtatcaacaactttccgtgcaataatctcctctttctttttcttcttctcctttttgatctctttcttcactactttctgagcttcatgagctcgttggttctccaggaacctttctccaggggttggagcagccgccgcaaatccatctcgttccgagagtgaaactggtggttctgaattagctattgatttacagacgattgatgtcgtcggattacggtaaatgacggtgagattgggttcacgtctcgtcgttgtgtggcgacgaggaagagaaggaaacgttgagagtgttcgtagcgccattgctgagatttttcctcaccagctgttgtttgttgttatgttatctattaaacccagagagagaacaagagagactctaactggtacagaggttttactcgaaagaagaacctctggttgattggagacggttatatccgcccgggacaaaataaccggaatcgaatacccgaaatgaaccgatccaaaattagggtatagattagaaattcagtttcccgctcttttgctaccaaatctcagaaggcccaattttaaagagaaaattatgtttttttatttggtaaattgaaaaaaagaaaaaagaaaaattcaaatttgcttgtaataatcctctcaaagagaattcagttagacgattcgtctctacttctcctgcaacggttagattttgaatctacgctctcaatttcggaagcttgttgtgatacttccgtctgggtttccatttctagggtttatggggtttagtttctaaattagggtaaaatttggggaagaagaagacaacaaag

SEQ ID NO: 6785 - DNA, 1554 bp, Unknown
  misc_feature (1)..( 1554): cDNA_ID_3048898_gDNA_ID_1621105_Annot_ID_171569 3000 nt of promoter + ATG
cttggataattcacgtgtcacttcattagacaatgaatcaactttgtcagacaaagcttttacttctcctcccatactagcttcccttgcttgagtcaaagctttaatctgtttctccagttccgatatttcaccctgtgtcttatctgtctgctcatcaataccagtcatttttatcttcatttcttcaacaacatgtatcgaattatctctaatcttctccgcttgcacatactcaaaagcgacacaaaacctctttaaccgatctaattccgcattaccattagcccactgcatatactgcgacttttctctcctcaacttctccaaagctggcaatatatctttctcaagaagcttattaatctcatcaaccttagtttgctttttctccaacgtctttaacgcagcctctttcttattctcatacattctcgtaccagcagcttcttcaagcatagataaaatctccataggtttcatgtttaaaactttggtaatacgcccttgcataatcagaaaatgaggattgttcacattaagctgcaccgaatggaaaagattctgaacttgatttggttgtgcaagcttcccattgatcaaatacttgttctttccaccaactacaatcttcaaacacacacaaacaaacaaaattcactcttaacaaaacttaaaaacgaaaccttttttcactaaaaccttaaataagacttacttgtctagttactgtaatctctgaatgatcttcatgacctaaaggacttcgatttctctcggaattgtcgaaggtaactgaaacagtggctctagtgattccagcttgtccttgcttgtaaacgagttcctgtagattagcagctcgaacttgttgaagattagtgatacctagaacgaagcagatggaatcgaggatgttggattttccggatccgtttagacccgtaatcgcgttgaaatgcgggtcaaaacccggaactactgtcctcgttgcgtatgatttgaaaccttccaagcatatctcctttatatgcatctttgttgtcttcttcttccccaaattttaccctaatttagaaactaaaccccataaaccctagaaatggaaacccagacggaagtatcacaacaagcttccgaaattgagagcgtagattcaaaatctaaccgttgcaggagaagtagagacgaatcgtctaactgaattctctttgagaggattattacaagcaaatttgaatttttcttttttctttttttcaatttaccaaataaaaaaacataattttctctttaaaattgggccttctgagatttggtagcaaaagagcgggaaactgaatttctaatctataccctaattttggatcggttcatttcgggtattcgattccggttattttgtcccgggcggatataaccgtctccaatcaaccagaggttcttctttcgagtaaaacctctgtaccagttagagtctctcttgttctctctctgggtttaatagataacataacaacaaacaacagctggtgaggaaaaatctcagcaatg

SEQ ID NO: 6786 - DNA, 3000 bp, Unknown
  misc_feature (1)..( 3000): cDNA_ID_1815508_gDNA_ID_1621105_Annot_ID_171568 3000 nt of promoter + ATG
acaatgcgactagcagaatgtatgtactacataatcagattttatatattcttgataatctcttacagattttttataacaactgattatatgtaatatatgagtttagtgtcaaagaaaattatgataatatttttagaatcttgaaaaattaataacaagttatttacgtatggctgtggctgcttcattagtcattacgttagtcttttgaaattttcatgaccacaagaaaatatttcttccggttttgagatttttcgtaacaaacaaaattgaataatcgatgtacatcactaacttctacgtggcttgtgaccaagacaaatgactgtataaagaaaagaagtcgtcgttagggggaactcattttttatatttctagggctgatatttgatttgacaaaaaatattgtccaattatatgaaaaagtattacttaacaattcttctaaccattataatgaaaacatttctagggctgatattttagttttttgtaagaaaatcatgaaatgcattttgttttgtttgttttattacatgggccaagatatgaactctcaatttccaaatacagagacagctgaagatcaaaggataaggagtattttctttttctgtatacgtttcttggtttcatatgaacaaaattgattatgagaaaaagaaacaaccattagaaatatttattttatctagctatcttcaattattttgcctaacttgatgtgtcctttaggctttaaaaaaaaaacttgatgtgtccttttaagtgacacatcaatgaaccatatgtatagtctcttgttgttttataaagatcgattgaatttgattttcctctctatctatacgtttttgtttgtttaaaaatgtcaaaaatttgggtatccaggatgttcgaacgcaggacacgtatgaagtgacgtctttcaccgccgtaaatctttggattgacagtccggtaaaaacagattaatagcttgatagtccaaaacgcacgtataaaagtttttgcatgttgaaaatattcgtatccacacaacattagagatcaatcatgaaaccgatatattgaaggtcacccgacgtcaaatttcccctgaaagggacacctcaaaattacgtggttcgtgtaatcttttttcctttaagatagggatcggattatgcagtataaaattaagcaaatcgtatttggtgatatatcggttctaatgcataacatcttttatattcacacaatgaaatagctatttgttttcagtttcgagctaaagcccaagctccagcccaaatcaaacccatttgtacaaagaacctcactcatctatttgtgcacaaattctcggatttctccaacgctctcaatcattttataaaaattagaattatcttcaatctcgatatacgaacctaaataattgaaaacattttttttctttttatgtatttttcttttttatcaaatttctttttatgtatataaaatatttgtgaaagtttcttccacacatataaaagattaaatttctttttttatcccaagcttgaatatcaaaacatgagacaacaagagcaagtattagccaccacaaagcaatcatcttaaaactcaaaccccaaaacaaacaaaagacaaaacccgattgtttcgagcacaaacgtcacttgtggtttacatcgtcttcatcatctccataacttcatatctcctctccttccgctgccaccgttagcgatgtctttggacactgtggacaaactggtggtgttcttggccaagagagacggaatagacaagcttgtgaagacattccaatacgtggccaagctcgcgtgctggcatgttgaagccacacgacccgaagccgccgataggttcaagaagtgggaggtcgcctccggtctcagccgcaaagccttcaggtcccacatctttttaatattaatcactttatcgacaaagtggcatcatcgtaaatatagtttaatagatgaaatgaaatgaaatgttttagtcacttcttgattaatatcttatctcatctagcatatttgaatagtgactagtacgatacactttatattacaagaaaaatataattgaatagtgattatggtcgaattatgcgaacaggaccgggagatctctcacggggttcaatgcgctgagacgaaaccccggggcaaccccgatgatccgtttcttggcggtcctagccaattcaggggaaatggtttacttcttctttgatcattttctttggttatcaagaattggttcaatagacgccaagctcgccaagaaaatgagtttcatatccgcttttggcgaatctttcggctacactttcttcatcatcattgattgcatcttcataaagcaaagactcaaatccttaaaaaagctccagcattcgaccgatgaaccgaaagaagaaatcggcgccaaaattagcgagattcggggagatatagtaatgaggttgatgggaatttcagccaacgttgcggatttacttatagcattggcagaaattcacccaaaccccttttgtaaccacaccattacactcggtataagcggtttagtttcagcttgggccggttggtataggaactggccatcgtgagatgtaataaaatcaaatgtttgttgttttgaatgaacgtatcaaacgtgtaatgtaactcacttgaatatatgaaacatttctattttacattatctatagtcaaatcgaaatcaaacaaaactaagggtatacaaaagtataatccacatacgtgggggacatttatgaaattcataaaacttggtaactgtaaaatagtaacttcccactctctcaccctcttcactgggacggttatttttttttttaaattcatttgcatcaaaagtcgttaccttccagtaatatttatagatttataacgatgcaatactcactaaagaaacagaaacagagataattttttcgaaagaaattg

SEQ ID NO: 6787 - DNA, 3000 bp, Unknown
  misc_feature (1)..( 3000): cDNA_ID_1815512_gDNA_ID_1621105_Annot_ID_171564 3000 nt of promoter + ATG
caattgttatttcccttaaatactctaaagcacgtgaagaatgcgaaacccaattcatgcacgaacagtactcattaatttctgattatgattttcttcagttttgggactaccaaatccaataatccaaatgagaatactaaaagtttgttgtcacatatcacataagaagaaaaggacttgaatactacacgaaagggggaaaggtgtagtttacacattacacaatacatatagaaatatatattaaaaaaaaaaaaaaaaactaaaacttgtgaaagttgattatgaaagttgacccatctaactagtgaacccatcgaagttgattatctaaacatgcttaatatatggattgatatttggaatccacatttgccaataacacataattgggttcataaaaattcaacccaaattaacacctaagctctagccaataagattgaatttacaaagtgtttgttttcttcttttgttccaaaccacttgtatcaactactatgtcctcaagttcccaaaacaattttattgtttacgataacaaatccctaggaatgactttagtataatacagtatacaaaaaaacactaaatagagtacaaattagtagatgtggccgaggttgaggtgaggaccacgtatccaaaatatttacagtccttttttttgtttttgttaaagatatttttgcattcgtacaaaagtatttgcataaaaggcacctaaccatttgttttaccgtatataaaatttttttaactgtctttgcatgccggtttttatcatgaagttcgaaattttttatatacggtaaaacaaatggttaggtgcatttgttacctctttcttttattatttatcatccactaaaaatcatcgtgtaacgtagaccacgcataaattctaaattattcttgaccctgaattattagtacaccaattaaaatatttgaatatcaaactgaaccaattctcaacagttttagtgtacagttctcaaaaaaacaagttttttggttcaaaaatagtatttacaaaatattaaaaaaagaaataaaagaaatggaaaatttaaattttgaaaaacatatagtagaatgctatatttatttccagcttcaagtttataaaatataaaagaaaaagaaaaatatatttgtcagtttagtaattctagaaaatgtaaagatttagtttttaatgagcataagaaagatctagtatgcataatgttaaaagtcatacatgaattgtatatctagaacatttcaacaagtatttagtaaattaagaaaaaaagaatctagcaaactaatatttaaaaatgcatattatataattaggtatattacgtaggaaataaccatcgttcgacttcgttcattggcgtggtttgacaactagagacgcaactagcaaggttaaaactgtaattccatatctgacgaatatgatttgttgatagaagggtgagatcgtaatttcagatttataatataaaaaaaaacaattttctaattgggtcgactattgagcacaaatgctataaactcgtcgccgttgcttcaagctcctaaaacgtgtccaagtatcttttgcatcttcaaagcaaaagaaaaacatcaattttttccaaatttttatcattttctcaatcgtcagtactcagtatttagagtcaaaaatctcgtcgaagaatttcttttggaggaagcgttatttttgctaaaggtactaattcaacttatttttcgttttaaagtttttgttgtgttgttactgtttatctttgaagtgaacttggaatgtttctggttttgagtcaaatctttggtatcaagttatcttctattttctcagagatttttgttctgtccaatggaatattctagtaattattacagattttacgaaggaattcttcaaatcgtgatatgcgtcttcatcgttctatatctttcttcatcgtcccccgatggttcttttatattcttagcattcttcgagattcgaatcttaagttgatcctgttctgttttataatctgtatttaatataattttgaatatttcaaaggatgagttttattttcttgcatgatttcaacaaatattatcaagatgaacttggatcaggtcatgagtaaactgtttaaggatttgatgaattttcaagctctgttattttttttgtttaaagaatattccttaaatataccaatttagtggtcataactcataactcatataaaggtaaagaatatctagagtaaaaataaataaattaaggtaataaaatctgagttatttaactaatcaaaacacttcaaatagtttctcttgagagttcataaaagagacacaagtacaaaatcacgatctgtcactcattccgacacgtttctagagattcctcactagatgtaacctttatgtaacgccaagagttaaaaaagtaaaattctatatgaaatattcgaatatactcttttttgatactttttttttatctaatatttatttctccaatctttaggtcaaacaaaacattggatttcgagaactgaagaacaagttttgatgggttctctaatgcaatctgaaccagagatggagaaaaaaccgatagggatacgattcttggaacgtatcaaaggctcaaagctctcttacagtgcttatcaagccatagtgttgatcgtgacgtttctcgcttacgctagctatcacgctgcaagaaaaacaacaagtattgtcaaaagtgctcttgatcctcaatctccagatacaggactaaactcacttcttttgagatttacttcgtttggttcctctgtaaaagaagaaggtggttgggctcctttcaatggtcctgatggtacggttttgctcggtgagatcgatgttgcgtttcttgcggtttacgctttcggaatgtatttcgctggacatttgggggataggatgaatcttaggatcttcttgactgttggaatg

SEQ ID NO: 6788 - DNA, 3000 bp, Unknown
  misc_feature (1)..( 3000): cDNA_ID_1815516_gDNA_ID_1621105_Annot_ID_171561 3000 nt of promoter + ATG
gaagtcatggtatcgaagttaatgttcttggagaagactttgagagtaaagttcttgaggtatctatgtcttcttactcttcaatttgaagttaattgttaggattctgttaactaaatgttcaagttcttataggatgctcggaaatcgtgtcttcttgtgaatgctcctttgattcatagagcttgttctcgagttccgttctctgttcttaagtatgccatgactcttgatggtaactatttcaacctccatttcatatgtttgtaggatagctgttttagctaacgttttttttgtttattgataggtaagattgcagcgagtagtggacatgcagcatggataagtagtaaactctctagaacccgagtgttcgagttgcgaggaggaagtgatgctgtgatagttggaggaaacacagtacgccaagatggtaaatattgtatcttaaatctcgcatctttacggatgcttacaacatattgaatagatatgtgaaagttgtgcaattttgtaactgcagatcctcgattgactgcaagacacggacagggtcacacccctacacgaattgtgatgactcagagtcttgatcttcctgagaaagctaatctatgggatgtctcggaagtatctaccatagttgttacccaaaggggtgcaagaaagagtttccagaaattgcttgcgtccaagggtgttgaagttgtggagtttgacatgttgaatccaagagaagttatggaatatttccatctccgtggatatctttctatactatgggagtgtgggggaacattagctgcatctgctatatcatccagtgtcatccacaaggtacccattatactatatccatacttatttgtagtcatcttatgtttttgtctggctaaacctcattttcttacacttctttctctcaatgtaattcatttttcaggttgttgctttcgttgctccaaaaattatcggtgggagtaaagcaccttcccctgtgggtgaccttgggatggtagagatgacacaagcattgaatttaattgatgtttgttatgagcaggtaatttttttgctttatgaattaacattcactgtgacaagttaaccatgttactgaatctggcctcttagttccgtgggtttaatctaaatccttgaactacaggttggtcccgacatgcttgtcagcggatttcttcagcccataccagacctcttacctgttatcccatcagaggatgcaactgtcgagattgaccccagtgttgacccctttgaacctagtatcatattcttctacaaaacatgggacctctatggaagtttctcaaatttttctccacatccaattcgaatgccctatggcgaggagaatgatgattacatgacctggtccagtgtggaacattactatcaggtaccacacaacagtccatgtaaaatggtatcttgctctttcaaaaaaacataatctcttgatccttcacccaaaaactttaaaggcaaacaagtttgttggggtcgaaaatccaaaggcatatgattgcgttgagaaaattagaacagctagaagtccagaggaggcagctctgataggcagatcaacactgagacagaaacctgaactggtatgaataaaagttgaattgtccagtttcgagcatcaaagcagttttcactcgtttgttgatctctcgagaatcgagatcgttattcaggggatcaataatactgcattctcgctttaatgattgttttaggttcggaatgattgggaagatgtgaagatagaagtaatgtacaaggctttaaaatgcaagttctcaacttatcctcacttgaaatcaatgttgctctcgacaattggaacagttctcgtggaggcttcaccgcacgatctattctggggaggtggccgtgaaggagaagggcttaactatcttggtcgactgcttatgcagcttcgttctgagtatctgggcgaatcctctgtttcagctgaaaagacttcttcggcctgatggatgatgatagtctttcatatttattccaaaaagttatcaataaaactttcagttttcctcaattttgacatttacattgttgtaattctttaacctatataacattattgtaagtttgtaacattatgatagttttcctagaccatttgattcacattaactcatactgagtattttaaatggtaacggtagagtttttatttgctttgttcggttttaaaaccaatccaacatattcaagaatccaattcgatttggtccggatcagtgaaaattccaaggcttataggaacacctttcgtaaagaagacactaggtggtcgcaacttttcgagaagaacagacactaggtggtcacgaagacactagctggtgacaacgtcagaaaatactcaacataaaagtaaaactcttaaaagagttacataacacaaatattaaaatatgtatcatataatcatcatagtaacataaacaaggattgttgtaagagtttgcgtatgcttgaaactacaagagtagaaactgagctaaaagcacatggaaggttactttaacattggaaaaacacatctttcttcttcttcctttcaagtcacttttcctcttcttttctttcattttgacatttctttcttaatactttttaaatatgtaatggaatcaattatagacctttatataggtgtttgatattatatgattttataatcataggttgctaaataagaatgtaagtcatgatatcatatgaatacaatcccaagcaaagacaacacacatcatcatgttctcccctcaataacaatcacttgcaaagtacatacacacaaactcaaaataataattctagaaaacaattattaactaatttaatatacaaaactaaattccctttaattagttaagacatcacaccaagaaacttctcaattccccatacaaactcatacccaagaacttcaaaaaa

SEQ ID NO: 6789 - DNA, 3000 bp, Unknown
  misc_feature (1)..( 3000): cDNA_ID_3048908_gDNA_ID_1621105_Annot_ID_171560 3000 nt of promoter + ATG
ttctgagatgcatactgaatgatttattatgtaaagtattttgttttccgtccattacatcatcatcacagatacttgatataatcatattacaaaatacaaatgacgatcaacccatcgatcaatctagaaaaacggcgaaattgaagaatgctaaattgatcaaaggataaacttttgggcttaaataaagttttgctgaaaatatttcgggcttatatagggctggccctattagactacaacttttttttttcttctttgacagtaaacgacgacgtctccctttttttctttcttcgatctccttctgccaaacactctcttcttcttcttcttcaatcttctttcttcgatctcttctttttcaaaatctcttctttgattgtgagaagccataagtaaaggttcgatttctctctatatgtctttcatctttctcatttttatattctcatagattgatagattctctatctttggaatctgattcataggattggggtttaatggttttcgaagaaatctgggttaaagtgtgttcgtgtgttctctaaatttgattcactaaacgtgtgttcgtgtgttctctaaattgaattctgtgtagctatgaacttgtgagtcgctgtaaaattggatttgaacttgtgggtcgattcatgttttctttcacatttggggaatcagattcttcttttgggtctgtttttgtatgttgaagtgtcgattttctattagtagttcatacattcagacatgttatgtatgtgaagtatcgagtttcaatttgctgaggattgcttgagaatttggcctctgttgcttccgtttatatcggtgtttttgggtttctatatcattgattctgcaacacattgaacaagaccagagactacatataaatgtctttttggttggatatgtttctgtttgaatttgtatgtttatagttttgactatagactgatctttatagctcaccaagaaaaaacaataaggaagggacgaaatttgtgtcaagataattgcagacgactctcctctgtctctcttttcattaacagctttttagttttgaaatatggctggaactttggtaaattagttgtatatgtctttttggtccagagtagtatgatagtgtgtatatgtttactcattagtgagtctgtgattaaattagttgactgaccaattaaattcaacttatttgatgtcttttataccgtacttcttgaatgaatcagctttgacattctttacaattccttgtgttttgccttaagttttgcacataaattatgcctcatgattttggttgaaaatgcaggtgattgaaatctataataggagctgccattgtgtgttgaatgggtatcaagttcttcttctaagtgatccaaatcctgcttccgattagctcaaatacttggtaataatttcttctcttttcgcagtttctaagtgacccttttatacatttcgcactttacataattcgtctgctttctctttacctcacagacacaaagagttcctgcaaaaagagctcaaagagtttctctttacataatccggtgatgtactgtctttctttcctgtatcagttccaactctttggtaagatttttctcttgatttttagtttgtttctgaaacaaattaggttatgtgtctgagttggtttctagggaaaatctatttgctttatatgttaagtcatcatcatatattcttttgcagacacttatgtctgcactggatttattgatattgaagctccataagcacgaattgatgatattcctggctttgtttattggaaatcgagttggttatgttaactttaggagagcttggatgcattagcactgtgactatctctgtagtatagtctctgtttgaatctggaagttgagtaggtgaaattatttagttcagctatagaaacaaaaatgaattgttgacattgatagttgagactgttactacggcacaaagcactgattagagcctgtcaatagaaactagtttgattcttggggttggtccaccacgctggatcctgactcatactgcatctgtattgctacacttgtactcttttcgagctagaattgaagctgttcttaggttgagtattgagtagatgataatttagagaacttgagatgtatgatatgtcactctcattggcttcaaagttggagctgcctacttgaatttgggtgttccttgtttcagttagtatttgcagtacgtttcttcttcttgagttaagattcttggattgttacttctcatgaatactctacttgtgattgaaattgttgtctttgttggcgtatagtttacttgtatttgcagttttggttttatcttgtggagtcctatattgggttgatatgaacttgttgcttatctttatgcatttaaaagtaaaccttttctatctgaaaccgcaggtatttcaagtgtagtgtctgatcttaaccatagaaccttctttgaattggcatgatccatacattgtgaaaagtaaattatgaagatttgtcaactatctgaaaatacaaaccaatgcttaattattaagatccataatgttgattgttattatgctttggttcttatataaaatttttttcatgaaaatggaagtttaaacaatgtgttataggcacaactatggcctagttgtggatttaacgagtgcacttacctttatcattgccgttaaatttgttattatatgaaagaaaactcaaaataataatgtcttatactaaactgataaaaaaacatttggtatgggtttgtgacagaatggatcaaatccctcatcgttgatcacgcagataatgttatgtataatagatttttcttattgggcctatatgggcttcttctttatgtctcatgagcccaaataacattgcataacttttaaaactttcttttcttcgtttgcacagattaggcaaatcgattctctca

SEQ ID NO: 6790 - DNA, 3000 bp, Unknown; identical to SEQ ID NO: 6774
  misc_feature (1)..( 3000): cDNA_ID_1815548_gDNA_ID_1621105_Annot_ID_171544 3000 nt of promoter + ATG

SEQ ID NO: 6791 - DNA, 3000 bp, Unknown; identical to SEQ ID NO: 6781
  misc_feature (1)..( 3000): cDNA_ID_1815533_gDNA_ID_1621105_Annot_ID_55962 3000 nt of promoter + ATG

SEQ ID NO: 6792 - DNA, 3000 bp, Unknown
  misc_feature (1)..( 3000): cDNA_ID_2993944_gDNA_ID_1621105_Annot_ID_55963 3000 nt of promoter + ATG
aaatcgagtgtggtaattattcagtggaagtatataccggctagaaaaaaagaatattctgatgaggtaaataaaaataaaaatgtatatatgatccattgtaagaaaccaaaagatcagtacaagtgcaacactgaaatataaatatgattcaactaccaaatattactgaatgtggaattatgtcaagcgcaggccacattttacaacttttgtttcttctctgaattgtgtgaatgacaataataaaagttttcgtacttttccgagaaaaatataaagttcaaaacttagatggataatatttatgtttgataaaaaaaaagaaatggacatgagtgcatgacaattaacttttaagaaataaaattatagtcagacaaatgacgagatttttctaatttaatttagaacagtgataacgaaatgtactacgcaaccttgcgaccgagtttcatcaccatttgttcttttccaaactactattttaatcctctgtggatattaactctttgattcatttaaaagtcgaattgccgtatctattatgattttgttattttggtaatattagttgtttttatattgatgaaaaaaagatcaacagatttatattgcaagaacataactcacaaaagatacaattatatgaattcaataagagaaaaacaatttaaccaaactaattatgtaatgtaataataatatttaagaaaaactagtaatgtaagttgaagtcggagaaccagctggctaaggttcggatccttatgcccgaagatgacatggcacggccgtgcacgagtggtagcgtctatttctttctagccgtagctcgtagatgatgatttgccagatagactaggatcgtgacctcatgaaagacgacgagtcgctaccttttttaattatgcccaaacttattataaacgtgatattttcttcttctgttatttttttaactaatgggatattctcttacgcaatcccacttactaattcattaattgaccaactatataagtatgttatgaccagccggaagtaattaaattacgaatgatgtcgctttgtgaggactatgaggcgtttgaaagtcctttacttttacaaaatgacgtttggttaacattgtagggtacttgtaactaattgtgtgttttgtatattaaacacaatttttgcgttggcatacatttgaatattaggctgtttttatctgcttccttcaccgaacaaactgttatacgtcatctgtttttctattttcctttcacaaagtataagaatcttcttcgttatctgtttatttgataacgaaactggcttatacaaacatgacacggcatggatcttaacaattattagcgtctcaagtattgataaaataataataacagctacactcacgactcacgtcgcctaaatcaccacattatcatttttggtactagtatccaaactgttcggatatgtatttacagtctttgtaagagaatttcaatcatttatagctgaaggtgtaccatatagatagatagggacaccagcaatttttacatataaaaaagaaaaaaatatcaaacgatttacaatgtatcatgtcgcgattgggtcttgctgcctcaagaatagggctgatatctcgttttgtccaatcaaagaaaaaacacgtcatattcttattttgatgatttatatattagcattatccaaagtccaaagattataaactgagattcatcttctcgcccttgcacattgtagcaacgtgtgaggcatgtgcgatgcctatacctacaattcacatgtgatccggtatattaaaatatacatgatttatggatacactcgaatacttctccgatattcatttcgcggaaagttgcatatgatccactatctcctatatatttgttatataacacatggcaaatctctctatatatattttttaaatacacatatatccaaaataggcttaactataacacaaagacttttgtttactgtatattagtaagaagtaaatgtattttttaatattatgataaagtttgtgaaatcaccatttgcaatagccatatagggtcgtgttttaattttacagtttgtattgttataattcgattccaaggttgagaatatgtgtgtactattagactatacaaataataattcgttgacgatattgaatatttactaattataggaagagaaaattatttactaactatagtacgatatatttcttctatatgtgtttttaacgtttttttttttttaaatttaagtcttaactttacttctcatttttaatcaaaaggaaaaaaataccaatcaatttttcctaacacagtttacttatcattttcatttgaaatgtgttcactttctgataaaatgctaatcctacaatcaaatacaccattgtcgtgataacacgtgtacggctctaaagcaatcagaacaatcattggacagtttttacaccgtcagataagtacctatccacttgctgactcagccggataaaccctaaaccggaagtttgccccaccgtcaaaattggaagaaaccggacaaaagagaatgtaaagactaagaagtaagaacccatcggacgtcgtaagaaggttaattaacacgtggaaacagctggtcagagttatccggtaacttatccggttacaagtaaaaaaataatttgttcccatacacgactccttcagaaccaaacgcgacatcacggcgccgtttagtgtctataaatagagcaatcggtcgtagaaaaccaagacatcaaaaacacgaatatcgatagtacacttctacgtgcaattttctcctttctcttcctggacatctgtctgtttattacattttcttgtaatctctttttggggttttacaatatctatcccctaaagtttcggaaaattctgtttttctgttctcattcttcgtgatctttttcactttcttcaaaaaaaaaacatg

SEQ ID NO: 6793 - DNA, 3000 bp, Unknown; identical to SEQ ID NO: 6778
  misc_feature (1)..( 3000): cDNA_ID_1815529_gDNA_ID_1621105_Annot_ID_55964 3000 nt of promoter + ATG

SEQ ID NO: 6794 - DNA, 3000 bp, Unknown; identical to SEQ ID NO: 6777
  misc_feature (1)..( 3000): cDNA_ID_1815526_gDNA_ID_1621105_Annot_ID_55965 3000 nt of promoter + ATG

SEQ ID NO: 6795 - DNA, 3000 bp, Unknown; identical to SEQ ID NO: 6776
  misc_feature (1)..( 3000): cDNA_ID_1809157_gDNA_ID_1621105_Annot_ID_55966 3000 nt of promoter + ATG

SEQ ID NO: 6796 - DNA, 3000 bp, Unknown; identical to SEQ ID NO: 6789
  misc_feature (1)..( 3000): cDNA_ID_1815520_gDNA_ID_1621105_Annot_ID_55968 3000 nt of promoter + ATG

SEQ ID NO: 6797 - DNA, 3000 bp, Unknown; identical to SEQ ID NO: 6788
  misc_feature (1)..( 3000): cDNA_ID_1815516_gDNA_ID_1621105_Annot_ID_55969 3000 nt of promoter + ATG

SEQ ID NO: 6798 - DNA, 3000 bp, Unknown
  misc_feature (1)..( 3000): cDNA_ID_1815512_gDNA_ID_1621105_Annot_ID_55971 3000 nt of promoter + ATG
gtattaataatcggtgataacgacctaaacattgacatatatactcatacaaatacttttatttttctaaaatcgtatatctactttgaccgtagaggcaaattatgtactatccacgttgacaaatattttatcaaccacattgatcaaattaataataagaattattgatgacaaaatgtgaaagccccatgcgctaatccatgagaaacttgcattcaccacaccacatccacatattactttatgtaatgtagttgtttccaaaacttaatttctttcagagccctttctgatctgagcgttgtggggtcttcaaattgtataccccggatcccaaatgatactgaacattttttctgtggtggttgtttatttagtttccaattgttatttcccttaaatactctaaagcacgtgaagaatgcgaaacccaattcatgcacgaacagtactcattaatttctgattatgattttcttcagttttgggactaccaaatccaataatccaaatgagaatactaaaagtttgttgtcacatatcacataagaagaaaaggacttgaatactacacgaaagggggaaaggtgtagtttacacattacacaatacatatagaaatatatattaaaaaaaaaaaaaaaaactaaaacttgtgaaagttgattatgaaagttgacccatctaactagtgaacccatcgaagttgattatctaaacatgcttaatatatggattgatatttggaatccacatttgccaataacacataattgggttcataaaaattcaacccaaattaacacctaagctctagccaataagattgaatttacaaagtgtttgttttcttcttttgttccaaaccacttgtatcaactactatgtcctcaagttcccaaaacaattttattgtttacgataacaaatccctaggaatgactttagtataatacagtatacaaaaaaacactaaatagagtacaaattagtagatgtggccgaggttgaggtgaggaccacgtatccaaaatatttacagtccttttttttgtttttgttaaagatatttttgcattcgtacaaaagtatttgcataaaaggcacctaaccatttgttttaccgtatataaaatttttttaactgtctttgcatgccggtttttatcatgaagttcgaaattttttatatacggtaaaacaaatggttaggtgcatttgttacctctttcttttattatttatcatccactaaaaatcatcgtgtaacgtagaccacgcataaattctaaattattcttgaccctgaattattagtacaccaattaaaatatttgaatatcaaactgaaccaattctcaacagttttagtgtacagttctcaaaaaaacaagttttttggttcaaaaatagtatttacaaaatattaaaaaaagaaataaaagaaatggaaaatttaaattttgaaaaacatatagtagaatgctatatttatttccagcttcaagtttataaaatataaaagaaaaagaaaaatatatttgtcagtttagtaattctagaaaatgtaaagatttagtttttaatgagcataagaaagatctagtatgcataatgttaaaagtcatacatgaattgtatatctagaacatttcaacaagtatttagtaaattaagaaaaaaagaatctagcaaactaatatttaaaaatgcatattatataattaggtatattacgtaggaaataaccatcgttcgacttcgttcattggcgtggtttgacaactagagacgcaactagcaaggttaaaactgtaattccatatctgacgaatatgatttgttgatagaagggtgagatcgtaatttcagatttataatataaaaaaaaacaattttctaattgggtcgactattgagcacaaatgctataaactcgtcgccgttgcttcaagctcctaaaacgtgtccaagtatcttttgcatcttcaaagcaaaagaaaaacatcaattttttccaaatttttatcattttctcaatcgtcagtactcagtatttagagtcaaaaatctcgtcgaagaatttcttttggaggaagcgttatttttgctaaaggtactaattcaacttatttttcgttttaaagtttttgttgtgttgttactgtttatctttgaagtgaacttggaatgtttctggttttgagtcaaatctttggtatcaagttatcttctattttctcagagatttttgttctgtccaatggaatattctagtaattattacagattttacgaaggaattcttcaaatcgtgatatgcgtcttcatcgttctatatctttcttcatcgtcccccgatggttcttttatattcttagcattcttcgagattcgaatcttaagttgatcctgttctgttttataatctgtatttaatataattttgaatatttcaaaggatgagttttattttcttgcatgatttcaacaaatattatcaagatgaacttggatcaggtcatgagtaaactgtttaaggatttgatgaattttcaagctctgttattttttttgtttaaagaatattccttaaatataccaatttagtggtcataactcataactcatataaaggtaaagaatatctagagtaaaaataaataaattaaggtaataaaatctgagttatttaactaatcaaaacacttcaaatagtttctcttgagagttcataaaagagacacaagtacaaaatcacgatctgtcactcattccgacacgtttctagagattcctcactagatgtaacctttatgtaacgccaagagttaaaaaagtaaaattctatatgaaatattcgaatatactcttttttgatactttttttttatctaatatttatttctccaatctttaggtcaaacaaaacattggatttcgagaactgaagaacaagttttgatgggttctctaatgcaatctgaaccagagatg

SEQ ID NO: 6799 - DNA, 3000 bp, Unknown; identical to SEQ ID NO: 6786
  misc_feature (1)..( 3000): cDNA_ID_1815508_gDNA_ID_1621105_Annot_ID_55973 3000 nt of promoter + ATG

SEQ ID NO: 6800 - DNA, 3000 bp, Unknown; identical to SEQ ID NO: 6784
  misc_feature (1)..( 3000): cDNA_ID_3042610_gDNA_ID_1621105_Annot_ID_55975 3000 nt of promoter + ATG

SEQ ID NO: 6801 - DNA, 3000 bp, Unknown
  misc_feature (1)..( 3000): cDNA_ID_1815585_gDNA_ID_1621106_Annot_ID_55978 3000 nt of promoter + ATG
agtgcctggtgcaaaaggtccaaaatggtaacctcctcttgatccatgtcttgattcatgaacatcaaagcttttgttataagaactctctggtgttgagtgctttttcatctttagccttctctctgtagcgttttcttgggacgaagatgatgatttgcttctcttaacattgacgtttgtaatatcagttccgaaagctctttttcttgactccaattgcaacaaatcgctgctcagtgtgaaagtaggctcaccattgtaccctaaccacttgaaagctggtttcctagaatctaaggtgtgagtctgccaccagagaatacagaaactagtaagacttaaatcacagcttgaaatcatagatggttcacaactgttgtagctattgataactttgacttaccttctctatgagattcattgacgacaagacatttgctatatcataaagccgcctcactttagctgcataaaagtaatcaatgtgtcaacaaacacagatcgatttgtctcaaccgaggatgttaacataaaagaaaagacttttcaggtcacaagacgaagataattacttcgcattattgatgtattgtgggcatcaccaagcagtaattttgcagcgtcatcaagggagatgatcctaatagcctaaacagttgaacacataaaaaacaaatctttagtaacttagtgaataactctttagttcaaaaaacgaatctttgaacttctcacttacttcagagcaaataaagagtttgataaagttctgagtaagcaatcctaaagatttctctcgtcggttatctgtcatacataaccaaccaacaaaatgttaggatatctacattgcatctcataattcatatcccacatatagagttaccaagagggtaaatcacttaactactttgcaatggcactaaacccgaacacaataagtactacacgcacaaaatgaaacagtacctattttggagggatctgaagattggggaagagaaccaggttttgaactatcagtctggctactagagtgaggctgagaagactcttcatcatcatcctcatcatcagatccctgaaagtatgaaactttaagcattagaagtatgaagacaacaaactaaagacacaagtatatcaaaagaaaccaaatccaaatgacttactttaacattctcattgacatagaaacgatgaaaagtgtccttaaccccctcttcctacatcaagaacacttcctatgagaatatgcaaatcaaatcgctacatttcttcacaattgggattgaatgggattgaatccgaatacaaaacaaatgaaaagactcacttgtagctccttcaatgctcctggaattgcggaaaaccctttccacgtatactgattctttgctcttcttgttaaaacctaaattagacaaaactcgaattaagcaaacataacacttctggattctgaaaaaaaacaaagtagtggagaaacaagtctcaccccaacactctccagaacattaacaatatcatagattcttcgtctctccactcctgaaataaaccccaaaaaccccaatcaacaaattaagatgtaaaatcagaaatgaaaataaaaatcacaaacacaaagtgggcaatacctaatttcgaggcagcatcatcaagcccaaccatttcaatcccttctcgattatacaaagctaagaaactgagtttacgaagaacactaatcagaacaaattcaacaacaaataaataaaatgggtttagtaaaaaggcactaacttggtacaaagaagtccgagagatttctgtttgcgactataggaatggtgtaattgtaaagccgaagaagattccggtatggaagaaggagaagtaacggcaagtttgaatctttctggcgatagatctgacatggttgacgcaaacgatgtctgcgattgagaatttgatattgtattttggagggatttcctaaaaagagagagggggaatttcccaagatacttgagcgccaatttgaattttttggctcctccttctccgtaacatttacacactcctctaaattttggtaaagctgaaacctttacggttttgtgctcggttcagatcgcaattttttggtttttgtctttttgttttttcggtttagaaaatttcttacaatattttcaggattctgttcaactttttcatttttcttttccaaaattagattacattaaccaaaataatacattttcaatcaatattatagtaacaagatctattttggatatctatctttttacttgaactcaaaaagtaaagttgtaaggggattttggttttgtaggatttaaaagtgatttggtctgaatttgtttttggtttggtatggtttgtttggttttggaaagattaaatcttttgatttgtaatcttgtaaagagtaatgcccttaaaatggtagattcatgatagtgtttaactacttgcataagcaaaatcagggtctatctttgactaaattatagtcttaccattaaaaatttctattgaccaaaacaaaaggttattttgtccaactaagatttttttttctataatagttttgcatacctttggtcttactcatttgagctaaaccaattaatttaaagttgttgacaaaacaaaaaaaaaaaaattgcattcttattttatttttacactttttcaataattcattgatacctaacagaaattaatacaaagtgacaaaattgatatgatattaaaattagttgtgtaaagagtttttgtgtgtgtgtgtatgttagtttcatgggcctattttgaaacccaaaagttaatcaatgggcccaatacacacgatctctctgtaaatttcaaaataattaagatggagggagcaaatgtttctgaaatctctctccacgacgaagaagagattcttcgattcttttttgaatacttaaagttaaactctcagtttctgcttctgctatg

SEQ ID NO: 6802 - DNA, 3000 bp, Unknown
  misc_feature (1)..( 3000): cDNA_ID_2175536_gDNA_ID_1621106_Annot_ID_171577 3000 nt of promoter + ATG
tatgctctcagagatggctattcagagcaggtagtggattgttcaagtgtgtctgtgtatggttatgagcataagttgctcttgtgtcagcttctttgcttcatagatttaagctactagcctactgtggtatatatttattacatgtgctccattattatatgacaattgtgttcctgggatgcagatagcagaagctttgctggaaattacacttcctagattttctggagacgtcatcccaaaaacagatgcaggaatggttttggcaataggtgataggtaaattgaaagcctaaagttttgttgtctctcccatttctttctacgccaaacggttcgtcctgtgaacacaaaaccttgtatctggattgcgcggagctaaattgtatatgcttctgatatgataatttttgttcgaatttgtgatcctatatactaacacctatgcttgtccctatgactgtagattggatagccttgttggtttatttgctgctggttgccagccaagttcaacaaatgacccttttggccttagaagaatatcatatggcttagtaagtttatagatattctgatctgaaaatgagctattatgatatgtcattttatggttgcatgaggttatggatgccaagtaatactttgtatgccacaggttcagattttggtcgagaaggataaaaatgtcaacttcaaacgtgttctagaacttgcagccagtgtacaaccgacgaaggttgaggcaaacactgtagaagatgtgagaatcaattgagtggcatcaaatcttgttatcaccatctgaaattgttcgtgacataattaactcttttatttgtttctaggtgtatcaatttgttactcgaagactggaacagctattggttcgtgcaacttttgtgatgtttatctttttcgatttcccagctcttaaaatatcttacgggtccagttcttgaaacaacgttttatccttttttacaggttgacaacggagtaagccctgaagtagttaggtctgtcctagcagagcgtggaaacaatccttgtctggcagcacggactgcatacaaggttagtgacttgtgatatgatccaatagcagttagctagggaattaggtaatagttgagaagcctttgggcatcattctcctagtgaatgttgctgtgtcatagtgatattgctccaaagaagctaacatcgctggtgcttgccttgcagacggaaaagctaagcaaaggtgagatgtttccgaagatagtggaagcatattctcgtcccacacgcattgtccgtgggaaagatgttggtgttggagttgaggtacttgaggtttctgtctgatcaaagagcatttgtgaaaacttgcagcttctaacattgaatgatgcaatcaggtggatgagaatgcatttgagactccccaagagagaacgttgtggagtacttacacctctatcaaagatcgaattcacactggtaactcactttcttccctgctgtattctctcaaacaagctcgcttccaaattcgtctcactaaccttccaaatttcaggcattgaaatcgaggacttcaccgagatatccatgcaattggtggagccactcgaggatttcttcaacaatgtatttgtaatggtggtaagttaaaactttgtccatacactgtactcgagtatcgcagacgagtgaagtttgaatataacggtttttgcaggaggaagaaagagtgaggaagaacagactcgctctgcttaataacattgccaatcttcccaaaggagtcattgacctctcatttttgcccggattttgatctttacttgtttcataatcccactccggaatcatcaattcattgacctctcattttttctttgtttcataacctcatatagttgtgttcactgagcaaaaattcaaactaaaacttgtgcaatggaatactttaaaaacagtttcataacctcaataaaaagatttcaaagatttttagatacttctgattgagatgtgttctatttcaaaattctttttttttttctcacaagtgatagaatttattaagctttcacaatatcatacataggctttaacaaaagcccaaacagcaggtttacagaaatagccaacaaagaccaaatagataaccgacttctgtagaagaatttcaatctaaactccatccatggaaacgtgtcgacaaccggttaaaccacgtcccacgcctgatgagtaatcacaagtttttccggcaacaacctccaccgttgagcgccgattccggtaagaaatcctcgccgataaggaatcgaacgaagactcttatgttttgcaccgaattgaaagcatcgaagctccaattaaagtaacagcttaagggaccatgataagcgacacaagaaaatcttctttccttcaacaaaagagtgaaatctctttgaaatcattctgtaaatccagagtacaaaagaaaaggatccgaaatttatcttgaagagataagaaactaattcggatcggagtaaaactcaaaggacagagacaaagaagaaccaccgtggatatggcagatcaacatccctaatcgtagatccgatgagattattagcaaattaaaaacataattgaaaaattaaagcaaaaacagaatccggccatggccgctaggttagccggtcgatgccgggcaaaagctagccaccgctacttaggaagccagtcggtgctagacgaaagccggccatcaccgttgagaaaaacggaagacgccggacatgtagccggataaccaccggacggcgagaagaagagcgtattctctctctaaaatattcagagagcgagaagagagagaaacactgacgaaaatatagattttatgggctaacaaaattcaaatgaaaacattggattataagatggttaacaaaaatggttgagaaaaaaccatcgagagaaccaaagggagagaaacggagctaagtt

SEQ ID NO: 6803 - DNA, 3000 bp, Unknown
  misc_feature (1)..( 3000): cDNA_ID_1988780_gDNA_ID_1621106_Annot_ID_171584 3000 nt of promoter + ATG
taacacaagctaggtaacactttttttcttttcaaggtacactttatagtatatactaaatatacaaacaatgattcattatgctgaattagttcgtggaatttccgtcactagtaaacgatgcgtgtaaacacgataaccatgatggatgtttcatgaaatgaatataaagcatatgttcatgttatatgtgtatatttacatagcgtatatatatgtagatctatatagattatagacttatagtagatcattcattccttatatacaaatgattgtgtcaattggtacagtccaaaaagttatgatgtctttgacgaagaaatgtgtacgaacataaatgcatttacaaatagtttttgcgttcgatatttgaagcaactgtaaattttttcgagacatcatttattgttctgtgtttttgtcggttttgtctctgcatcaaagcgaatataacattttttttttttttttgtccttgatctctctattaacacttacacaacatacaaaaaatgtgatgctcgaattcatatttagagcaatgcatatttaacaattgctaattagtttttgtatacaaaaaaaaaaaaaaaaaactacacacacacacaccttttgaattaacctaattttgttgtaattgtttcattgatttgtccccatttcaacaaacactacctacctaatgcatgtcattgaaaacaattcagtatatattttaacgacaaaattattccgtttatcctgtatgtaatggcaattggcaaacttgtgagctcccttgttgttttgcttgaagaatcagcttgcttcagggaaaatcaattcatcatatagacatgtttgttcttgtttaataggccataaggtttcattttgggttccgatttaagagaatcagattttgaaaaaaaaggttaggtattgactatgaagttagcatttttgaggtttggacgattaaaatgactggttatcgatcatatgtgtatataatagtaccttaaaagagtgactagaaaagttgttctagacaatagtaccttttaaaagagtgactaaaagttgttaaatgtcaataccagttaatttgacctgtctcgccaaataattaactaacaaaaatctaaaactttaacagtgaaatcttttcatattgcacaagcagtcaagcgcatgaaatgtcgtcgcataactattaaatataccatgtactttacattaacctacttatttttactcgatatatctacctaattatgtttataaactatatatacagtctatacttaagaaactttttacggtgatctatcttttaccttttaatttttattacttgaataacaataatctagatgtaacatgtgttcgcttttaattttttgtaattgaatagatttagcttcgttaaacacatattgattgatgaatgcttgaaattattgttctacaaaaatactccaacaagattttgaaccaaactagagatcaggcttgcatgattaacaaaactatccattgatgtaattataaactatcaaaatgaacggggtcaaatatgtgacaaagtcataattattgacccaatatgggctttttgataaggcccacagacagtttttacccaagttcctaagaagaaagttgggtttttgctaatcaggaaacaaattcgtagaagaaatattactgcatttggagaagaagtcaaaattaaagaggaatagactcacaaagtcaaaagatcaaaagataagcacaagatttgtattaattaaatacctaatgtatcaaaaacgactatttcgtagtgagaattaggaaaaataatgacacacaaacacgcaatccagaataaacataacacaaatatctacctaatctattttatcattaatttaccaccacaccattttatgaacgtagtcaaataatcaaaataataccttttattttgtataaattaattaaataatacataatctactctaatctaccccaccaaaccctataataagttgcgtgactttcttatattaatcacgatttgattgaattaatacattttttctcacctaatcaaatctttctcgttctcatacaatatggagagaaactcttgggccgagcagtgggacagcaatcaacaatcgtcgggaaaaacaactcacggcggagaaggtggtggtgcatcgtctaaatacaaagagaaagtgggggctggattagggaagacgaaagcggcggcgagttcggggttaaagaaggtgaagataggaacatcgttgggtcttaattgggttaaagacaagtacaacaagaccaccactaagaattgactcatcatatctttgtttttttggatttacatattcgtcttcttcttctttttgtaaacgataaaaatctgttttgattcttgctatattcataatgatcggagatattaaagacttttgaaaaagatgatttggcttggtttgatctttttattgttccgtggaaatggggtgaatcgtttggtttgtgaataattttactaatcattttatatagttcgaatcaaaagttgaaaaactcaaaaaaaagaatctggatagtttgatcttgtgcggaatattaaactgtgatgaagaattggaatcgagtctagattcttgatgactctttaagtttaaaaccggtttagctaaaaatctgcaattttgttgaatgtcccttttgattaaacaatttttacaagaaagaaaaaaaagacagcctcgtataggatgtatataaaaaaatgatgtaaaaatggttagaaatccaaataaatgtaaatatccatgaattaaatcaatcttattttttaaaaggtaaaaaactattttatatgagcagctatcagaaaaatgggtcagatatcattcttagaaccaaaacggaaagtcccaacgatcccattttactccttttcaccacctctagtagcagagagagagagagagtatg

SEQ ID NO: 6804 - DNA, 3000 bp, Unknown
  misc_feature (1)..( 3000): cDNA_ID_2175570_gDNA_ID_1621106_Annot_ID_171590 3000 nt of promoter + ATG
aaaactatttaaaaagtaccaaacttattattttacttaaacaaaatataaactacttaattttagatacactctagaccataaaattaatcatatttttaaaaattattaattactttttgataacaacctgaattttgatattttaggattaataataattttttccaaaatcatatttttaaaaataaataattttacatttagattggtgtgttgtttcaaaatacaattttttctgaaattgatgtctatatatgagatttattttcgaaatagttcttaaattataaaataaataagagaaattacttttcatagtcgtaacctacttagtgtttaatatttattcttataaagaaagttgatcttcttaaaaaagaaataaaccatatgcaatatatagtaaagaattatattccgacaaaaaaaaagtaaagaattatattttcaatttttgttgatttttgctcatttttccattttaatattttgatcgtacataacgaacataacatgatatatgtcccgctaatttataatattaattaatttaatgacgtatctatttagacaaaatcaacaaaaatttgagattaaaatgatatgtcaacaaaaattagtaaatcaataaaaactaacctataatttcatccgagtcaaagttgatgctttttcagcattttttgagtatttatgcttttttcaacattttttgaagattgaagttttatcgtcgtctcgttggccttcgtcgtcgccgttttttggcgcttctttcacggtttatccatgtcgtgctttgtcgtaccgttgatttctccgttttcagcggccatcgtcattagatgtggagctgttgctcctactttaattagcatctcatagaacattcgaggatgcttagatctggaagtgttgccttggccctgtttattctagtttaataccggtttcataccgactatgctttggtttctgttgcttgtgaaaatgatccttctcgaaggtctcaaaggcttcctctggactccccttcaattcgtatttctgtattgacgcgatgtctagatcttccgtctgtgacatagtgaatgaataaagaaagagtctgtttctttcagtagtttaaggatgcgttttgtaacttcggaattagtttggactcggccacttgtgtatttctaagttcttagtattcgatctttggcttgtttggggttacctttccttcaagctttaggattttagtagttgagactcttgcagattttaggattgactggattgcactcatggctccgctgtgtcgcgaagtgtaaaggttcctaggatggaggttaagtgagagattctatttgtcctctcttagtattttattttctgcttgaactttctgataaatctcctctatctcttagatccttcttagtttgatccatttcttttgaccttgctaagattgtttcaaggcttagtttcatattttggcaaaaaacagatggaatgcagtgttatagtgggttgaaaccggagatattgagttaatctctcttgaacaccaccggttgttgaaatgttttcaagcctatggtagattttcatgtgcccctttctcgtaagaacaacaagctgaaacactattggtatctcatgtagtgtttgaactactctcttatgtggtttgagattattaagaatttcacaatgcaaatcacagatatgtaatcgagtagctatgtgtttggctaaacaagagtttggcattccaatgtatggttcctttcaatgatatataaagcttacacttcgtgaaaaaaaaaaaattgtaacacgtgatcagagcagaaagtgtgtgagagatttagataagattcacgtgctgctcacgtgatctatttaaagctataaattacgtcgtcttcgttttacctcttatctgaaaacagagaactaggaaattttgataatgtttaacgagtgatgcaaaattcaatcaagctctgtcgattttacagcttcaattgcataaaattggggctttggtgaaggattaaggctgatttatggagtgtataaattggtaaaatcttcattaccatgtatcattgttttcgaacgatgtccttggagaaatatgcgtcaatggagtccgtcttcttgagaagcatttttgagtgagaatgattctcatgatggatatgtcttcaaggacttctttcaaacaatggtactattcttaatacttgggatgtgagaggtaaacatgatattacagattgggtctctttgttttgtaataactattatgatctttctcatctttcactgaaagtctcatcattgatacgatggtcccatgtgtattgaatgttaactaaaaggaagaaactttaatgcttcttgttggtttcttttagtaccatttagcagcacaaaacaaaactctggtattgatgtccctaaagaacttctaaatcatcgaaagacttgtctcttgtttagtcgtgtgtgttgtgttgacttgttgttccacttttagcttagcttaagaagcttttttcctgtgttcattgcaaaagggttacgagaagattaaactagatattcccaatgttgttttttgaaattttggtaaacaaatatataatagacagtcctggaataataataaattcttccagagtttgtctgtttctgggattagtctctgtctttttatctttcaatgactgtatctcccatcgctctcatgcatatactatccgttatctctcttccacagccatcacagaccacagaagctagtacccatcttgttttaatcctctgcctctccctctttttcctcttcaccaacacattatctctacaatgtcttcttctactttgtccagaataatcccagtgtagcccatcgctgtgatttgcttataactttattctctgtatgaatgattgcatcataaagagtttcatctgcattttgtttgagaaatg

SEQ ID NO: 6805 - DNA, 3000 bp, Unknown
  misc_feature (1)..( 3000): cDNA_ID_3048977_gDNA_ID_1621106_Annot_ID_171588 3000 nt of promoter + ATG
actatgaaggagtcaagcagagcatgcatagtttagtcttaatacctttcccaaaatctacatacaactcaacattgtattttgttttcttccaaattgatgttattttttttaacgtaatctatgtttgttcatatagtccaatcaccaatgtactgtgtctgtatgttatttttactaagttcatttaattttaaaagtaacgaaaaaagttaaaggatggatcaaactttttgatcgatcgggcttattctaaaagcacatggatattctttccatatgcaaaacattatgtcgaatgcccattaaccaactttttcagttcaatcttagtgctttattatccaactttgaattgattaatatccacagtattctaagttaaaggtttttctttccaccaaacttgacatgtcgatagaattgttaagttgtaattacaaatgagctaaattgctttgcctctattttggagaaaaaaatggaggcataagttggagatggtaaacaagatttagcaagttgtatatactctaatctataaaactttatcattccctattaaaagaaaatgaagaaataccacattgtagtattttactgatcctattcctaccctaactctcacgatttatatttattaaatttattttgtcttgctagtcaactgaatttactgacgaaagaaaaaggctgtttgtgactgtatttgggagagtaaataaattgctactaataaacataagctttattgggtttagttaaagaggagaattttggcagtccatgtcctgtatatatccatttttaatactaatattatcaaatttaaaatttaaagtgaagggaagagtcagaggacaataaaaaataagtaaacgacagaggaatcaaaatcatgaaactcaggaaaggcagtgccttgaaaccagagaggtagagagaatgagtttttttttccccctgtaaaagcaacctcaaatgtaaaaacataccttatacaagtatattaatcaagaaaaaaacaattgagaaggagaataaaaaggaaagaaccaacttgataaagcaaggaggcttcttgaagttgggaattttcccctcaaaagtgctaaaatgtcagcgttcttattaaacaaagtttagtgattattttataaacacttttaattttacaatttgttgtatgcgcatgataaagttctatttacaataatgaaacaagaaaattgtagtaacttttattatcggtgtaacattagtttttagtatatattttacaatttatttttcttatataaatacttgcattgtagtctgaataattgattttaaataactaatatattttttaaagttgacacaagaagaaatttgaaattttagaagtaaaaaattgtggacacattcccataatttcctgagtgactatatagtaagttataaactgtacttatgtgcaatcataaaaaaaaaaaaacaatttcaggctttaaaagaaaaacagtttcaggcttcatagtatactatgagtaaatactaaatagtaaatagagaagagtgtcttaaactctcaatgaatgaagcaaaaatgaagcaaaattgttttaaaaaaaaaaaactttttccgctctcccagagagtttcactcaccatgatgggctaaagagacttatcatgggctagggaaaatggtcaaatacagtgggcttacttagcccaacgatactcgtcggtaaagtttcgtagtgcttaaaagtttcaatgaggcaactcgactaaaaatgggccgaactgagaagtacaaaattaacaaatgacatttacaaattaatatttttaaacacttaaaataaaaattattaatttggcatattcttctagtaagaaatagtttatgtcaaaaaaaaaaattatgtgatgtgaacaaaaataatgataatgaattatgtgttacaaaaacaaaagaacataaaaatgtgagtttattacttttaaaatttaaatagaaatacatttttagtcaaacttatctttaaaaatcttaattataattgataacacttttactgatacaaaatgattttactaaaatttgacctgcaataattatgtcaccatactatatgtatattgaaaataaagtaattaatttgattagttttttgtattaattaataatatataaaaaaataaataattagactttatgctctctttctttccctttacaaccacatactattaattagaaaattatttcttaattggcaacccaatatagatgtagatataatttccaaagaaaacctcatagattcaagtttaaaattcactttagtgctatctttctcatttgatttattttaaaaagctaaaatgaattaatgaaaggaacagataccgtctttaatggaggagaactggagaagaatccaatctaaaatacatcctcgtgtttaagcggtgagactttttcggtttgctgttaaattacggttttggtatcaaaacatttccggtttaagctgtatagctctgactctgcagaaaagtactttacgccaaagagatgaacaagagtagtaagtagtaatacgtagaaaagaatctctcaccgacgacaccgaagacgaagaagaccgtacagtacatttcttacacttgtctttctttctaaacacctcacttactctcactctcacacaatatctgttgcgcttctacaggaaaatcactcacattgcgaggaaaaaagattatttgactcaaggaaacaaaagataattcggaaatttcttttgttttcctctcaggtaaattttgttgtttgttaatttcttttccttggaaaaaaatttgttttttattttttgatcaatgattcgatttttcttgaaaagatttgattttgttgatgatttggtaatcaaatatgagtaatatggagtcttgatgcagaaagatgatttcttttttggctttttttggggtgcagtg

SEQ ID NO: 6806 - DNA, 3000 bp, Unknown; identical to SEQ ID NO: 6801
  misc_feature (1)..( 3000): cDNA_ID_1815585_gDNA_ID_1621106_Annot_ID_171581 3000 nt of promoter + ATG

SEQ ID NO: 6807 - DNA, 3000 bp, Unknown
  misc_feature (1)..( 3000): cDNA_ID_3048982_gDNA_ID_1621106_Annot_ID_171576 3000 nt of promoter + ATG
tgtcacgccaagatccttgctgttttgcaagcacctaaaacacaaagtatggggattaacaagcttacgtacataccctaaaatggagctctaagaatctcgattggtttgagagcaaaagaaatgaagagagctcacaaatttttaccttttcacttagaagacttatcgcgccactgttgctttctccttcatcgtcctttacattagttatctctgtaacatcatcgccggtgttctcggtaggagtttggcctgtgggtactccaaacatggcctcatcgtgggcggctttcaactgctcttccctttttgccttacaagtttttattaaaccatataaactgtctgaagctctgatataataaaaactgtgacttgattagaggttgacaatgtaagctaatgactcagtaaacctcgatggcggaaaacctataactttgtcccatgcgcttgaccaaggcagcatcatcatcagcacctgcaatcatatgaagtttttagcatcaagagtacagagtaactgagaatgatttccggctttagctctgtccgttcatcgaaatcatggagtaaaggtagagattcacgggaaactgaccttcttctagttcctcatcatcaactggggcctctttgtcgaattcaaatctttcccatcctgcacccttactggtatctttctcagctgcaaaccaagcagatcattaatttcaagagaagaactaaacatgagattgatatcaatgttttcacaaggtatacaacccaagggatctcatttttaaggacagagttgatctttcttgtttttttattctttctcagacaccaggacttttttcttcatctaccataaacacatttacagatttgatatctccatgaaagggtttgtctcaatcctccttatatacagagctgctatgaaaatctatgaggtcaatagattttgctttgctgataaggaaaagttaggaaaagtcttctcccaacagtaacgtgcattgtatcctgaatgccacgagataaagagccaaaacacagccctccacagaactacaccataaagactttgattgatgggagaattctcagctacctgctgacccaatgcccaaccaaaaacctaacattctccgtacctccattttaacattagcacctcaactaactggcttaaggctacgaatcactacaaaactactaaactaataagaaagccttatcagcatcatcaattcaaggccaagacattaagtgccaaaacacagccccaccgttctaacattccaaagatggatcccactcaaaagaagttgtcgaaagaatgagatcttagctgctctgaagcgtggacaacagaatcaatgtaatctctcaaatgggaccgactaacatacccgtttcatcaagctgaagcttcatcttggctttcactttttcagcagctgactgttcaagaaagcaacacaaaaaccaaccttataataccacggaaatgacaatcacacacagacacacacaaaacaccagcaacaaaattacagaatctatgactatcatccataaacaaagaaggagctccacaagaatggtaaaccaaattagagatcaagggtttataatctcaaaacatctattgaatgtgggcacatgaaggcaattcctatgttgcaatatgtaaaggtaattgctaagttcttattacactcctaagtcctaactctagagggattataacattacgatgctgattctggtaaacaaaagttcctcgaagtatgataaccatacaggctgaagaatgatgagagaaatgagtattaccatctcatcgtagcctttgattaaccgcgagtaatcaggcttcttctccttaacatcttctctgctcctccgctctctcctcggcgacaaacttctgcttcggttactcctcctccggctctctctatccccgtacctattacgcctctctgcactcctgctcctgcttctccgtctctctctatccacataactactacgtctctctgaactcctgcttctccttctatggcttttatctctctcatccctctctctactccgataacgacgccgttcactcgactctctatagctcctctccggcaccctaggatcttcaggtttcttcttcaatttatctctgatggaccggatctcggaatccttgttatcagtggatttagtatggttagaagccttgacgaattggttgagaaacgaagacgacgatgcgatcgccgatcctctctccggaacagcgttggctccggtggagaagccgagaccttgcttgaagcgagcagctccttctcctttacgcgtgagctcgtcgtagtaagctgccgctttttcttcctccataacttagctccgtttctctccctttggttctctcgatggttttttctcaaccatttttgttaaccatcttataatccaatgttttcatttgaattttgttagcccataaaatctatattttcgtcagtgtttctctctcttctcgctctctgaatattttagagagagaatacgctcttcttctcgccgtccggtggttatccggctacatgtccggcgtcttccgtttttctcaacggtgatggccggctttcgtctagcaccgactggcttcctaagtagcggtggctagcttttgcccggcatcgaccggctaacctagcggccatggccggattctgtttttgctttaatttttcaattatgtttttaatttgctaataatctcatcggatctacgattagggatgttgatctgccatatccacggtggttcttctttgtctctgtcctttgagttttactccgatccgaattagtttcttatctcttcaagataaatttcggatccttttcttttgtactctggatttacagaatgatttcaaagagatttcactcttttgttgaaggaaagaagattttcttgtgtcgcttatcatg

SEQ ID NO: 6808 - DNA, 3000 bp, Unknown; identical to SEQ ID NO: 6803
  misc_feature (1)..( 3000): cDNA_ID_1988780_gDNA_ID_1621106_Annot_ID_55980 3000 nt of promoter + ATG

SEQ ID NO: 6809 - DNA, 3000 bp, Unknown
  misc_feature (1)..( 3000): cDNA_ID_1815575_gDNA_ID_1621106_Annot_ID_55982 3000 nt of promoter + ATG
aagagatatactacttaattactttacttattgtttgtttggttcactatgaaggagtcaagcagagcatgcatagtttagtcttaatacctttcccaaaatctacatacaactcaacattgtattttgttttcttccaaattgatgttattttttttaacgtaatctatgtttgttcatatagtccaatcaccaatgtactgtgtctgtatgttatttttactaagttcatttaattttaaaagtaacgaaaaaagttaaaggatggatcaaactttttgatcgatcgggcttattctaaaagcacatggatattctttccatatgcaaaacattatgtcgaatgcccattaaccaactttttcagttcaatcttagtgctttattatccaactttgaattgattaatatccacagtattctaagttaaaggtttttctttccaccaaacttgacatgtcgatagaattgttaagttgtaattacaaatgagctaaattgctttgcctctattttggagaaaaaaatggaggcataagttggagatggtaaacaagatttagcaagttgtatatactctaatctataaaactttatcattccctattaaaagaaaatgaagaaataccacattgtagtattttactgatcctattcctaccctaactctcacgatttatatttattaaatttattttgtcttgctagtcaactgaatttactgacgaaagaaaaaggctgtttgtgactgtatttgggagagtaaataaattgctactaataaacataagctttattgggtttagttaaagaggagaattttggcagtccatgtcctgtatatatccatttttaatactaatattatcaaatttaaaatttaaagtgaagggaagagtcagaggacaataaaaaataagtaaacgacagaggaatcaaaatcatgaaactcaggaaaggcagtgccttgaaaccagagaggtagagagaatgagtttttttttccccctgtaaaagcaacctcaaatgtaaaaacataccttatacaagtatattaatcaagaaaaaaacaattgagaaggagaataaaaaggaaagaaccaacttgataaagcaaggaggcttcttgaagttgggaattttcccctcaaaagtgctaaaatgtcagcgttcttattaaacaaagtttagtgattattttataaacacttttaattttacaatttgttgtatgcgcatgataaagttctatttacaataatgaaacaagaaaattgtagtaacttttattatcggtgtaacattagtttttagtatatattttacaatttatttttcttatataaatacttgcattgtagtctgaataattgattttaaataactaatatattttttaaagttgacacaagaagaaatttgaaattttagaagtaaaaaattgtggacacattcccataatttcctgagtgactatatagtaagttataaactgtacttatgtgcaatcataaaaaaaaaaaaacaatttcaggctttaaaagaaaaacagtttcaggcttcatagtatactatgagtaaatactaaatagtaaatagagaagagtgtcttaaactctcaatgaatgaagcaaaaatgaagcaaaattgttttaaaaaaaaaaaactttttccgctctcccagagagtttcactcaccatgatgggctaaagagacttatcatgggctagggaaaatggtcaaatacagtgggcttacttagcccaacgatactcgtcggtaaagtttcgtagtgcttaaaagtttcaatgaggcaactcgactaaaaatgggccgaactgagaagtacaaaattaacaaatgacatttacaaattaatatttttaaacacttaaaataaaaattattaatttggcatattcttctagtaagaaatagtttatgtcaaaaaaaaaaattatgtgatgtgaacaaaaataatgataatgaattatgtgttacaaaaacaaaagaacataaaaatgtgagtttattacttttaaaatttaaatagaaatacatttttagtcaaacttatctttaaaaatcttaattataattgataacacttttactgatacaaaatgattttactaaaatttgacctgcaataattatgtcaccatactatatgtatattgaaaataaagtaattaatttgattagttttttgtattaattaataatatataaaaaaataaataattagactttatgctctctttctttccctttacaaccacatactattaattagaaaattatttcttaattggcaacccaatatagatgtagatataatttccaaagaaaacctcatagattcaagtttaaaattcactttagtgctatctttctcatttgatttattttaaaaagctaaaatgaattaatgaaaggaacagataccgtctttaatggaggagaactggagaagaatccaatctaaaatacatcctcgtgtttaagcggtgagactttttcggtttgctgttaaattacggttttggtatcaaaacatttccggtttaagctgtatagctctgactctgcagaaaagtactttacgccaaagagatgaacaagagtagtaagtagtaatacgtagaaaagaatctctcaccgacgacaccgaagacgaagaagaccgtacagtacatttcttacacttgtctttctttctaaacacctcacttactctcactctcacacaatatctgttgcgcttctacaggaaaatcactcacattgcgaggaaaaaagattatttgactcaaggaaacaaaagataattcggaaatttcttttgttttcctctcaggtaaattttgttgtttgttaatttcttttccttggaaaaaaatttgttttttattttttgatcaatgattcgatttttcttgaaaagatttgattttgttgatgatttggtaatcaaatatgagtaatatggagtcttg

SEQ ID NO: 6810 - DNA, 3000 bp, Unknown; identical to SEQ ID NO: 6804
  misc_feature (1)..( 3000): cDNA_ID_1815571_gDNA_ID_1621106_Annot_ID_55983 3000 nt of promoter + ATG

SEQ ID NO: 6811 - DNA, 3000 bp, Unknown
  misc_feature (1)..( 3000): cDNA_ID_2173637_gDNA_ID_1621107_Annot_ID_55987 3000 nt of promoter + ATG
ggttgctgcgatcaagtcattccagtgtgtagtatactttgctccatagatgttccaagctagagcctgccaaatttctgaggcgtaaacacaagagaaaaaaaggtgattacgggttccagcatgtggttacaaagagcgcagcctgtggagagacccctgttccagctgagcatccgatctccagttgataaacgattgtgagccgccatccaaacgcagaaggagaatttgggagtccctcctgcaaaccagacactcttatgccatgtgacctctgtcgaaatagaacgtgtgtggctccaagtatcacgtgctgaaaactgtggccggaaagtatcgtttttccccttccaaagaaagacgtcctctactgccactctgttttgctttgccaaaaggagttcttgttcaatggtattaagcgtttctgctcggtgataacgtgatctcctgcgatcccatgcctctgcaagtgtcttaaacttgcttatccccatgtcgaattgaccgcgttctcccagcacgtcaatcagccggcccttggatgaccaatcatcataccaaaaagacgcagtttcaccatttctaatgtcgaccttagaaaaggcttttgcagtgtcccgatattttaacagctttttccacatccatgagccctgagatgctgaccgaaaagaccaaaaagtgttgcgcttgagaagataagtcctaatccactgcacccatagcgagtcaccttgcgagacgattcgccaaatcagtttcagacaacaaacgtcattagcctctttgattgactgcagacccaatccgccctctcgttttggcctgcaaactgtctcccatgcgatcttagccttattagtactcagttctggtcctgaccagaggaaggcggaacatagcttatcgatttccctaacacattcacggggaagcctaaaagcagagagccaaaaattgcaaatactccataggaccgaactgaccaaatttagacgacccgcgtaagacaagaaacgggctgtccaagttcctattcgtcgctttatttgctcgagtagcgggctgtagtcctgtgaagtgaatcgcttggtgacgagaggtaaacagagataccgcaccgggagacgtcctactgcaaaatggaattggtcttcaaattctttgcatacagatttcgagatacctgcaaagtaaattgtagttttcgccatgctgatcttaagacccgattgctttgcgaaactatcaaaaacctccacaataccctcaagggaacgaagcttcccgtcggtgagcaccataatgtcatcagcaaaagaaagatgtgttagaccaagatttttacattttggatgataaccgaatttcctcaaacctgctgctctgtcaagcttcttggatagaacatccattacaatgacaaagagataaggagttaaagagcatccctgacgcagcccccgcaaactattaaaatatccagctagttcccgattaacctgaaccgagaaagatgctgtggtaacgcaaagcatgatccagtgaacaaattcttgaggaaagtctagagttaaaaggacattcctgaggaaggaccattgaacagaatcaaaagccttggagatgtcgatttttatagcacaacgttctgaaactgaatctttgtgatagtccttgactaactccgttgcaagcagcagattttcaatcaaaagtcgatccttgatgaaagcggactgattccccgctatgaactgtggcaacacccgttttaacctgtttgcaataatttttgaaatgactttatagaggacattgcaacaggagattggtctgtaatctttaatctccttggcttccattttctttgggattagagctagaattgttgaatttactccattgtatatggagactttgagggcgttacaaggaaacaaacggaaacggaaacaatgaacttcaatgagcttcattgtcaaacaatgacaaagaaaaaaaaggaaaacttcattgtttgatatatcctcattacgtaaccctaaagctattcacaattctcttctctctcaatttgctctctctagtcactacgatttgcgaagtcttcttcttctcctctgtttgaatctcttctcggtttcaaaacatgaattctcgtttcatgaatcatcaaacgaaactctctccatcacaagcaaacatcaacccaatcatcaaattatcccttgccaattggttttgagttgtaaacccatattttcatacaagttatattacctattaaatttgactttaaagatttgactatcattttttttttggagatagatgtaaagtaaacatacaaaaaatagtgacttaaaatatatttttaactacatctaagaaaaaaaaataaagactagtgagactgtagtaatgtattctttctaataaagtgaggcctataatcttccttactcatgccagtctttctgtaaattcttttttaagaaaattgcaatctcttccaaacagattcaaattcagaattacttggtaatgtattaccatatttatatatatttttttcttttgcggtagtcagcacaaatttagttaggagatcgtgataatgcctttagtgagctgtttcattgcgttattttacgaaaaaacaatactaataatgtatacgggaaactcgtgtttagtattttaagtgttgttggggaagataaagacaaaacaaaaccatgactgagatgtagtgatttgtttatgctaataaaagaacacattatttaccatgtaaaatatatagtatgattctgtgagagatgtggtggttaaatcttaaacgcttataaatttagagtagatggttttgttttcataacataaaacgggttgagagatcagaaagcatcgatggagcaaattaggggtttgtatcacttggtagtgacggtgacgtgcttggtgtgtttaggatttaatgttagcatg

SEQ ID NO: 6812 - DNA, 3000 bp, Unknown
  misc_feature (1)..( 3000): cDNA_ID_1815595_gDNA_ID_1621107_Annot_ID_171649 3000 nt of promoter + ATG
aaataagaaacttggaattttttttaataatggtacacacatatctttataaaaaaatttcatgttattcgatcgatgtggtagattgatgaatttggtaactaagcttgcacaatgacagtatggctggacatagctgcgttgcacaataatctgattagaaaaaacattgttattttggtatttcacgaataacattcgaggtcttaagtgttgaagtagtccgttcccactgaatatgatcaaagcttagctagcttcttcattgcgataatttatggtaacacccctgaccaaattaattaaatagctaatgtttacacaagtcttgtaaatatatctcttgtaatatatttcattttaaatatcttgaggttttttttttttttggcacttaagatttggaattttaagtcgcatgttttgaatagaaaaaaaaagttccctaaattttgaaaagatgataaatgatacgaaaatataacaaaaaatacaaaaaaaaagttgtatttggaaaactatccatcaaagtggacacatttaaaaagcacacgcacacataagagtcatagctccttgaaggctatataagaggtaacctctttccccatacccaaacagtcttcttcttcaactctataacataaaacacagagagagataccaaaaaacaaaaaccaaaattttctccaaatctatttctttcgaatcaaacccatttcttgaaactcgatttcaaacaaacccatctcattgttttcaccaaagactttttttttttttgtcggaatctgattaaaaccaagcatgaagagagtcagagggttcaaaattggacacagatttgtcaaaattttcaaatggataccaagaaacagatgcccgacccgaatcacaaacccggttaccggaatccggtcattagcacggtgtttaagccgtggagctaagagattgtgcggtggaagcaagaagaatccgggtcagaatcagatccggttgggtaaggatccgaaaaagtcgaaccgggttgttcctcgaggacatttggtggttcatgtcggcgaatcagacgatgacacgcggcgagttgtggtgccggtgatttactttaatcatccattgtttggagaattgttggagcaagcggagcgggttcatgggtttgatcaaccgggtcggatcactattccttgtcgggtttcggattttgaaaaagtccagttgaggatcgctgcatgggatcattgccgcaggaaaaattcttacaagattatataatttgaatttataaaatagtcaaaaatcaaaagaggattaaaaaaatttatatacacttatacagtacagagaaggatgatttcctttaatttgtgaatattagttttttttaccatctatgttatacgataaataccgattcataaatacaagataattatttgtatcagtttatttcatggatgatagaccacattgacatcctataatactatatggtttagatttatgtgtgtaattttataagttagaacaaaactgaaattatgttctaacttataaaattacacacataaaaactgaaattaaaaaaaaaaaacagaaaaaactgaaattgggctatcagtatttttgaatacttatatttcaatatatcaaatacagtgagtgatggtgtattgctgtatctgaaacctatcatccactataaaccccaattgaagtgaaacaatcaatatttagaatttccatataatgttaattatgaaattacttctatctaaatatatttcagaagaatttttgagataccacttttatgatttttatttttttttaataataccactgttttttttttttgttaattttcaatgtaacacaaaatgcaatcatagaatttgttttattaacttttatagagcatattataaaaacgtttataaagtttctataatgcataatatcaaacatttataagatttttcacaaaatttttaatgttttatagtgcttagaagatttttcttaagaaatgatatgaaactagaatttttgaacaacctttttctggtctttttgaaaaatggtatcataaaggtggtaattttcaaaatttcccaaatttgaatacaaattcaaatcatattgtaggaaagtgatcaaatatgttaaaatttagaagatgaggtgagaacaaatgtgcagaggagatgcacttgctaaatttgcatcttcatgtgatttgtattttgctttttagattgtagtttaccactttggttggttacaagtatttggagaaaccatgtactacttgttctttgagtattaatatatatgattatatgtggtatgtttagaaaaaaacaaaaaaaccaaatatcaaacctaaacttattaaaagtaaagacacatttgattaaaacctaaaccaaaaacgtacaaaactattcgcttatgatgatattatttatcataaccaaaactttaatcaccatacatacctccgatttggttttctctcccaaactggtcgtcttctcacctctggtttactactacttcggattgaagaattttgatcgtctcgttgctaactccacgatgtctttctgacgcttaatcttctgacagaagacaaagacatagcataaaaaagtaagcacagaacataaacggatgtttattcttttctagacggtatatttacataaataacgaatcacttatcaaaaagctggagtagctcagttggttagagcgtgtggctgttaaccacaaggtcagaggttcgacccctttctctagcgtttcttttccttttgtatttttaagatttaaaaacatttttccacggctacaaaagaacattctcgacatacacaaaaaaattcgaaatttcgagaactctcttgtgccttcttcttcatcttcctctgtttttaaaaatgcaatcaagcagattctcacgatacctaaaccaaatccaattcaatg

SEQ ID NO: 6813 - DNA, 3000 bp, Unknown
  misc_feature (1)..( 3000): cDNA_ID_1815618_gDNA_ID_1621107_Annot_ID_171638 3000 nt of promoter + ATG
ggacccgttttcaaactatggctcggcgcaaaactaaccatcgtgataacctcttccgaagcaacgcgggatattctaagaactaatgacgtcatctttgcgaacgacgacgttcccgtcgcaggctcactcagcacgtatggtggcgtagacattgtctggtcaccgtacggaccagaatggccaatgctaagaaaaatctgcattaacaaaatgttaagcaacgccacgttggattcaaattcttttagtgcacttcgccgccaggagaccaggcgaacagtccggtatttggcagaccgggctcgggccgggttggcggttaacgttggagaacaaatatttgtcacgatattaaatgtggtgactcagatgttgtggggagaaactgttgcggacgacgaggagagagagaaagttggagctgaatttttggaattgattacggaaataattgatgttgtgggaaagccaaatgtctctgattttttcccggttttgagccggtttgaccttcagggtttggctaagcgtgtgcgtagatcggctcagaggatggaccggatgttcgaccggattataagtcaacggatgggaatggataagggaagtaaagggaacggtggagattttttgatggttttgttgaatgctaaggatgaagatgaaaacatgtccatgaaccatgtcaaggccttgctaatggtaattgagcttcttattattttactaatattgctacatgatattattggactttccgagctcattccaactccctttcgtattatattgtctactttgaattaagtccgcatgattttgttattggggtgcttctcaaaagacttatactaaatagaattggatttggtttatatattataaattttttttctaattttttgatgtgggacctttggtttgtacccaacataatcattgcttatttaaattttgcataggaaatacaaaacatttatcattgcgtaacaaattattttgtgtaacatatgactcttgatcattaggatatggtgcttggtggtacagacacatctttgaacacaatagagttcgcaatggcagagcttataaacaaactggagatcatgaagagagctcaacaagagcttgacaaggttgtggggaaaaacaacatcgtcgaagaaaaacatatcactaaacttccatacattctctccattatgaaagaaaccctaaggcttcacccagctcttcctcttctaatacctcgctgcccatctgaaaccacggttataggtggctacacaattcctaatgattctaaggttttcatcaatgtgtgggcgattcatagaaatccgaacgtatgggagaatccgttggagtttaatcctgataggtttcttgataaaggttacgactttagtggtaatgactatagttatttcccgtttggatctggccggagaatttgtgcgggaatggccatggccgagaaagttgttctttacaatcttgcaacgcttttgcattcttttgattggagaattggggaaggagagaaagtggagctcgaggagaagtttgggattttattgaagttgaagaatccacttgttgcaacacccgtgctaagattgtcggatccaaacctttttctttaacagtttaagtgaaaggagaaaagtaattgctctttttgtttatgtgaacttatataatgttcaatgtgacggtgtcttatctaatgccgtattatgtattgttacatatatgatgattccacctatattttagtactatgcatgatgtaatatgtgttttagacatggtcgcatggactatatatgtccacatatccaaatccaagtgatttcatgaaaaaatcttcaatgttatatgctcttttgttgaaaactacactgattcttattttacggctaaacaagtcatacaaactttcaaatgcatatataaaggagtttgactaatttccctccacagcagcaaaccaacgtataaaggtgtggggtctgctgccaccgtccaaaccagtaaataatataatttatactattttattgtttgaggtttttatcaaatgtaattaatatctttgaagcaaaaataaagaattagaatgtatggtaaatgatttaccatagaatagttgtttttatcatttttatgtaatatcaaagtttgatatatagcatgccttcaaacaaaatttgttttagattcgaaattgtgccctcatgtatatatactacaatttaagctattgtattctactatgtacacaaaaataagttatgatgattgttttttagttccttaagctattgtattttacgatgtacacaaaaataaattacgatatttatagtccatgaatcatcttactacacaaactctcttttcttgaggtccaaaaagatttttatttttatttttttttcctttttcctgatggcttcaaaatttgcgtccacatgcagagagatattatcaatttatcattattgatgactaaaccctatttaaaagtaacatttcgataaaagaaaaaacaattaaaaagtataccatccactcaaatattatcatcttattatcttaagacccttgagtggttttccctattaatgtattactatatgtaatgggtgtacgttgtacgttgagtggatggtatactactaaatgatggtgtacgttgtaaccttaaaaattactattatagggacaacaacttcaatctcataacttctacaaaacagctgtgaataatgtctcccatatcaaatctcttcgctggcaacacaatcaatctcactccttacgcaattctcattctcattgctatcttctcgatactatggtacctcttcaaacgctcgccgcaaccgcatctaccccctggaccgcgagggctacctattgtcggaaaccttccctttcttgacccggaccttcacacctacttcacaaaacttgctgaaagttatg

SEQ ID NO: 6814 - DNA, 3000 bp, Unknown
  misc_feature (1)..( 3000): cDNA_ID_1815622_gDNA_ID_1621107_Annot_ID_171637 3000 nt of promoter + ATG
tttgcaatggccgaactaataagaaagccggagttgatgaagagagcacaacaagagctagacgaagttgtaggcaaagataacattattgaagaatcacacatcactagattgcctttcatatcagccataatgaaagaaacacttagactttatccaaccattcccctgctagtccctcaccgtccgtctgaaaccgcgctggtcggcggctacaccatcccaaaaaacactaagatcttcatcaatgtttggtctatccagagagacccaaatgtgtgggagtatccgactgagtttcgtcccgagaggtttcttgataagaagtcttgtgatttcactggaactgattatagctatcttccgtttggatctggcaggagaatttgcgcaggtatagcactcgccgagaggatgattttgtacactctcgcgacgctattgcattcgtttgattggaagataccggaaggccacattttggatttgaaagagaagtttgggattgtcttgaagctcaagtcccctcttgttgccttgcccgttccgaggttgtccaattcgaatctttatttataaacgctatactcgttacttttccttaaaaaaaggaaaaagatttttatattgaacatttttatgatagacaaaaataacgcctggttttatttagttttttcttttctgaagtttttaatcatcatataagttagtaatgagaatcatacatcggtttctataaacagcaaaattatcagttttatcgtatttcagttttgttctatctagataactcacaggaagcgtggaccgtgtcataatggaagatttcttattttttttttaattattaatattataatggataatgaataagatatggcatgtggcatatgtggtagacgtgcaagaatcttagattaatttcttctagttattttgtactatcaacaaaatatagtataagaaaattatatctttgtaaaacgtagatctgattagtaatataaagctttatgcaaatttgtaaaaaggagttatatgaaaaagctctataataaagctgaaaataaaaaaaaattataacgtttttgataaagtttttgtaaatgataattgtcaaaattgtataaattataccgctttgataatgagttatcattaaaaccgtagtttaattaccaaactcaaatttccttgcaaagctgttatgaaatatatttttcccaaatccaacagaaatctacgatggaggaagtgcaggaaaagcttatagaagtttgtgatataaacagtttttttatagcagatacctcacctttctaaacggttttcagggctaagaccaggaaccatacaatattttcttagaatctgaagtatttcttgtccaaggaattgatgatattttttacttgttggcatggttagagatttgctacacgttcactacatatatgacaagcatgggggtgaccaaaagttttgacagttgtaaatttattcctaaaaaaacggatgttcatttggagatatattaggaggatacccgtttatagctatttgttattaaaccttaatctattggggattcattgagcccaatgcccatacatgaagaagaatcccaaatataatataagtttaacgagcacattattaggagtttcatcatagagattcacgtaaagttttattgtaaaaaaaaagagattcacgtaaaatagtggaagacataaaagtcattagttatgttctatccttttgaccaaaaaaaaaaaagaaaaatgttctatccatttgaaatcttgtgtttaattattatgttttaaaaatgggtgaattaaatttatatactcagaagaagtggaaattaaaaaagtaggagagataatttaaaaattaggtaagtatgaaagagaaagaaaatataaaccaaaaatatccttcatatttggattaattacaaaattgacatagctataatatgattattatacggatatataggcgaagacgataacattattattaaaaggtaacaaaagttgacttgcgattcaataatcatgtaaaaaaatacatgcatcagaatagttagcagataacgtattatcaggataacatgataacaaatatctcggtaatactttttaggttaacatgataacaaaatatttatatcaataagtttataattatatcatgcaaagttattttgtaccgcaataagttataatttatgtgatatatttatagttaccgtcttaactcatttattatatcatataaacaaaattaacgagttactataacgtgcaaaatctgaatttcatccaataagattaatattatcactacctctagataaagttttatttaaatcggtaatttgattgttaaccaattttgagatgaaagataaaaatataaaaagacataaggataatgatgtaattttctttgctaatgtactgtgtaaatagtgacacattagttaattttctgttcttctatgtatacttcttataaataccctttaaaaattgtgaaaatttagggtttttggagtactctcaaaatctcagcaaaatggccccataataaaattagccagcgaaaatagtcttttgaaatatgtccctaatttaacgggtaaaagagtaaatgaaacttatatccaccaaaatgtggcaccgtacatttttcatttcctcttttaactgttaaattagattcacgaagtaataatatttccctatttttaagcactatccaccaaatgttcgaattatatccaatcatatttaaaaagtattttcaaaattgggaagaatcacatccgctcaaaacttatcagcttgagaccgtctcattattgaatttcacattattaatctattaatactataaatgaaagatgaaatatcaaataactaacactaaagtacactttccttttttggttctcatagttcctttccacaattggcaaaaatg

SEQ ID NO: 6815 - DNA, 3000 bp, Unknown
  misc_feature (1)..( 3000): cDNA_ID_1815626_gDNA_ID_1621107_Annot_ID_171636 3000 nt of promoter + ATG
gaagaatcacatccgctcaaaacttatcagcttgagaccgtctcattattgaatttcacattattaatctattaatactataaatgaaagatgaaatatcaaataactaacactaaagtacactttccttttttggttctcatagttcctttccacaattggcaaaaatgtctatgctttcaaatctcttccccgacaacgcaatcagtctcactccttacgcttacgcagtactcattctcacagctaccttctcgattctatggtacatcttcaaacgctcgccgcaaccgcctctaccacctggaccgcgagggctacctatagtcggaaaccttcccttccttgacccggatcttcacacctacttcacaaaactcgctcaaagtcatggtccaatcttcaaactcaatcttggctcaaaactaactgtcgtggtaaactctccatcgctggctagcgagatccttaaagatcaagatatcaatttctcaaaccatgacgtccctctcacggcccgagccgttacttatggtggtctggaccttgtatggttaccatacggtgccgaatggagaatgcttagaaaagtttgtgctgccaaactttttagccgcaaaactttggattccttttatgagcttcgacgcaaagaaatccgagaaagaacgagatgtttgtaccagaaaggtctagaaaaatcaccggtgaatgttggagagcagttgtttttgacgatgatgaatctaatgatgaatatgttatggggagggtcagtgaaagcagaggatatggagagtgttggaacagagtttaaaggagtgatttctgagataactaggcttttgggtgtgcctaatgtttctgattttttcccgatgctagctagattcgatcttcaagggcttgttaagaagatgcatttgtatgctcgagatctcgatgcgatactcgatcgagccatcgagcagatgcaacggctaagaagtagggatggtgatgatggtgaatgtaaagattttttacaacacttgatgaagttaagggaccaagaagctgactcggacgtccctattacaatgaaccatgtcaaagccgtactcatggtaatgaaattaaatggtttcaatttttatacttaagaatataattatcggagaatagcatatctgttgaaattgacaaaaagtatatatcggaaatgaaaagtttgaaatactaatagacaaacacttaaattatatgaaaagtcggaatgataatttcacaattatatttttcattagtattgcagaataatatttgaaattcatgataaggcattagtttttcgattggtaaaatcatgcaaaaataagtttttagtcatttcgccattatgtagattaccaatcagcattagtcgctttagcatttagatgttatttgtaagatgtttatttgctcatgacttaatcaatgtgtgaaggatatggtagttggtggtacagagtcatcaaccaacacgatagagtttgtgatggctgaactaataagtaacccagagttgatgagaagagcgcaacaagagctagatgaagttgtgggcaaagacaacattgttgaagaatcacatatcactagccttccttacatattagccgttttgaaagaaacacttagactttatccaaccattcctttgctagtccctcaccgtccgtctgaaaccgcgctggtcggcggctacaccatcccaaaaaacactaagatcttcatcaatgtttggtctatccagagagacccaaatgtgtgggagtatccgactgagtttcgtcccgagaggtttcttgataagaagtcttgtgatttcactggaactgattatagctatcttccgtttggatctggcaggagaatttgcgcaggtatagcactcgccgagaggatgattttgtacactctcgcgactctattgcattcattcgattggacgattccggatggacacgtgttggatttggaagagaagtttgggattgtcttgaagctcaagacccctcttgttgccttgcccattccaaggttgtccaattccaatttttatttctaatgctaaaatctttatagttttcttaaaaagcaaaaagattgttatgtttgcgatttttattatatacgtttttaactgtcatataagttttgtaatgaaatccaaacatcggtttccataaacagcaacattattgaactaggaccacttataaattttacttaattgttgttagatatcaattttgtttttcgttccagttttgtttgatgtgagatatcatttttttttattttctattttgaacaaaaccaaacaggattatagaaacttgaaaattagcaagtacttactttgtgtcgagtcctagtttgactcttttttggtgtattttttggttagaatattagagaattcaatgaggtcataaatctttttgaaaacaatatcagcttaacgagcattttttttttggagtctcattgaaattcagataaaacattggaagacacaaaaaatcatcaattatgttctatccatctggaattttgtgtttatttatgaatattaaacttgagaaaatttagattttttggaatattgctctcaaaaagtctttgcaaaatggtcccatgcattgattcatacctctgcatagtgaagtttagccatcgaaatgaattttggtcctactctttggaaaggtggcagcttactttcccctcttactcttttaccattaaaacattagctttatttatctaaatatagctaaatatgattgattgtaaaaagtatttttaaaacattgggaagtatcacagccgctcagaattcatcaacatgactacatgagaccgtcctgacccaaaaaaaaaaaaaatgaaaagataatatactatcataaaactttcctcttatcgatctcataatttcttcttccaaagtcaaaacatttatcaaaaatg

SEQ ID NO: 6816 - DNA, 3000 bp, Unknown
  misc_feature (1)..( 3000): cDNA_ID_1815630_gDNA_ID_1621107_Annot_ID_171635 3000 nt of promoter + ATG
tggttccctacaagccataaaaaaactcgtaccctttccggagccaatactctccatatcctggaaaagaaacgctccatgtcctgagtctgcgatccctcctccatgagtagagaataagccgaccccactgtaaactctccattctccgtaccagaccatgacagagtatccgctactccgggaccgcctcccaacacgaccgcagtcaatcgtaacagcagcttctccggtaagaaacacgaaattctgcccatgtcccaaccaacacgaaattcttaattagttatttataagattgagatttcaccggggcagaaaaatgattaattgtcatgatttatgaataaaagaaaaaagaaatctacttacacttaaaatggaaacagtttatactgtgagataaagagattgattaattacgatttaagtaaaagaaagaaaaataactttgaattgtgaattgaatacaacaaaaacaatatgcacgcattacaaatatttagtcttgttttttattagccgttaagggaagtgagaccaaaggtgacacttgtggtacgaatggtagcttcagtgggtaactacgattacatcattgattatgagttccaaactgatggggttatgagagcaaaggtactttcaatatttgacttttatctcattttgacaaaaacaaatcataaaaggttccgtattgaaaatattttacttttggtaatatcaacgacaggttgggcttagtggaatgttgatggtgaaagggacaacgtacgagaacaagaaccaagtgaagaaagacaaagaaggtaatgaagaagagctttatggcacgattctgtccgaaaatgtaattggagttattcacgaccactacgtcactttttaccttgacctcgatgtcgatggcccggacaattcctttgttaaagtgaacctcaagaggcaagagacggcgccaggtgagtcacctaggaaaagttacatgaaagcagttaggaacattgtgaaaaccgaaaaagacggtcagatcaagcttagcttgtacgatccatcagaataccacgtcattaatcctggtaaaacaactcgagttggtaacccgacgggttacaaggttgtccctagagccacagcagctagtctacttgaccatgatgatccaccgcagaagagaggagcttttactaataaccaaatttgggttactccctacaataagtccgagcaatgggctagtggtttattcacttaccaaagccatggtgatgatactcttgcggtttggtccgacaggtgattagttgcaaagaattaccctttttattagttatattatagttaatattgttacgattgatttagtgtctttatttggtgtgatgcagagatagagatatagagaataaggacattgtggtgtggtacacgcttgggttccatcacattccatgtcaagaagattttccgataatgcccactgtttcttcaagtttcgatttgaagcccgtaaattttttcgagcgcaatccaatccttaaggccgctccaaactttgaatatgaccttccggtttgcggagccaaatctgattctgcttgagaagaataaagaaccaacaaaagaaattatccaactttttggatcttattggcaaaactacaaatcaagttacatgatattcactttcctatgtgttattggcgaaatcccaactcctacaaaacttataagcgcaaaaatagtatataacatgtccaattcacaccggaatgttaatctcaaggaattgtattttctcctagaatcactacttttgtgatagaagactttttttttgtcaaccttgatagaagatcttgataagattttttgtttttgtttttggcattgataacacattattctttcctaaaagaaattagtactcccctatatctcagtcaatttactaatgtttgatcttatgtttgtatatcttctcaaagcttgatcgtatctttctcttaatttgtatctcagtgtcattttatcaattaatgcttgattgtatacggagtattggtatttaacataattttaatgttcactgtgtgaatctaagtaaatcaacagtccagagactcagattgataatgctactacctaattccttgacgtaacaaatgcttatatctcatctaagaaatattcagtcgaaaataaagcatttccatcactctctgctcataaaactatcacaatagatattgacaaaaaaaatgggcttctgccttctgttagatttatctatcaaaccaactctccgaagtgggcttctaacagagaaacaagacatgggccacaaaacaattaagcccactcagaagcccaagacgaaaactgtgcaacggtcgtcttcaatgtttcagcataaagacaaagggaacaaaactgcagagatgacgaaagcttgtacggaggagatagcactctccaatcaattctcagcccttgatggcttagagacatcaagatgaagacatgtgtaagggtttatctagggttttagttcacatatgtccttgtataaaaacccaaacaatagccgcttgtaatctctaagaagcagaatgaatgaaaaccaaaacttttcataaagatttataaacttcttcattatcgacatcatgagcctcttgggccttcatcattcttcaaaatcataccatagtttatagtttttactgcgtaccacaaatatggcaccgtacatatatcattataggtttctaggagttgacaaatgtttagtcctccatttttcaatcgtcaaagataagattccttataattcgtgtacataattgttttttaatatataccatagcatgtggtagatattttattttcgggattgatatttggatatctctttatactgtaagtgtaaggtgacggtacttagttaaggctcactagtttctttaaattctatataatacgataccaattcct

SEQ ID NO: 6817 - DNA, 3000 bp, Unknown
  misc_feature (1)..( 3000): cDNA_ID_1815638_gDNA_ID_1621107_Annot_ID_171631 3000 nt of promoter + ATG
catcagatgtgggtttgagtaatatgataacgttttcaaaagagatagtagaaaccaaaatgttacctttactgcctaagaatcgtttcataggttatttggactttttttattttgaaactaaaattgtaacaactcttactgtacaagaagatgcaaatggagattttcaatttcatggatggagtatgattctccaacgaaacaattacaagacagacgatattataggattttggtgggatgccaataactctagatttaatttttcaggtactcatgatcgcttagttgatggagtggatctttgcaacttcgtttctcaaatatgttaggttccttattttatttatttaattttgcaaatttgtcttctcgatattggttcataagttatttttagttctatcttaattatgttttttaggatcatcttttctttttcaattataaatggatatatttggtgttaagacagtttggagttgcttattctccagatttacctatctatgattttcgttttaacgagtataaatacttttgctatagtaaggttgttgatttgattattaaaattaacgagtttttgataatcattgagaagaatattctcaaacgaagtttttgttgaacgtgaatccattgatctccgataacaatagaactctaagatatgattctcttacttgagatctattgatattcaagattactatcgtaatttattctggtacactaactatttacaccatttttaataaattagataaaatcacacaaacatgtttatatttggaccttcactatgaataaacttggtttatttgactaatatttcaccatataattttcaaaaattcgatttcaaaaaactattagttcaaaccaaacttggttgtaggatctgaagacttgtagttaggttgtttggtttgaactattattttccaagataaaagtagatctcttttgatttgaatatgtggtttgattaaaatattatcaaaatcaaaattgactttgtccttctcacgatcattaattaatcttactagaaccgttagagcaaaactggctgggtcaaggaaacttgcttttattgcacaaaattctaaatttacttcgaagacgtgttgcttgacgcttgtcgttacttctgataaatgattttgagtaaaattcaactaacattaaggttgtgatgcttcctatataacaaaggaagtctataataaaatccaaacgaaaagccataaaattgactaatctaattcccaaaagttttatatttgactgcatattgttttggaattttatagttttttttttttttttctccttgctagttgctaccatcgaattcgaaaaaaaaaaaaaaacgaaaaaaaatactaaagtatcttatttttaaaaatatgttctcttgttgaaataaataggggaaatagcctcgccacgtttttacgcaacctttgctttgactttaaatttcatatcacaccatactcttatttctcttatggactgcaatattttagtttaaaatttaagtaaatgtataaatgagtgatggttaaagaaaataacagataaaggaacatgacttgttttttaatccaagttaaagagtatatatatatatattatttctctaacaaagttaaaagtggttaaaactcacatgaaacctaaaaagaatctaccaactcaaccatattgtcttatgattcaatccctaagattcatttccaagcaatatattagatatctcatatgtaagtgtatataatatataatatatatagatgatcaaaatcaaaatttaggcattgaagagattgtgtatcagttcatgaataaattggaacctaccattgtctctttcgccaactctaatgccaattttttttggtttgattctctggtgaacaatgcagcatatctataagtacctttataaatcatccttccagtttttatactaaaatgattacttatgtctctcctcttttgtgccttctcatcgactacctttcattatgtaaacacttaaaagctaagcctgaattttatttaaggcaggtaagttagtattgggctttaaatataattaagtgggccttggaccgtatatcgacaaatcaagtgatgtcgtgtgcttcgtaaaattcccacatcgcttgtctagaaacgtaacttaatgtatatatttagacaaatcattacggtcacagttatgtttacgtacttgtcacttgttctcatactatgatgtagttgtctagttgatctcagttatgtttcatgaattgatacgtttttaatcaaggtgacaagattaatagagattaactacctctacacaactggacattggacaattcagattcaaggttgatatccttaaaaacaccaatacactcctctataaatatttacgtacttgtcacttgttctctttttattggttataaaattttaaaaatttttaaaaaataaataaactaaagggctctctaaagtctaaactacattacaaataatatattattgtattttaagagacactctccatccattgatggagatgatgttatggtttgatcaagaagatatcaactacaagacattacgcttctagttaaaaatagttggtcaacttaaaatcacgttgcatgtcttaatcacgttggtcatatattcccaattgccctcaaacgtcaaacattgaacatcatgtccgtgattctaaaatcttgtaatgttattttggcaaatttccttcttaaaacatgaataaaaaaatcaagaaaatttacatatctcagacggttcttctcgtgtgttttagtcttctaagcaccaatgccaatcttagtggatctggatctatccaagtagatatgaataaacaatacaagtctaccacacacacaatcacacattactcagctaaaccaactgagatctagagagagtaagagtgtgagaactttc

SEQ ID NO: 6818 - DNA, 3000 bp, Unknown
  misc_feature (1)..( 3000): cDNA_ID_2173637_gDNA_ID_1621107_Annot_ID_171621 3000 nt of promoter + ATG
gatggtataaacggcagcttgaaagacatagcgagctatgaagcccgttgttcgatcatcctgccaatgtcctgaggttgctgcgatcaagtcattccagtgtgtagtatactttgctccatagatgttccaagctagagcctgccaaatttctgaggcgtaaacacaagagaaaaaaaggtgattacgggttccagcatgtggttacaaagagcgcagcctgtggagagacccctgttccagctgagcatccgatctccagttgataaacgattgtgagccgccatccaaacgcagaaggagaatttgggagtccctcctgcaaaccagacactcttatgccatgtgacctctgtcgaaatagaacgtgtgtggctccaagtatcacgtgctgaaaactgtggccggaaagtatcgtttttccccttccaaagaaagacgtcctctactgccactctgttttgctttgccaaaaggagttcttgttcaatggtattaagcgtttctgctcggtgataacgtgatctcctgcgatcccatgcctctgcaagtgtcttaaacttgcttatccccatgtcgaattgaccgcgttctcccagcacgtcaatcagccggcccttggatgaccaatcatcataccaaaaagacgcagtttcaccatttctaatgtcgaccttagaaaaggcttttgcagtgtcccgatattttaacagctttttccacatccatgagccctgagatgctgaccgaaaagaccaaaaagtgttgcgcttgagaagataagtcctaatccactgcacccatagcgagtcaccttgcgagacgattcgccaaatcagtttcagacaacaaacgtcattagcctctttgattgactgcagacccaatccgccctctcgttttggcctgcaaactgtctcccatgcgatcttagccttattagtactcagttctggtcctgaccagaggaaggcggaacatagcttatcgatttccctaacacattcacggggaagcctaaaagcagagagccaaaaattgcaaatactccataggaccgaactgaccaaatttagacgacccgcgtaagacaagaaacgggctgtccaagttcctattcgtcgctttatttgctcgagtagcgggctgtagtcctgtgaagtgaatcgcttggtgacgagaggtaaacagagataccgcaccgggagacgtcctactgcaaaatggaattggtcttcaaattctttgcatacagatttcgagatacctgcaaagtaaattgtagttttcgccatgctgatcttaagacccgattgctttgcgaaactatcaaaaacctccacaataccctcaagggaacgaagcttcccgtcggtgagcaccataatgtcatcagcaaaagaaagatgtgttagaccaagatttttacattttggatgataaccgaatttcctcaaacctgctgctctgtcaagcttcttggatagaacatccattacaatgacaaagagataaggagttaaagagcatccctgacgcagcccccgcaaactattaaaatatccagctagttcccgattaacctgaaccgagaaagatgctgtggtaacgcaaagcatgatccagtgaacaaattcttgaggaaagtctagagttaaaaggacattcctgaggaaggaccattgaacagaatcaaaagccttggagatgtcgatttttatagcacaacgttctgaaactgaatctttgtgatagtccttgactaactccgttgcaagcagcagattttcaatcaaaagtcgatccttgatgaaagcggactgattccccgctatgaactgtggcaacacccgttttaacctgtttgcaataatttttgaaatgactttatagaggacattgcaacaggagattggtctgtaatctttaatctccttggcttccattttctttgggattagagctagaattgttgaatttactccattgtatatggagactttgagggcgttacaaggaaacaaacggaaacggaaacaatgaacttcaatgagcttcattgtcaaacaatgacaaagaaaaaaaaggaaaacttcattgtttgatatatcctcattacgtaaccctaaagctattcacaattctcttctctctcaatttgctctctctagtcactacgatttgcgaagtcttcttcttctcctctgtttgaatctcttctcggtttcaaaacatgaattctcgtttcatgaatcatcaaacgaaactctctccatcacaagcaaacatcaacccaatcatcaaattatcccttgccaattggttttgagttgtaaacccatattttcatacaagttatattacctattaaatttgactttaaagatttgactatcattttttttttggagatagatgtaaagtaaacatacaaaaaatagtgacttaaaatatatttttaactacatctaagaaaaaaaaataaagactagtgagactgtagtaatgtattctttctaataaagtgaggcctataatcttccttactcatgccagtctttctgtaaattcttttttaagaaaattgcaatctcttccaaacagattcaaattcagaattacttggtaatgtattaccatatttatatatatttttttcttttgcggtagtcagcacaaatttagttaggagatcgtgataatgcctttagtgagctgtttcattgcgttattttacgaaaaaacaatactaataatgtatacgggaaactcgtgtttagtattttaagtgttgttggggaagataaagacaaaacaaaaccatgactgagatgtagtgatttgtttatgctaataaaagaacacattatttaccatgtaaaatatatagtatgattctgtgagagatgtggtggttaaatcttaaacgcttataaatttagagtagatggttttgttttcataacataaaacgggttgagagatcagaaagcatcgatg

SEQ ID NO: 6819 - DNA, 3000 bp, Unknown
  misc_feature (1)..( 3000): cDNA_ID_1815658_gDNA_ID_1621107_Annot_ID_55988 3000 nt of promoter + ATG
tgtctggtcattgatggtgtagtggattatggtgattaattaatctactgaggtgtgtgcttctgtgtaagttctacattatgcaggtgtataaaagatcaaaacttcaagtctagatccggatgtcaaaggttctacgaggcaagtcagtagaagatttcaagcttggctcaaggtggatattgtaagaatatgatccaacttgaagaagcgtcaagaggaaaaagcaatagggaagaataacaaaaagaggagaagtgttttatgctcaactgtatcaaatacactaaaaaagagccagagggttaattccttaaggaatgaagtggaagatgctgaaggagatagagtctctcaagatgtatcctaattggccacacgctcgttgacacgtgtgaagtcgttagggttttgggtaatcacgtaggttacgtactatgttttactataaaaaagaggctccgcttcttagttgaacgaagccgttttcgagcgcttcgattgttggtagagcgagagattgctatagagagataggctgttttatctttttacctttttccttttgaataaaatgtaaaatttattcgaaacaactgtttacatccagtgcagtgttttgcactgaaatggttgtaatacgatgcttatgaaaacaaaaaccaaagagccgagctcgttcttattgtgatgcaaaccaaatcgccatgcacccgtcatatctttgattgggttttaaatattaacaaaacataattgaaaaaacatcatgtatatattattgtcacaaaccccaaaacttgtagatgtttttacataaaaatagaaatttagaaagatttaaatctttgtatgagatatgaatagaatataaatagaaaccccataactattttctatttttattattttatacaaaaggtatgaaatataaatatttttgtttctcaagatgtataagaatgaaaaaaaaattaatatgtaagaaagataaaaatatgtattaaaacttaaaaacactaaagagacacaaataagaacagttaattgaagagaaattgcaagaaaaatatatatatcttttatattttataatcatcagcaagaaatatttcattaaccaattagccaaacaagtcttacattataccataccaagtcttattcataattgaaagagacaaatgacgacgctgtagtagcaaacgtttgacaaaggaaacagcaaacataaataatcggacgagccaaggaaaatcacaggtacttattggcgagctgacctaacatctgtgggtaatatccgaggactctttccttttcttctccgcctttaaagacaatagtgatcggatgatattctatgcggtaatcctttgctagctccaactcctcgtcagtgtcgactgtgtagaattttaacatatattcgtattctgagtctaggaattcgagctcgggcatcaaactaccacattcggcacagtccttggctatgaatacaactattaccgggactttagattggatcacaagtgaattccattccgatgcagatagactttgtactacatacatcaattgaatatagagatttaaaacgttatatagaaatattactcaagcgaaatacagataaatttattacaacatgtgtttttttggtaaagatgttgtgggaatagtaacaattttctacatagaaaatgaaaaattatgtcgctattcctgtgaacaaaagtcaaaaactgtaagataacctaaaaatctaagtgaaaattatcttcattacaatatttcgaaagtatagatatgatattaaaacaattcatgttttcaaaataccttctacacaaattggagtttttttaactttttataattaactttaaaacaaatctagttaagttacccaagccatcgtgagacggtagtgatgaagacacgtaagccttgatgaagggatccgaatccgatcctgaacacatgctaacattaaatcctaaacacaccaagcacgtcaccgtcactaccaagtgatacaaacccctaatttgctccatcgatgctttctgatctctcaacccgttttatgttatgaaaacaaaaccatctactctaaatttataagcgtttaagatttaaccaccacatctctcacagaatcatactatatattttacatggtaaataatgtgttcttttattagcataaacaaatcactacatctcagtcatggttttgttttgtctttatcttccccaacaacacttaaaatactaaacacgagtttcccgtatacattattagtattgttttttcgtaaaataacgcaatgaaacagctcactaaaggcattatcacgatctcctaactaaatttgtgctgactaccgcaaaagaaaaaaatatatataaatatggtaatacattaccaagtaattctgaatttgaatctgtttggaagagattgcaattttcttaaaaaagaatttacagaaagactggcatgagtaaggaagattataggcctcactttattagaaagaatacattactacagtctcactagtctttatttttttttcttagatgtagttaaaaatatattttaagtcactattttttgtatgtttactttacatctatctccaaaaaaaaaatgatagtcaaatctttaaagtcaaatttaataggtaatataacttgtatgaaaatatgggtttacaactcaaaaccaattggcaagggataatttgatgattgggttgatgtttgcttgtgatggagagagtttcgtttgatgattcatgaaacgagaattcatgttttgaaaccgagaagagattcaaacagaggagaagaagaagacttcgcaaatcgtagtgactagagagagcaaattgagagagaagagaattgtgaatagctttagggttacgtaatgaggatatatcaaacaatgaagttttccttttttttctttgtcattgtttgaca

SEQ ID NO: 6820 - DNA, 3000 bp, Unknown; identical to SEQ ID NO: 6817
  misc_feature (1)..( 3000): cDNA_ID_1815638_gDNA_ID_1621107_Annot_ID_55997 3000 nt of promoter + ATG

SEQ ID NO: 6821 - DNA, 3000 bp, Unknown; identical to SEQ ID NO: 6816
  misc_feature (1)..( 3000): cDNA_ID_1815630_gDNA_ID_1621107_Annot_ID_55999 3000 nt of promoter + ATG

SEQ ID NO: 6822 - DNA, 3000 bp, Unknown; identical to SEQ ID NO: 6815
  misc_feature (1)..( 3000): cDNA_ID_1815626_gDNA_ID_1621107_Annot_ID_56000 3000 nt of promoter + ATG

SEQ ID NO: 6823 - DNA, 3000 bp, Unknown; identical to SEQ ID NO: 6814
  misc_feature (1)..( 3000): cDNA_ID_1815622_gDNA_ID_1621107_Annot_ID_56001 3000 nt of promoter + ATG

SEQ ID NO: 6824 - DNA, 3000 bp, Unknown; identical to SEQ ID NO: 6813
  misc_feature (1)..( 3000): cDNA_ID_1815618_gDNA_ID_1621107_Annot_ID_56002 3000 nt of promoter + ATG

SEQ ID NO: 6825 - DNA, 3000 bp, Unknown; identical to SEQ ID NO: 6812
  misc_feature (1)..( 3000): cDNA_ID_1815595_gDNA_ID_1621107_Annot_ID_56010 3000 nt of promoter + ATG

SEQ ID NO: 6826 - DNA, 90 bp, Unknown
  misc_feature (1)..( 90): cDNA_ID_2993351_gDNA_ID_1621108_Annot_ID_56012 3000 nt of promoter + ATG
tctagtgaaaataaagacgcctctcagtcaactgtctcccagtcagctgcagatgcttctcagccagaagcatcaagagatgtggaaatg

SEQ ID NO: 6827 - DNA, 3000 bp, Unknown
  misc_feature (1)..( 3000): cDNA_ID_1815722_gDNA_ID_1621108_Annot_ID_56014 3000 nt of promoter + ATG
caagattgtttattattggtcttatataattatgagattctaaaagtgtgatacggttagggttaggcgtatccttttgttaccgttgtgataaaatttcctttttgtttctgctactcaaataagaaaaggaaacaatcaaaatttccttttttcattgaacaaacgtgtacttataaatacaccccttctctcttcttccttgagaaaagtctccattctctcttcttcttcctggaaacctaaaccacgtaaggatttgctctgaatctaaatattgacgtggagaagacgcgatcttactaattctccattctctgcttcaacttcaccgtaagattgaacaaacctttacttatatatacctcttctttcttgagaaatccaaattctccattctctcttcttcttccaaaccaaaacctaattctccattctctgcttcaacttcaccgtaagattgatcggttgataaagcggctctttttggtgattgatctctgttgtgactacatcttaggtcaattcagattgctttcatatcaagtctctcctaatttcacaagatcaaagatcccggccatggattcagttgtcgacggcgaaggagaacacaaacgacgactaaggatgcgaaagtgggaaagagggatataacgaagacatggacaatgaaagcaacgagcagtatagaaccaaatcaatggatcatgatctgtgtttggtactaggtgtttccttggcgtcgacgagatcttttgaaaatcttgtgtttcgtcgatatcacaagcaaaggtattttcttttttccttttctatttttaatgattcattttttactaaataaaaatttatttttagatttttttattaagtgttaaaattttcaattttgtgtaaattaatttaaatttttaacacttgtttttgtttttattaaaaactgtttttaaacctatatttttatactactattaaagttttaaggtttttcttattaaatattaaatttttaaattttgtgtaaactaattggatacatcatccaatcccctaagaggtgttctaggttcaatagatggtttacacatcatttaaatttttaacacttgttttttatatttattaaataaatgtttttaaacctaaatttttatactactattaaaatttgaagtttttttttattaagtgttgaatttttaaattttgtgtaaactaattggatacatcatccaaacccctaagaggtgttctaggttcaatatggtttacacattatttaaatttttaacacttgtttttcttatatcaaaaatatgttttaaacctttatttttatactactattaaagttttaagtttttttattaagtgttaaatatttaaatttgtgtaagctaattggatacatcatccaaacccctaaatagtgttctagtttcaatatggtttacacattatttaaagttttaacacttgttttccttatattaaaaaatgttttaaacctatatttttctattactattaagatcttaagttttttttttaattttgtgtaaactaattggataaatcttaactcctaagaggttaggttcaatatggtttacatataatttaatttttcttatattaaaaaatgtttctatttttattttactattaagattttaaatttttttttgttaagtgtaaaaaattaaaattttgtgtaaactaattgaatataacattcaaacctgtaagaggtgtttataggttcaatatgatttatatataatttaaatagtttgctattttgtttagaatcaaaatatttttaaatgacatgttgtaataattgaccaaaagaaattagtgtgtgattttgttgaaatgcagagtacaaagccttaatttataccaagttatggtatctataacgtatatgaataccaaaattttattatttttaattggtgttgtattttataattcgaaataattaggggaacgggcaaaacctctctgttctctcgcttatattttttttagagagaaagcaaatcagtttcaacgatcggatattttctggtgttagccgtcctgactttttgggctttctgtccgatatcaccggctctggtagcggtgttggttggctctagtccggcagcgtcttgttcacataaccggtggttgctggctcttggtttctctcgtcgatgtagatcgatttttaatctgtgtttttttattttcatgttttgtttttaataattctcatctgagacatgttggtgatagagtgaatgcaatctcgctttctaatgcttcttatccgatctgttcttttttaagttttgatttacagaaatttttggagaaatttgagaatgatgttgaagaaaagaagtggattctgttgttaattatcatagccttaagctgttgtatatttaacatgagcctcgattgctttttatcggtgaaaaaacaaaaagatccatgttctatgagactatcgacggtgattctttcaccgaaatcggtgctcagacggcgaaaatgaagtcggttcgctttagagtactcatctgacacgtatattaatatatcgacatgtggtttgggatagagtcaaactatagtttcttcttctatgaaagactctctgttggcctatttggtcctaaatcgtttctgtaatcgcggacttttctttaagctttgactatcttgattaatacaatatttctcttgggacaaaaaaaaaataatcttagtatttctttaatattttttgtttgggtatgggctattgggccgcttcgaaaagttcactttctctatcgatctctcacagtttctgagttctctgactcaaaaacatatagtagaagaaaacgattagagatcttcttctttctcctgttgcatctgaagataaaggaaacagaaagcgcgagatctgagtgacggagtaatttcaaagggaggttttcgagatcagaa

SEQ ID NO: 6828 - DNA, 3000 bp, Unknown
  misc_feature (1)..( 3000): cDNA_ID_1809097_gDNA_ID_1621108_Annot_ID_56018 3000 nt of promoter + ATG
tgataacatgatcggtgaaggagggtacggtgtcgtttacagagctgatttctctgacggttctgtcgccgccgtcaagaatctccttaacaacaagtaatgtctttaatgattattactaattttgattaagatcattttgagcaaaattcaagttttttgaaatttggatcttatcgggtagtatattaaatatatcattgcctcattctgacaaatgttcatttacttcgtttcacggactccgtaattcttgggtcaaggtttcattggtacttactacttggttttaaaaatgcttttaatgttgtcttcttcgttgctttcaaacccaagaaaatggcgaaacttagattttttatatttctccgacaagtgtttaattagatagtaccactttctctgcattgactttaatatatcaatgaaattcttgagttctgtattgaataagggtccaactgtaaccattttatctcctgaattagtaacttaaagacatttcagagtatatagtaaatgtttttccgaccattgaactatataattgctgtttttttaggtaggtgtagtgaagctaaaagagtaaaacaaaaggaaatagtattaattagttgtgctttgttctttattctctattaatgctttctttaatcttttccttttcttttgacctctatcatctcttttgttttagtttgtcaccttttttagatgatgagatggtcttcactagtataaaacttgctggaacatgagatatcattgaaccaaatagcttgcaaagaatcttctctgtttgctttgtgggattgtcacttctttgttctgactttgggattgattagccaaagctccatggattgattttatggttaagaaaatgaataaatcttttatctaggtacagaaatctattatattcattgttaggttgagcagagtcaggttgttggttacaggacaaccactggaagtttgatgccatttaaaaaaaaatatatataataattttttggtcctgaggcatggatgaaactttttctcttcttgtttactcttatattattgttttataaacagttttgtagattttgatataagaaatgaatctgctaaatgatggtaaaatataattctattcaggggtcaggcggagaaggagttcaaagttgaagtagaagcaattgggaaagtaagacataagaacttggttggtctgatgggatattgtgctgacagtgctcaaagtcaaaggtgctaatccaaacaaactcaaatgaattagtaaactctaatttggaattaatctaacagttagttctttctttgttccttgattaggatgcttgtgtatgaatatattgataatggaaacttggagcagtggttacacggtgatgtaggtccggtgagtcctcttacgtgggatatccgcatgaagatagccattggaacagcaaaagggtgcaacttcttttgttttctacttcttcttttcagttcgcattttagctaagattggcctttgaaactctgccttttgatgaacagattagcctatttacatgaagggcttgaacctaaggttgtgcaccgtgatgtgaaatctagtaacatcttgctcgataagaaatggaacgcgaaagtgtctgattttggtttggccaagttattaggatctgaaacaagctacgtgacaactcgtgtgatgggaacttttgggtatatatatagataccctctcttctttcagttatcaggctcatattgtttctttacattttatcttcttacacctttttaactttctgcagatatgtttcaccggaatatgcaagtactggtatgctcaatgagtgtagtgatgtctacagtttcggtgttctgctcatggagatcattacaggaaggagcccagttgattattcaagaccgcctggcgaggtaattgaaaacgtttgtaagtaacaaaacctttacctgccaagaccatacgcaaataattgtttgttgaaacatttgcagatgaacttagtggattggttcaaaggaatggttgcaagtagacgtggagaagaagttatagaccctaaaatcaagacatcacctcctccaagagctttgaaaagagctttgcttgtttgtttgcgttgcatagaccttgactctagtaaacgaccaaagatgggacaaatcattcacatgcttgaggctgaagattttccattccgtcctgtaagtgtgtcaaaagctaaaaagagatttgatcctttatgcaatttactgattttaagtttcatgttgtcacacaggaacacagatcaaaccaggaaagatcgaagtaagaaagattattgggcaaacaataatgtcttggggaagaccacacttgagcgttgatgctattcattacacagccatatattgatagatgtttccatgtttgttcttatattgagaggattgatatgcaaaagagaaaattggaaaagtgaaattagatatatgaggatgaaattcagatttatcgcttgtaatttgtaaatatatcatatattgtataataaaacagtgaactctaagaacatttcttcccttgtgaattttcccattcaatttaggcctgagaaataatatcgacccggacctaaccggaatttggtaatttggtttatagagaagaactgttcggctctgctttgaaatttgattggtatacggtttagttcgggtttaaaaacttaatccggtcttaaacctattttggatccggtttgggtcgagctcaaacacatgtgtcggaatttggatccgacaatccacgaccagaccactaacctgcgattggtaaaattatctaagaaaggccacgtgtcatcacacattctcctgacttcgccatcatcattagccccacgcaaaaagggaaaacagaatccattccttaaatcgatttcatccagatctaaactcgagcttttgttgatcgaaaaaatg

SEQ ID NO: 6829 - DNA, 3000 bp, Unknown
  misc_feature (1)..( 3000): cDNA_ID_1808243_gDNA_ID_1621108_Annot_ID_56019 3000 nt of promoter + ATG
ttatgggatcatgagtatttctcgggaatgtgtttattcgcaagtctattctctaacctcagtaaataatgagtggaagtttagttaaggccaaatagtctaaaatatattatttgtagttttgtacacagccaggattgaatcttaagagactctttaagtctaaaattacaatcagatcctagaccactttctatttgcatgaacgtaaccggatactgattttttaaatgttttctttggttcaaaatcgccactatctttgacaaaaacattctcgaataggattcaaacctaagagcctttcaaattcgttcttaattatgtcatcatctttagttctgctcccatctctcatcggtctcaagaaccactcctagtcatttaagtactacgttttatacacattacatatacatacatttacacaactaggaattgagtagggaacaaagtttcaactttcaactaatagggtaagccttctggtacatggaaaccaaccaaccaatctactagtttttatgagttcaaagatcgatcttaaccggatatctatggatgcaatgttcccaaggattgttaaccgagggctcgacattgcgaagagccacccaaaccgcgctgttacacttaaacccgctaccaaaagcaatctgccaaactctgtttcctttcctcattcttcctttagcttccgtgtaagccaattcataccatatagagctagaggaagtgtttccaaatctatgcaaagtcattctagacgcctcaacatgttttggagaaagctttaaactcttctctagctcatcaatcacggctctacctcccgcgtgaatacagaaatgatctaaagcaagcttgaaatccggtatgtaaggcttcttcttcttgtcattgaacaatctcttagcaacaaaagtcgcaaagaacagaatctgctcgcttataggaagaaccagaggacccaaagaagtgatattcgtctttaaagcttctccagctatagccataagatctttagacaaagaaactccggttttcaaacactcatcttgttcttgatacacacaattgaatgcgttctcatcagatcctttatgagtcctgaccgtatgaacaagcttatacttggatcgttttcgatccaaaggcttgttcgaaagcagaaccgcggaaccaccaactctaaacaagcaattagggatcaacattgctttcttgttaccaaaataccaattctgagtgatgttctcagtactaaccacaagagcaaaagtgttcctatggatttgtaacatatcactagctagatctaccgcgataacaccagcactacatcccattcctccaaggttaaagctcttaatgtttcctctaagcttatacttgttaacaatcatggcggataaagaaggcgtagggttaaacaaactacaattcacaacaagaacaccaatctccctaggattgatttttgtattctcgaaaagattgtcgagtgcaccgaagattacctgctccgcttcttcacgcgctgcagccatagtaggacgcggagggatagagtgaatagaatccggtaaataagtctcttcaccgagaccagagcgaatcaagatcttcctctggaactcaagagaagtttcgctgaaatcttgaatcaaactagagttgttcatgaatttctggtagctaactttttgactcgaaggcgggaggtagcaagagtaatctagaaggtagatggatctaggtcgagacatgaagaagacaatggatccgacaatggcgagagtaatgacgaagatgaatccggtggaattgtaatagagctgaagatggtttaggcttaacaatgagacattcatgaacaaaacagccattagagggaggaacatgagtttaaaaaagtgagtgatcagatagtgataaccaagcttgacgtagttttgggtccggatctgtacaggtcctccattagcatccatggacagtttctaaagcagaatctttgatatttttgttgatgatactgatgagaaactgaatctgggtttgtgtgcgtatatatagatactgtgagagagatagagaagaaatcgtaaggggatgtgtttatagacaccattttttcttctgcaggttgggtgggagtttgatataactaaaaaacagagaagagtcgccattgatgtatttggcgtcatgtgtatcggccaactaatggaagatatcaagaggaaaagtgatgaagaagcttctggtttttcagatttttatgggaaaaaaacagagagagtagatttgaatcgaatttcaaattttcaaatttcaagaaaaaaaggaatcttaatgataatggacgttgatatgggcttggggtttaggcccaattgtttttcttttgatcttgtgtaaatctatgtatatctttggagatcaatcacaactcaaagaattggcccattatgatgtaacctaagtttgactattttactattttcttcctcaatttttttaagatcccaaagaaaaaatatggtattattgtccaataaacatgtcggaagcaccaacattatatgctaaaacatttatttaactaatttcgattaccaacggcgtacgatttaatgcaaatccagctatattacagatcctcattattcttacaaaattctatttcaataaaaaccaaattttagttagactatcattaacatactatacattaatatgtactcgttcggtggcattctcgtaataaacactaatcgcatgccttaaataggaaacactctctcaagtctcacaattctacccgttgagctctctcattttatttttttgttaaagctctcatcagtcatcatcgtcttttctcttttgtttgtttgctcctaacgtttctctttcttggaacaatctccagcaaaccaaactaatccgtctgagagaagtagttttgactttctctactccgtgatcgcgatg

SEQ ID NO: 6830 - DNA, 3000 bp, Unknown
  misc_feature (1)..( 3000): cDNA_ID_1815710_gDNA_ID_1621108_Annot_ID_56022 3000 nt of promoter + ATG
gatttgggaatacttcatctagctcaatttggtatgaattagcatacatagaggcaaagggaagaatgaagaaagggaataaagcttggcagattgctttaggatcagggtttaagtgtaatagtgcggtttgggtggctctacgcaatgtcaaggcatcggcaaatagtccttggcaacattgcatcgatagatatccggttaaaattgattctgatttgtcaaagtcaaagactcatgtccaaaacggtcggtcctaatttgatgtatctgagtgccaacgtttactttgtctttcctttcttttattggttatgattagatgtttactatgttctctctttttcgttataaataaagaagttcaattcttctatagtttcaaacgcgattttaagcgtttctatttaggtttacatgatttcttttacaaaatcatctttaaaatacagtatatttttagttttcataaaatatttaaagaaatgaaagtttataaacattcactcctattctctaattaaggatttgtaaaacaaaaattttgtaagcatatcgatttatgcgttttgtcttaattagctcactaaataataaataatagcttatgttgtgggactgtttaattacctaacttagaactaaaatcaactctttgtgattgtttgttcatccagctgaccagctctgtctgccgtctaggttatgtgaagaaagttatattcctggttgtttagatttaaatataaaaatggatactttagtttatgtatgattttgaattgtttagatttgaaagtagggaagcccataaaattcaattgatagttgaataattaaaaatgataagtgtcagagagttggagcagtccccgatgagcctacatcagccaaaaaaagacactcatattttcattcttttttttggctaaaactcaccttatatatctgtttatttcaaaagatgcgtttttcttactttttacaacatgaaatcttttattttaaggaaattatagtaactaaccgtagaatacaaaagaatgaaaaaactaactatggagcaacgggtcagagacaatttttatacatttttcatttatataacaataactcatttatcattaaatcatttttataacaataactagtaaccataaaaaatataaatacttcttggatgttaagaaaaaaaaacaattcttcttttgacgaaaaagacttcttaggaaagttgtatacctttaaaatacatgcaagttatatgaaagtttataaaattcacaactcttctttattttaaaacccaaaaaaaaaaaaaaaaaaaaagtcctcttatttatacgtctaattcccatgcatatatcgagaataacccatcatataggaattaggctcccatcatgtgatcatgattcatgagtcatgaccattggatctcccctcattattgttccatcagaaatttctacgtcgatgatatgtttctaattctaattttttttacagcaatttctaattctaattaagaactctcccatatacaaattgatatagatatcttttagtaagttagtaacaacacttaattaaacatagataaatatacgtgcacagatcaattctccagtttaaggaaagaaattggatagatgtatttaaatacttttgtataaataatataactatctccaatacaacacaccgaatcaaatgtcaacatctacatacatgtcgacatgaatttatgaacatatatgtacaaggtgatggggaacccacaaattaggtgtgtggctttactttttttagtgtatgcatgtatagtatgatagggagggaaatagctgatcatcatcttctatggacttagtccaaattcatcacatcaaaaggcaacgaccatgtctttgtttctaacaactttacaccctcccctttccttatctactaactccatgtatctgctttaaaggttaatatataactggactaagcaaaataaaagagagttgggttttcattatagaatcgagaagatttcatgtccctatatcaatcacataaagcgttttccaataacataaaaagtcggataaatgaaaatatttgagaatctaaaacaatgtcatatatactttaatggaaggtccttttcttcgaaatatttgctcaccgaaatcggtgaaagtgatctaagactaaaactaacttgtgagtaattcatgtgatgggccttctgcatcgaaaaagagcatggcgatcacgtggcagcctctcttgcgccgtctcagtattagcctatcacgatagagtaagccaatgtatacagcatggcgatcagacacatgatgatgatcgatctgaataacaagattccgaaggatgtaataaattcatgtgaacagtgcttcgtagctaaactaagaccagagctattgaaatgaggtaaagtgttttctttgtaaccccattttaattaggtgaaatatctagcgcacacaccaatctgattcatataatcataactagcttgtaaactacaaaattatttttcattgtgttacaactagaccattcccacgtgaccattcacgtgctcctataatgaaagaaacctaaagaagagacgctccaattcgcatagacatcccaagcttatcctttcttagtgaatcaagatccaatttacactataatacatgcatatattacgtaataaatgttttataagttttctgtgtcactcactatttttagttattttctcaattttcaatcatcgcaaatatcaattatcacaaaacatataaagtttccagatttgtatatgggcctaccttattagatgcgatgaatatggactaagtacagagctgatggtttttgttataaatatcgtttcctcttctaccctcacctttactctgtttctttctccactctctctctctctcgttgcaagcaacttgttttctgaatccaaagaagacgataacg

SEQ ID NO: 6831 - DNA, 3000 bp, Unknown
  misc_feature (1)..( 3000): cDNA_ID_1807445_gDNA_ID_1621108_Annot_ID_56023 3000 nt of promoter + ATG
tttcatgtccctatatcaatcacataaagcgttttccaataacataaaaagtcggataaatgaaaatatttgagaatctaaaacaatgtcatatatactttaatggaaggtccttttcttcgaaatatttgctcaccgaaatcggtgaaagtgatctaagactaaaactaacttgtgagtaattcatgtgatgggccttctgcatcgaaaaagagcatggcgatcacgtggcagcctctcttgcgccgtctcagtattagcctatcacgatagagtaagccaatgtatacagcatggcgatcagacacatgatgatgatcgatctgaataacaagattccgaaggatgtaataaattcatgtgaacagtgcttcgtagctaaactaagaccagagctattgaaatgaggtaaagtgttttctttgtaaccccattttaattaggtgaaatatctagcgcacacaccaatctgattcatataatcataactagcttgtaaactacaaaattatttttcattgtgttacaactagaccattcccacgtgaccattcacgtgctcctataatgaaagaaacctaaagaagagacgctccaattcgcatagacatcccaagcttatcctttcttagtgaatcaagatccaatttacactataatacatgcatatattacgtaataaatgttttataagttttctgtgtcactcactatttttagttattttctcaattttcaatcatcgcaaatatcaattatcacaaaacatataaagtttccagatttgtatatgggcctaccttattagatgcgatgaatatggactaagtacagagctgatggtttttgttataaatatcgtttcctcttctaccctcacctttactctgtttctttctccactctctctctctctcgttgcaagcaacttgttttctgaatccaaagaagacgataacgatgaatggagctataggaggtgaccttttgctcaattttcctgacatgtcggtcctagagcgccaaagggctcacctcaagtacctcaatcccacctttgattctcctctcgccggcttctttgccgattcttcaatgattaccggcggcgagatggacagctatctttcgactgccggtttgaatcttccgatgatgtacggtgagacgacggtggaaggtgattcaagactctcaatttcgccggaaacgacgcttgggactggaaatttcaagaaacggaagtttgatacagagactaaggttcgtgtgtaaagaaaacttaagtttaagttctataaatgaaaaagaaaacagatcttactttgagatttggcttatctgtttcttctgtgtgtgcttttaggattgtaatgagaagaagaagaagatgacgatgaacagagatgacctagtagaagaaggagaagaagagaagtcgaaaataacagagcaaaacaatgggagcacaaaaagcatcaagaagatgaaacacaaagccaagaaagaagagaacaatttctctaatgattcatctaaagtgacgaaggaattggagaaaacggattatattcatgttcgtgcacgacgaggccaagccactgatagtcacagcatagcagaacgagtaagagagcctcattaactaaaattcattaactttgttttttgtgtaatcattgagactaattattaaagtattaaatttgtgaaggttagaagagaaaagatcagtgagagaatgaagtttctacaagatttggttcctggatgcgacaagatcacaggcaaagcagggatgcttgatgaaatcattaactatgttcagtctcttcagagacaaatcgaggtctgaaaattatttccatttatagaaaatatgttttaaagactaattttgcattaccttcctaatttgttatcaaaatattgtttaaaacagttcttatcgatgaaactagcaattgtgaatccaaggccggattttgatatggatgacatttttgccaaagaggttagtcattgatttgtttatgcttatatgaaaaacaaaactttaaaggctatttatagatgagctaaaatacgccatgtggattcaaaaccaggttgcctcaactccaatgactgtggtgccatctcctgaaatggttctttccggttattctcatgagatggttcactctggttattctagtgagatggttaactccggttaccttcatgtcaatccaatgcagcaagtgaataccagttctgatccattgtcatgcttcaacgtaagtcatatttttaatactctttcattatgatctatcctttagtttaactttggatatgataattttttactaaatatgttttgattgttacagaatggcgaagctccttcgatgtgggactctcatgtgcagaatctctatggcaatttaggagtttgattaagaaaccaatccacaacataacaatgttccctaattcaaattattcatcggaagagagagcaaaccagtagctgttatttactaattccactagattattgacttgagatcccccgcccattagttgatgtatcaaagagtgtagacattattgtgtataatttgcaaaccagtccagtaatatatttcttatcggtggacttgtgtctttaattcaaggtgtgttctcatcttcttgtggtgaatgatcatccattagtatttttttttttagtatacaatgccacaagtcatgcgaccatgaaatcaagaaacaagacaccagtcgtttaacgttatgttttacatcttatcactaacaatcttctaatctatgttttggttactttgaaaaagcgggactaatcccaaatttaaagcaattgaataaacaacacctgttaagcgtggcggacaaaacgacgacaatgtaagagaactgagtcagagattaaaacctatgaccaacccattggaactaaactatcctaattctctatacggagagtatatataa

SEQ ID NO: 6832 - DNA, 3000 bp, Unknown
  misc_feature (1)..( 3000): cDNA_ID_3049060_gDNA_ID_1621108_Annot_ID_56026 3000 nt of promoter + ATG
ccgagattttaggaaaaagattcacctcaatgattgtgtcagcgccgaaatctttcctccattggatcatgtcactccacatttgcttagctttctcaatgtcaaactttcttgctctcaaaaatctgtttatgttcatcaatacgaaaatataaatcttcttgatgaaattcaatattatttgatataccaagtttttttctttttgaacagactaaggtttttcttttcattttcttcatagttaattttataaaatgttcaaattgtattaaatgatgttaggaaataaagtgttgacaaatctttcttcgcttcgattattttctttccataaatccttttggtctgaatttaaaaataagatttgatttttaaaatatttgaaaaagtttatgtatgcatatatctgtatatgagattaatcagaaaaatatgaaatatttaactttatcgctgaaaacttcttatctttaaaataatacatatggcagtttatttgttgaatatggtcagatatctataatctttgacctaattttctctcgggttatagtctagtccaaactaacaaatcaggtttcaaaatttttaatcttattgacttataagaatactacggtctcgaaataactttgtgaataaggtaagaaaataaagagattgaatagggaaaataatttttttaccgaagcatcatgtggagatcatcgagtttggatggcaaaagctcgtcaaggataagagcttgacgaaaagcatcaagagcttgaagatcttctgcgtcaatgtcgtcctcaatcggaacggacatgactctgctgctgcttctccgaccttttttcttgaaggagttcttgaatctgttggatgcatttatcgctttcttcttcagcgagcttatcttcactatcttcctctcttcctccgacatctctatttctgattaacaatttgtaatttgcattagacttaagaaatatctctgtgaataaaggcaggaaatgtatgaaaatactaaccaggtttggtctcagccatggttagatgagttttaagcactctgtttcacacggcgataatacctaccaagacaacattgtaaagatcacttaagaaaagcttagatcgaaatcgcatgagaaatgattagatgaatctaaagaatcaagatgagttaaatgaccaaaatgtgttttaggatccaaagatgagaaagctagagagaatttgagagagtttatttttttatttttacctctattggagaagattgtttggggagaggtaagggaggctgaagataatggagaggctcatttgaagcaaggtgaaaacatgtagacaactatttagttctgattctaacaatctatatattgacagggtcctcctactgttttccataatatagaaatactttttagaaaaaatccaattaatcctattaaataaatacatagagttagttttaaactaatgaacaacgaatcgtttctaagtaaataaattaaatatgagagaaatatgtctttgtattaggagaagtgcatcccactacttccaacattttgtcgatgataaaaaaacatttgatgtcaacccaagtatctcatgatattgtttttttttgtatgattgtatcgtaacattatctacaaaatttaaactttttacacatacagtgaatttagtttatagtaaacaatggaaaaaccaaataaatattatcattacagtctattaacaattaataaccaagaatcttaaggtttaatttcccttcaaactaattgtaaatgatatatcctgaaatacatcaccacatggtgatattccccatagacggtgctaagatacataagttgtttcttttgttcacatattatatatcattcacaattatacaataggttactacaggaattataacattgtacaagaagccaaaaattcgatctaataataagtgatacacatgacaaactatttcaatattaactattctttataattaactttggaatcgtttctaaaagggcctattttcggtccagttgaggcccaatataataatgggtcgatgctgatttttcttcttcttcttcttcatttaaacgactcagtgtgactcagtcgccgtcgtctcccgccgtttataccctctccgaagccccgagcggccaagacgctacgtttgatttcgtctcaaggttagggttttggaatctcagttttttttttgtaaaaaaacaatatgaatgctgaatttgtttctgtcgattttgcctctgtttgcaatcatgaatgcgtagattcactctgaatggggattgaatttggtgaactccaatgaggttagttatggagttgttgttttagtaattgataaagtatttagattcagaaatagaaagcttggcttattatatcttatatggataaatgcatgaagaacataagaatctctgtcattgttttgaggacttatccccttatttcacactttgatatgagtttggtcttgagcgttttgtctttgaaattctgtaattctcgtctgaagttttggtttttctttttaggtgtttgcaaaactccgcaaagactctacctttagcgtttaaatcggtaagtggtgaacttgactatgtttgcattttacgtgttttttgttctattgccctatgtctaccttttctggtggagttacagttaaataagtgcttatttgtgagtgtgttattaatttatcgtatgtttgcaattagtcctgttaggtgtttattagaagtgaaaaatgtacttggttctatgttgaatgaagtgtcctgaaataagtaatcttgtgattgcaattgcattgcttagtgatcttctcaacttttatttgtgttcaatcttcaggcattgctgcctttgtctcaaaggtggttctgtaaattttctcctaagccatcctcattgacaaacattttcaaggtttcaatttcaaccatg

SEQ ID NO: 6833 - DNA, 3000 bp, Unknown
  misc_feature (1)..( 3000): cDNA_ID_1815694_gDNA_ID_1621108_Annot_ID_56029 3000 nt of promoter + ATG
acagtaagcaaaaaggtgacatggcttacttaatgttgaaatatatggtattggtaggtagaagttggaaaacaaaacaaaacactttttcctctttacgattttcggattctccattttgttacatcatgatatgaataccactacttttaaactgcatatatatcgacgtatgctttattccttcaagtaaattttaataatcgtgaaagagaatgtttatagtcaatttatagtacaaatgtgtctagtattctgtatacatgtatatgccttttatattctcaagtttgtagattttctttttctatagtatggttctcatttcatgtccattgagatatatatgttcaaaatttatgaagataattgtatttttcttaacgcaattgcgctcaagaaattctttagcactagttttttcttctttttttggtcaaaattctaatctttcattattcaattttttctttaattttgtttttgggcactggccaactaagagaaaaaggtcattatgtataatcatctccttgttagtaaagtaaacaaatcaaatcataattaaaagacgagtatgacaaaactttaaactttaaagtaatgttttttgataaacagagaattcagacatatatttcacatttcctttagatccgtgacttaattatatttttattttgacttatgtatgttaggttccaaacctgaatccaagcgtagcttaggcttcgaacctcaaatgtctgcataaaatttagttaccattattgtagctggatagttagattctccacatttatataattgtttttttaaaaactattggtttggaagccaccgattttcaaggcctaatttagaaacaacattttctccatgaactcttttgatgcgtagtcttaatagaaatctttcagtattattgacaagaaaaaataagataaaaataaataaataaaaaataatgactaacatagatgtgaaaagtccttattaatattcaaaacgctccaaaggaattgcacgacgagacaagaaaagcaggggcggctaagagagtcctttagaaaccaatctcattcgaatagtattatggtttattgagaaaatttataatttatgtactaggaagtaaaaagtcatagccgacgatactcaaaacagaattttccttcgagttcaagtattttcttgttaattagttcggaatcgaaatttcaattctaaggtttaaactctttattgtgaaagtcacacactcgtgtatttagactctaacatagagtcgagaaaccatacatgtataatgtattagttgaatggtttcgtctaaactctatgttacaagtaacaagtccatataaatgagtagaaccctacaccaaactctaattcctacttcttcgaaaggatacctaaaagcccgtgaagtctagaaatctttgattttatctacatgtattaactttgtcagcaacacacgttcataccggatttaaagttttggtgcaagtttctatcgagagagctttgcccaacatcttaatataagcccaaccttttataaataagcacaaaacaattataaagcctcacaagtaagttaaaacataggcccgaggcaaatgttaatggtacagtatgttgttgattctaatgtctattacgtgtactaactaactacgaagcccattcaagagtttaaccggcccaacaggtttactatgattgttttgtattaatatacagcttgactctcattttgtaatagaaaaatatatagcggtgtttaacaagataaattatgctatctataacattctaatccagaatttggttccatttaaaaaattaattaggccggttttcttctaaatgagttgtggtttcttgttaggacgtgcactcataccagccttaaaaaaattagtgacaaaacaaaactgaaatttttaacaaaaataaataaataaaacaaacaaaactgaaattaagaatcgtgagggtacggtcatcatccactacatcatctttactcctttttatgtgcaaccataaaataatacgtcgaacattaattatagtgacgaatcagttcattaaagcaaagttcaaacaactttgttctctttccataatctcaattaatcagtaatccatttaatttatcattgtgtgacgaatcagtgcatcgaagcaaagtttaaacaactttgttctcttttttccataatctcaatcagcaattcatttaagtttaacactttttagcaaaaaattatgagaaaaatttatgactctatctttcagtaagtatgttatgatcgattaatttgagttaaacgaagtagtgtatcatatatagtatatcactatcagatttatagaggcctaatcgtacattattcagttggttatagctagcgatatctcttgattggagaataggaatggaactttgaccgatattgaatacctagtcttcaaggattctacaatataattatgatgatttggtaaatttaattgggttatgataatgaaggcactcatattaaataatcaggtcactaacctctttagacttattgtggccaacaataggaaagtagtctcctttcaactttttctccaatcccaccatttccatgaacaatttttttaattaaaagcattaagagatatttgcattaattaaatgatggataaatcaattgttgttatggtattttactatttttatttatttgtaattgatacaatctaattttgaaactcaagctaatctctatttaaaccggtttttattgttgctttttatttaaagcattcacgttggctaaacaaattagttaacttttaatcgtgttatttctttagagattatatatagtgatataccaaacgcattggcttctcttttttttgataaggtacgtgtatctaaatacacaagatacagcttaaggcacatcaaaaattgaaaggagaaagaag

SEQ ID NO: 6834 - DNA, 3000 bp, Unknown
  misc_feature (1)..( 3000): cDNA_ID_4257557_gDNA_ID_1621108_Annot_ID_171696 3000 nt of promoter + ATG
attttgaccatgtcattacaaacggaagcagagcaactggtttatgggggcttgtgcttgtggcgagttctacgaaatttttgcttggaaaggtagtgatacgtttaggagatgtgtgtgttgtgttgtgaatttgcttgtagtttgagtaagattgtgctagtggcatatttttcattctgtttcgagcattatgttaatacatgactaggtttgacttttatagatttgtgttactttacaaggcttgttttgttgatgttccatctctttcaacaaacactctaaattgtgatttgtgaacatcaaataaattacgtaggtagtaagaaacatatttgttcttgtaacggtaacttaatttgactttttgttacattgatcaatttccttttcttcgcaaaacatagaaaaaagagacaatttccttttttcaatggagcgtttgcttataaatactccaactctcgtatcttcttcttcgttgagaaatcaaaataccatcttttatcttcttcttcttcttcttcttctttctttttcatacctgcaatttccctgagagactgatcactgatgtgctttcgttctctcgtgacaacaatcttcaatcaatcgagttcactttttagttcgtgactccctaatttcacacgatcaaagatctcgccaccgaaacgctttcaccgaaggattctttcaacggcggcgaaggagatgattacacgacggagaaggatgcgcggaagactatggccaagagagggatagtgaaattaacgaccagttggcagattcgtaggctttaaaactacaattcgactgcggaggaagaagacaaatttgtgtttcatcgatcgatcgataatcatcaccagcgagaaccaaggtttgcgctttcctaattttctttttctttaataaaagattttaaattttataagattttttttcttgtgtttctttttttagattttttttttgttttgatactaaatctatgtaaaaaatgtatatggaaaactaaccggattttggaaccaggttcggtcgttagcgatttcaaaaattcaacttgttttcatatctttatatagatttggtatcgaaggtttttgttcggacttttaagagtttttttttttttttttttttgttttgtttgatactaaatttacataaagatatatgaaactaaccggattttggatccagcttcggtcgttatcgattccaaacattcaacttgttttcatatcatttttatatagatttggtatcgaagttttttattctgatttttaaaaaaatttatgacttttttttttgttttgatactaaatttacgtcaagaaatgtatatggaaaactaaccggattttggatccagcatcggttgttagcgattccaaacattcaacttgttttcatatcatctttatatagatttggtatcgaagttttttgttggaattttaaaaagtttttttttgttttttttttgtttcgtttgatactaaatttacataaaatatatgaaactaaccggatttttgatccagcttcggtcgttagcgattccaaatattcaacttgttttcatatcatctttatatagatttggtatcgaagttttttgttgggattttttaaaaaaatttttgttctttttttgttttgtttgatactaaatttacataaagatatatgaaactaaccggattttggatccagcttcggttgttagcgattccaaacattcaacttgttttcatatcatttttagataactttggtatcaaagttttttattcggacttttaaagttttttctgatttattgttttgttttgtttgatactaaatttacaaaaatatatatgaaaaactaaccggattttggatccagctacggtcgttagcgattccaaacattcaatttgttttcatatcataaaaacttgaatttttaaaatagcttttcaaattttgttatttttgattcgaatttttcaaaggtttttaaggtttttgtttttgtcttgatactaaatttatataaaaatatatatgaaaactaatctgattttagatccagcttcggtcgttaacaatttcaaacatttatgtagattttagtatccaagtttttaaaataggttttcaaattttgatattttttatttagatttataaaagtttttaaggctttttttttgttttatactaaatttaaatatatatatatatatatgataactaatcgaaatttggatacgttttgggtcgttagcataccaaacattcaacttatttttatattatttttatgtaaattttattatccatgttttttatttagattataaaaaaagcttttcaaatctttaaaaactagctgtgttttgcatccatcattagtctctagagttcttaatattcaacttgttcttttatcattgttgcatagattttagtattcgaattttcacttttagaatttttaaaacaatatttatcatttcaatagtttctatttgttggtatggataatgtggtgttctggtctgattttttgaaatattttgtttaattttgtctcatttagaattcaaatctctgttttatgcaatttacttgatcagaatttctgaatcgaaaatgtattggctgatactaaaaattaattcggttctcgttttagttacttcggtttaatttgaaactcggaccggttttcgtggattgaactcttccacgtcacctagattttgtgaaacgactactatacccttagaacactggataatttgttcttgtttcgttacttgctcagagaccttttcaaatccaaaacagaggaatataagagattaaggaaccattgtgacgatgcctaacttgctccacaccaatcaatctcacttcttcttcctccatcatccgccaatctacaccgtcagttcaaagacgcaggctttccacttcccgcaatcaatg

SEQ ID NO: 6835 - DNA, 3000 bp, Unknown
  misc_feature (1)..( 3000): cDNA_ID_1815684_gDNA_ID_1621108_Annot_ID_171691 3000 nt of promoter + ATG
tgatgaatgattacgtattcaaatggattatgcttttgttaaaacgcaatgattatgttctgtgttaactttttttttcgtctctcgttttcgttttgtcttatttttatgtgaaagaaaaaatcatttggatacatatcttttttttcctcatttattttacttagtgataatatagcaactaaatttctaatatgcgatttgatgtcattgattcgaacaatacatttgcatcacaatgatagattggattttaggtaaatctattgaagtttttaatgttttattaggtaaaactttataataggttagatattattctacatttttttgcctagagatattgcgaatacaagaatcattaactcaaaaaccacttgcattgattacaggacttgaaactctctcccattttcttgacgtcaaaaatgataaaaactactccatgttttataaaagataagaaaagggaaagagtgatgatgatgatgcgtcgtgaatcgacgaataagaggaaaatgtgacacgttctcttttcccccattacgctctcgtcactcctcaccagcctgctcccttttcaaacttttctgttttccccctaattttacgaaaatcaaaataagttaaaatggaatatataccaactttcaaaataaaaaatcttcaaaacatatcaatgtgtatatagcgacacgagtataaagtcccacacacacaataaactaaggttggcagaaaaaaatataccaccaaactaagtgatcgtaactactctttcgaaaaaaccaaaccctaatcttgttttaagactaagaccaattatactaaaaaggaaagatttcataattggaaggaaagtagtatactttgatagttattaaaaataaaaataaaatgttcaaaagatttggctatagtggttgctttggtgaactccactccaacggtggtttgcaccatctccattcccatcactaccaaaaacccacacttctttttttttttctttctttgcgtaatgtgggttaaaaggaactttatttatgctcttgtttttgggtgtttgaatcgaatttgaaatcaacatttgtttttattttattttatttataaaaaatttgtgtgtttggaaagttgtaaaaggttcaaggggtttcggtagagataatcttaatttggtttttaacacatcgacttaatccaaattgacatctctaataggattcagatattattatatctatcctgtaattttccataaaatgtaatcaatatgagatttggtattagggtatgaacttaatgtatcttatcggaaaaatgttttctcctttgggttacctaatctcatatctaatgccaaaaatagcataacatagaagattggctagatcatatgtggacatcaccgactgcatggcaatgtttgttttataatcgcgtaatacttgtttgtcatttgccagttctcataacaaatgcgaaaataatcttatatatccttggtaatgcatgtaaaaattaattttgcttcatgaattattttatattcttaaattcatgactgaatgaaatttcttatctatattcagacgcagtatatgggacatctaactcaattttaagattctagattggatgattttatgttgtttgacaaaaaaaataaaaaaattggatgctttctataaatttcatgctttgtattttattaaattttgagctattattgtattagtatagaattgagctattattggattgttcttatcactttgttaatttcatttggtcctttagttagatatcaaaatttttaaaattttcaaaaaagatcacaggtttaatcggtgactttcaataatactagttttaacacgacaagcaaaatattgtgcatgtatactattaaattgttaatgttagtactatgaaataacaaattcatcaccattgtaaaacttaatgtttcaacatttcctaagaagaaatggtcaacccttttgacaagacaagctaaattggcatggacaaggaacacagcatcatgatataacccttcacaataattataataaaaacaatcaaatttgtattgaataatgcgaaacagacctgacttatcaatatgtgacgaaggataagcccacgccaaaaacatccacgtaaagaactcattgattaggtccaaagaaatttggagaaaataaaacaaatcctgacgtgaaaataaaaagaaatcatcacttttttttatctcttttattttcttctaaatacaaaaattgaataatcaattaatttttcatgtatgcaaacaatttcttaacaagtcttgtgagctttaaatgaaatatagaggcgagtggattagacttgatcctgatcttttattaagctgatccatattttacattgaaataaaggacacaccgtttaacacgaaaatgaagagacaaataaagaagaggaaaagcattgattctgaaataccaatatagtatcattcgtgaaagaagattttgtaatattccacaaacttagaaattaggggaaaagaaaacaaaaaaaaaagataggaaaaaagagctttaacttttggaattggaagaagcacaaacacacacaaaaaaaaagtctctgttttaccttttaaccccttcaagaatcctcctttaagttcagtgccctcttacttttctcttatcggaatatctctcttcctctgtttcttcgccattctctcagcttttctccttcttcttcgtctttgtcaggtaaagagatacgatgagcatatcccacatacctctctcctcttctcatctttttagtttctcgaaagtttgcatgcgccgactttgttataggttataaactttagttttaagcctattttcgtatgtttatggttgttgtaatagttgagaattcagagtatgtcaagtgaaacttaaaaagaattctatatgtatgtgtgtatgtgttaaagagtga

SEQ ID NO: 6836 - DNA, 3000 bp, Unknown
  misc_feature (1)..( 3000): cDNA_ID_1809022_gDNA_ID_1621108_Annot_ID_171690 3000 nt of promoter + ATG
aatagagaagtggtatatcaaacaaacactactgaataaccgtattggttaatatgaattaaaggagactttgttggtttttctcatgtgggagttggtttactatcgaacctttctaacaacaacgtattcaccagttgataagctgagctcgacatctgtcacaccgtgatatgggaacaagacctgaaaacgtttttaaaaagggaaataatatgttataatggcacatcaatgaggaccaaaaggaatctagatgtagcctgtctttttggttctctaatcaaaaacagtttatgtacatccagttcatacgtggagaacttataatccaattatctctttgatacttttactaccaatataaaccaaagttttaactctaaaaggaaggtattaaagactgaaaagcatacctctcctaagaagtaacccatgctatctgttgacgtgtcatgcatctgagatgcaaacactccattagcttcctcatatgatggaggtggcggcatactgtctgcgcttgagggagtagagggagcttctatacgttgcctctcagataccatctgtaggttcaagaatgttccattttgtccttagttgactcatataatgatgaactgattgttcgacaagaatactattatcacaggaaactgaaagctgtaaaactaatgcacaccaacctctccttcgagctgatcaagtatttggaggactctttgatggtaggcgcgttcagattcaacctgtgatcaggaatgaaaaatacagttgttacatatgggtaagtaaatcaaagttgacctagaaatggatcttgtaaccaatcgcactaccattgaaagaagtcgttcaagagtcaatttctgttgttgatcttcaacggaagctaaagcagaagcagcttctttccccaatattgtcatatttgattttaggtcgtgaagttttgcttcagcagattccagtttcatcaagatgtcaggattaccttgagactctctcgcctttgcttggcgtctggcaacttctgtagcctgtttggattaaagcaggcgcataagtaaagttctatcatgcgaataataaaatgactagttcttggaagaggaaaaaacccatattctactaacggtaattaaatagcttcatggtattatctttcaccgtacctgagcttcagcttcttggcgcattctgtcatagcgttgagcaagatgtctagcatcctccaatggagctcccaaaaccattgcccgtaatggctcagcaacctaacaaattcaggattgacatatgattgtagtagccaaaccgcaataaagaaagaaccaagtgaacaccatgacattaattgacttttaaagagtatgtaacaaattattccagataaaagaaatagatcttcccacaaatggcagtcattccactaacaatggcaggaaagtaattatttgtgtagttatattgcatgcaacagatatgtgctattgcttaacactttgatggaagatgaaaaagacaaacctgtgtaccaagagccttcaacatatttccacgttccttctccatttgtgctcgagcacgcccatagttcagtgcagcccgtgttaatacgttaccattcgtacatgtattctctgaaccatatttcctgctatcctcagacaatttcgtacctgatgaaaaatgagtgcaaaatgaaagacaggcctgtgagccaattcaagtctataacagacataaaaaaatacaataagttaaaactcaaagggtcaaaaaaatcacctatttcaacttgttttgaccctgtaactatataaccttccacaccacgaacaatatctctttggtaatgctgaaaacgaagaacgaatgagtccaaaatcaatagtaatcaaaacttcaaactagtcaaaagcttaagaaaaacaaccttagcagcacgagtggatatgtaaagcttttctagcttctgatgctgattgagttctgcttcatcagctaaaccagagccatatccccctcctccaaattgcttaaagacagccttaaccattccacaaaaactaagtcagtgtactaattaacctcaaactcaagaacacaaacacccaatctcatggtaacttggaacatgtagcaccaatatgttaatctatcactacaacatctttcaaatcccagctcacaaaactgaaacggattctcacataaaagtatcctaaattaccctttgacaaaaacttctccaattctacagaattttacccaatctcacatcgaatcaacgtattaatcacactcagatccaattactcattaagtcaaaaaccatcgatccgaaaaaaagctagcccctttatcatcatcacattattgattcattcaccagaaaccaacgactcaacggaatcacaagagaagataaaaacaaaatctagaaaaaaagatacagaatcgggatctaagcaaatgggcaaaccaaaagttaagaactttaacctgctgctgtctcgcaacttgttctctcaacctgctagcttgttttctaattgcatccattcttcaccagatcaagagctattcacaaatcttcttccttctctctttctcctattcttccactttacgagttccctccgattacttggaacaactcagagaagacagagattcgaaatcgtcaaaaatggcgttgagctcagaacaaatttctctgctttcgaacacgaagaaatcaaagatagacaaagtctctgtttcaccaagaaggttaatattgggctctctataatagcccattgggcttgaaaataaaatccagtaagctataaatttatatcatctcaaaataactaaaaagacgcaaaaccctagacatatataaatgaaaagccagtgaattagggctttctctcacttgttgaagccgcttcttcttcttcctcactgtagctcgtcgtcgctacaccatctagaagacccttaacc

SEQ ID NO: 6837 - DNA, 3000 bp, Unknown
  misc_feature (1)..( 3000): cDNA_ID_2999318_gDNA_ID_1621108_Annot_ID_171685 3000 nt of promoter + ATG
ctaaccaacagtatcaagagctcggagaaccaagtagaacacacacacctacaaaatgaaaaaaaaaaaaaaattgaataagaaaatgctgcaagactgaacacagctacactgatagcatgtgatcgaacacacacaccattttatatgtggaaacatatcgaatcatagttcactaaaatacaatctgcatttactgcagctcagaagaaactgcagaatcaattaataagaatctgcataactcatattgaactaagtggaacacaaactctcaaagccatcggattctacagaagaaaccaatcatcgccgacgtcaacaataaatgagtgtcagatatctggattcctccaaaaattgaagacgttgaccaacacagaggccgagagcgagaagaacttacggcgttacggagctcggtgttgagttgctgaataacgagagaaaagcttcgagaaaccttgtggagcatcgaatagcagaaaccccagtgtggctcaggagggatctgcttctccgctttctcaatcgctcgtttcatcttcaggagcggatatatgtcatccggatatctcagcatcgtccccaagctccccattgtttccagaaaattttgattcagaaaatggaggattcgttgacgacgatctgagattcagagaccacgagggataaattgcaggaaccctcacctgcgatgtggatcgacgcgattcggccagcgaatatcctattttttagttttgtttgttaatttattcatcgatgaaaacaaaggcttctgaattttttttctttcttttttgccagtgagccaactcacaaggattcacattttgtttgtttcttcctttttaattaaaaacaaaatgtcagagccaatgaaattgaaaaagagccacgaaacttaaagaatatcatcaaatggaaatggagagtacatttattctttttaactccctttttcttatgtgttaattagattaaaaaaacagaaaacagagaaaatgtgtttaatataatcagaaattaacaaaattagaaagaaatgatcaaattatagatgttgaaaggaaaaaaaggtatattctaaaaaaatggaagaaaaggtatctttttagtttttattatcataaatgtacgacatcaaatttacatgtccacttatttatttactggcaaactttctggcgacgctgaggtggcaaaataatccttacgtggcaacatataactggttgtaaatacgtatcttcaacagtgtaactaccaattagcacaagataacactcggtggtttgcctctattaatagggtaacttcctctggttatcaaaaacaaacagtcttgaaaaatcaaagaagcaacctctaaacaacacacaatttcgaaaatggcgcagcgatctagggttatcaccatgtctcctctcattctcgatcaagaagttgatctcgatctctgggaagttgttaatccttctgatggcgagttctccgacgattctttctccgtcgatagtctttccgacgatgacgtcatatctcttgacgacgcttcctttgtcgcaccctctgtcatttctccgccgcatgagataattcctattgctgacggtggtgatctcgccgtggatctggatggtgatgatgatgttggcgatgatgtcgttcgcgatgaagttgatgagaatgatcttggatggtctcagcagcggatgatgtttctcggtggaggttctggttattctgttggaattacgtacggagatagtgttaatgacgacggcgaagaagatcgcgagtacgacgattcgtatgatcttgacgaagagttggttccgcgtagcgtgagtaagaaggtggggagacaaaggatgaggaaactggggaaaagagcaatcgccaaggtctatgcctcgaagatatctccgtttttgaagcctggtatcgttcgtggtaagcatggtctcggcatgaaattcaagtgctgattgtgttgggatttcgaagtttcacaaggcgatgggatggtttcttcaagaactctcggtagaatttctcagtttctgggtttaattgatgtgtaaatttgttagttcaatttcaattcctctttagtagtaagtaattcggatgcttctgaagatctcattgtacatgatggaaattaaataactcgcattttaggattcattgttcattaactgatcgctttctttgatggctctttaatttggttgatcagattgtgattgtgaatcttgggttagcaaattgtagtgttgaaatggagaagatgatgaatggatcataataactcttgatagatgagctcgtttaatcttgtgtgaaccttagaattgaaaacgacagctaaactgtagcaatgatttaacaggaagaaggtttgtgtttggtggtggttaatttggttatctttgtagaagcttttgcaatttttgtgaatgttggtggttgtttgaaaagtcatactcgtaggatgtacgcatcactctgaatttcgacatctgagtggttgagactggagataactttattttattttattatatctaacttgttgcatgcactatggacttcgtatatctctctactaacagtcaaacacctatacgataacaagatgctggtgttctcaaattgaacattttgaagcaatttcttttaggaagatccttaaagacaggaagctgattgaatattttggaatttctggataatccgagattttagataagtgacttctgtatagcaaatcacgaaaagaaacgtatagcagatctaatgggcttaatgtgaataaagagataaaatgtaaactggcccaacatggcccatcttatcaataacgatcgtaacagaagaaagagaacacagataaggggaaaaagccaaaacccaccagcttaaataaaaacctttacttatcttctttcttctcacttctcagacctcaatttccaagcagagatg

SEQ ID NO: 6838 - DNA, 3000 bp, Unknown
  misc_feature (1)..( 3000): cDNA_ID_1815690_gDNA_ID_1621108_Annot_ID_171683 3000 nt of promoter + ATG
cgaataatgcaggtactggttatctgttggagctcaaccaacagacacagtggaaagcatgcttttcagggccggtttgataccaccaaagcctatggtagtggtcggttcgaaaaatgggcagaagtctacgagccaacatgtttcacccattacaggtgaaatcttgaactaagagtgttgatgcgttgagcaagaaagagccttttgtgtctgtgtgaaaggagtttatgtaatgttgtttaagacttttctgtttatgtgaaaggagttaatgtaatgttgtttaagacttttgctttctatgtgaaagcagtttaatgttatgttggttaagacttttctgcaacagagtttggtgaatttttattctttaatatgagcatgcctttttacatttaacaattctcactttagactaaataggctttggtaagaggcccatattttcaaaaataagattcattctcaatatctggattgtatgctaaaaaaaggaattaggcccatatttgctcaaaaaaaaaaaaaaaaaaagttatctgcctgaatatgatcttggacattagaacctcgttcttaccttttatgtatatctttacttctacatggtagtagttatataatctcgttgatcttgaaattagttcttattctcatataggtctgaaactcttatattgcttctcttcaaaattttgttccgtctttttggtttcaatatctgccaaaatgtatttgtatcgtctatatgtgttaaaaacacatgcaagagactagtaactagacaataatctatttcaaactaaattggtcttctaataaaaatgttatagttatggaaaaaaggatgtgtctttgggacattacagctctattgggccaacaaaatctctcgcttcgtatcccattagattctctctttctctctctctctctctcttccttcagagatgttcattgttcgtattattacggcatctctggctctgaccctctcgctgcaacatctgtccctattcagacagctatacctctattttcattctacacctaatactttatatttcttcaaaaatccaccctgatcaacttcctatcactatctaagtcattctcattatctttgtgttgttgctctcaagtctcgcccatggaactaacgattctctcagcctctaatcagtattggaccctagtcttaaagattatagtagttaccaagttaggacttaggacttaggatatagacttctgtcaaacaagaaagtgaatgctaagtttagaagcatttgaaagaaaaagtactaatccataaatatctacaagttgtttccaggaaaagaaaaaactcagtggggaaaacgagcacttatggtgtttacaaaatgaaaataaaaaagaagaaaaagttgtgtttgttattttttgggacccttatttctttaatagttgcatagcctctggacgaccagagtccacgaatgtataatcagataccaaaaaagtatgaaagaaatatataaagaaaaggaagaagaaacaatcatggcttggcttacttaaaaagtaaagtagctaatactcttaatcaaaactcacataataaacattagttatgtgtttataatgataagttaatgacctattcatcagaaaaacaagttgtgatatatatacttaatcaaaattcaccacgatctactaatctgctaaatttttattgtttacttgcaaaataaactatataactcaacacttccgaatttaaatttaaatttaagatgactttatgtcaagaagctagtagcatctttgattctttgtacttttcaacttaagtaaagaaaatagaaatgtgattatatggaggatattgatttaatcaatgtgtaattaagagacagagagtgataaggattgggattaagattaggtttaggattgggagaaagatgaagagagaggggtttaggtcgaccaactggttgttaaagatagaaactccttaaccatacatttatataacattttcacaataattttcttctctttaccaaagacttgactccaggaatcaataagcaagaagcaggaggttcaagcaccaaccagattatggctttctgaagcaatatcttcagaaaacaaaataaagtttttatttgattttcttattaccatattatatactattaaataagaaattcaaagttttttttttccattctttctttcttccggaggagggagagtatgatatgggtctttcacgtgtgacattgatgagatgatgaattcaaattatatctcataccaaaaaaaaaacacaaccaagagaaagaggcgtaaccttctgatttctttcttttaagatatcaataaaatctttcacattttctaatttttaattcttttcaagattttgttgtctccttcaacaatccatcagaagtagcagtttggtttccaggtaatttactaatctttttatttctatacaattcttcttttttttttgttgtctatggatttggcttgcatctccataattgcatgcataaccatatattcaagacatgttgaaatcttacatgtttcttagcaatacactgattatatggatcctgctctgtttcaattgtttttgaatctgtctttaatgtcaagcatttcctccataaggttaagttcttacgacctgatcagaaaacaagggactatggaactcaagtgagccaaaaagaacactccatttcgatggagaattatccagaaacacagtttattcccggagattcaatgatccagaatgctatagtttcttactctgaggaatcagccggtagagaaagaagaactgaagctaacaatgtctcagcctcacaagagaggcaagcattgtccagatttgggggagttccacaaatgcagaacattggtcaagatttcggttcttggagagatcaagcgagtgacaggaacggtttccagctaatg

SEQ ID NO: 6839 - DNA, 3000 bp, Unknown; identical to SEQ ID NO: 6833
  misc_feature (1)..( 3000): cDNA_ID_1815694_gDNA_ID_1621108_Annot_ID_171682 3000 nt of promoter + ATG

SEQ ID NO: 6840 - DNA, 3000 bp, Unknown
  misc_feature (1)..( 3000): cDNA_ID_3049060_gDNA_ID_1621108_Annot_ID_171675 3000 nt of promoter + ATG
gctccacaagagccggaatccagaaccagcattgatgataaacatccggttcaaagtctacaagataaaccggtaatcaacaacttacgcgcttataagaaaacatatttattctaattagctacatatatacctcagggtaattttcattgtcaatcttgcaaagcctttgaagaagctctcttgcagatttgctgaagttcttaagaccctaatcactcagaaaacacgcacagttttgaatttacccacttttgaactgaaagagatcataaagaaatgaatttattaaatacgtaccacgccttgcacgtcaagaattgttgtgctctgatcaatgtgtttatttgctgctacagaacaagaagggaacttgaccttgaaagtcttctcgaactctttgacatgatatttcacgtaccggtccattgttgtcacttggagtagcttgttagcatcgatttgacctagtctctcaatgtaaactggtctgccttccttgtcaactccatgatagccttgagggtagtgcttcatcacttcatcaatttcttcgaaatcaaaatcctacatcacatttagaaacatacattatagaactttttaaacccacaagagatgcaaagttggatccaattaaatgctccgagattttaggaaaaagattcacctcaatgattgtgtcagcgccgaaatctttcctccattggatcatgtcactccacatttgcttagctttctcaatgtcaaactttcttgctctcaaaaatctgtttatgttcatcaatacgaaaatataaatcttcttgatgaaattcaatattatttgatataccaagtttttttctttttgaacagactaaggtttttcttttcattttcttcatagttaattttataaaatgttcaaattgtattaaatgatgttaggaaataaagtgttgacaaatctttcttcgcttcgattattttctttccataaatccttttggtctgaatttaaaaataagatttgatttttaaaatatttgaaaaagtttatgtatgcatatatctgtatatgagattaatcagaaaaatatgaaatatttaactttatcgctgaaaacttcttatctttaaaataatacatatggcagtttatttgttgaatatggtcagatatctataatctttgacctaattttctctcgggttatagtctagtccaaactaacaaatcaggtttcaaaatttttaatcttattgacttataagaatactacggtctcgaaataactttgtgaataaggtaagaaaataaagagattgaatagggaaaataatttttttaccgaagcatcatgtggagatcatcgagtttggatggcaaaagctcgtcaaggataagagcttgacgaaaagcatcaagagcttgaagatcttctgcgtcaatgtcgtcctcaatcggaacggacatgactctgctgctgcttctccgaccttttttcttgaaggagttcttgaatctgttggatgcatttatcgctttcttcttcagcgagcttatcttcactatcttcctctcttcctccgacatctctatttctgattaacaatttgtaatttgcattagacttaagaaatatctctgtgaataaaggcaggaaatgtatgaaaatactaaccaggtttggtctcagccatggttagatgagttttaagcactctgtttcacacggcgataatacctaccaagacaacattgtaaagatcacttaagaaaagcttagatcgaaatcgcatgagaaatgattagatgaatctaaagaatcaagatgagttaaatgaccaaaatgtgttttaggatccaaagatgagaaagctagagagaatttgagagagtttatttttttatttttacctctattggagaagattgtttggggagaggtaagggaggctgaagataatggagaggctcatttgaagcaaggtgaaaacatgtagacaactatttagttctgattctaacaatctatatattgacagggtcctcctactgttttccataatatagaaatactttttagaaaaaatccaattaatcctattaaataaatacatagagttagttttaaactaatgaacaacgaatcgtttctaagtaaataaattaaatatgagagaaatatgtctttgtattaggagaagtgcatcccactacttccaacattttgtcgatgataaaaaaacatttgatgtcaacccaagtatctcatgatattgtttttttttgtatgattgtatcgtaacattatctacaaaatttaaactttttacacatacagtgaatttagtttatagtaaacaatggaaaaaccaaataaatattatcattacagtctattaacaattaataaccaagaatcttaaggtttaatttcccttcaaactaattgtaaatgatatatcctgaaatacatcaccacatggtgatattccccatagacggtgctaagatacataagttgtttcttttgttcacatattatatatcattcacaattatacaataggttactacaggaattataacattgtacaagaagccaaaaattcgatctaataataagtgatacacatgacaaactatttcaatattaactattctttataattaactttggaatcgtttctaaaagggcctattttcggtccagttgaggcccaatataataatgggtcgatgctgatttttcttcttcttcttcttcatttaaacgactcagtgtgactcagtcgccgtcgtctcccgccgtttataccctctccgaagccccgagcggccaagacgctacgtttgatttcgtctcaaggttagggttttggaatctcagttttttttttgtaaaaaaacaatatgaatgctgaatttgtttctgtcgattttgcctctgtttgcaatcatgaatgcgtagattcactctgaatggggattgaatttggtgaactccaatg

SEQ ID NO: 6841 - DNA, 3000 bp, Unknown; identical to SEQ ID NO: 6831
  misc_feature (1)..( 3000): cDNA_ID_1807445_gDNA_ID_1621108_Annot_ID_171668 3000 nt of promoter + ATG

SEQ ID NO: 6842 - DNA, 3000 bp, Unknown; identical to SEQ ID NO: 6829
  misc_feature (1)..( 3000): cDNA_ID_1808243_gDNA_ID_1621108_Annot_ID_171663 3000 nt of promoter + ATG

SEQ ID NO: 6843 - DNA, 3000 bp, Unknown; identical to SEQ ID NO: 6828
  misc_feature (1)..( 3000): cDNA_ID_1809097_gDNA_ID_1621108_Annot_ID_171662 3000 nt of promoter + ATG

SEQ ID NO: 6844 - DNA, 3 bp, Unknown
  misc_feature (1)..( 3): cDNA_ID_3093183_gDNA_ID_1621108_Annot_ID_171656 3000 nt of promoter + ATG
tct

SEQ ID NO: 6845 - DNA, 3000 bp, Unknown
  misc_feature (1)..( 3000): cDNA_ID_1815690_gDNA_ID_1621108_Annot_ID_56030 3000 nt of promoter + ATG
tatttgcataaggctacaatccttaattcatttgcttctctcagtcatgtttggttgtttctacacctaatgcatttcatctggtgcaagttttctgtgaggcttggttttgcttgtatgattgatttgattagactggtttaaaagtctaaatccacacagttcttggtgtctaactaaacttcttttttattttgtgcaactgttgaaagaaattgattttcactctatggtactcgaataatgcaggtactggttatctgttggagctcaaccaacagacacagtggaaagcatgcttttcagggccggtttgataccaccaaagcctatggtagtggtcggttcgaaaaatgggcagaagtctacgagccaacatgtttcacccattacaggtgaaatcttgaactaagagtgttgatgcgttgagcaagaaagagccttttgtgtctgtgtgaaaggagtttatgtaatgttgtttaagacttttctgtttatgtgaaaggagttaatgtaatgttgtttaagacttttgctttctatgtgaaagcagtttaatgttatgttggttaagacttttctgcaacagagtttggtgaatttttattctttaatatgagcatgcctttttacatttaacaattctcactttagactaaataggctttggtaagaggcccatattttcaaaaataagattcattctcaatatctggattgtatgctaaaaaaaggaattaggcccatatttgctcaaaaaaaaaaaaaaaaaaagttatctgcctgaatatgatcttggacattagaacctcgttcttaccttttatgtatatctttacttctacatggtagtagttatataatctcgttgatcttgaaattagttcttattctcatataggtctgaaactcttatattgcttctcttcaaaattttgttccgtctttttggtttcaatatctgccaaaatgtatttgtatcgtctatatgtgttaaaaacacatgcaagagactagtaactagacaataatctatttcaaactaaattggtcttctaataaaaatgttatagttatggaaaaaaggatgtgtctttgggacattacagctctattgggccaacaaaatctctcgcttcgtatcccattagattctctctttctctctctctctctctcttccttcagagatgttcattgttcgtattattacggcatctctggctctgaccctctcgctgcaacatctgtccctattcagacagctatacctctattttcattctacacctaatactttatatttcttcaaaaatccaccctgatcaacttcctatcactatctaagtcattctcattatctttgtgttgttgctctcaagtctcgcccatggaactaacgattctctcagcctctaatcagtattggaccctagtcttaaagattatagtagttaccaagttaggacttaggacttaggatatagacttctgtcaaacaagaaagtgaatgctaagtttagaagcatttgaaagaaaaagtactaatccataaatatctacaagttgtttccaggaaaagaaaaaactcagtggggaaaacgagcacttatggtgtttacaaaatgaaaataaaaaagaagaaaaagttgtgtttgttattttttgggacccttatttctttaatagttgcatagcctctggacgaccagagtccacgaatgtataatcagataccaaaaaagtatgaaagaaatatataaagaaaaggaagaagaaacaatcatggcttggcttacttaaaaagtaaagtagctaatactcttaatcaaaactcacataataaacattagttatgtgtttataatgataagttaatgacctattcatcagaaaaacaagttgtgatatatatacttaatcaaaattcaccacgatctactaatctgctaaatttttattgtttacttgcaaaataaactatataactcaacacttccgaatttaaatttaaatttaagatgactttatgtcaagaagctagtagcatctttgattctttgtacttttcaacttaagtaaagaaaatagaaatgtgattatatggaggatattgatttaatcaatgtgtaattaagagacagagagtgataaggattgggattaagattaggtttaggattgggagaaagatgaagagagaggggtttaggtcgaccaactggttgttaaagatagaaactccttaaccatacatttatataacattttcacaataattttcttctctttaccaaagacttgactccaggaatcaataagcaagaagcaggaggttcaagcaccaaccagattatggctttctgaagcaatatcttcagaaaacaaaataaagtttttatttgattttcttattaccatattatatactattaaataagaaattcaaagttttttttttccattctttctttcttccggaggagggagagtatgatatgggtctttcacgtgtgacattgatgagatgatgaattcaaattatatctcataccaaaaaaaaaacacaaccaagagaaagaggcgtaaccttctgatttctttcttttaagatatcaataaaatctttcacattttctaatttttaattcttttcaagattttgttgtctccttcaacaatccatcagaagtagcagtttggtttccaggtaatttactaatctttttatttctatacaattcttcttttttttttgttgtctatggatttggcttgcatctccataattgcatgcataaccatatattcaagacatgttgaaatcttacatgtttcttagcaatacactgattatatggatcctgctctgtttcaattgtttttgaatctgtctttaatgtcaagcatttcctccataaggttaagttcttacgacctgatcagaaaacaagggactatggaactcaagtgagccaaaaagaacactccatttcgatg

SEQ ID NO: 6846 - DNA, 3000 bp, Unknown; identical to SEQ ID NO: 6837
  misc_feature (1)..( 3000): cDNA_ID_2999318_gDNA_ID_1621108_Annot_ID_56031 3000 nt of promoter + ATG

SEQ ID NO: 6847 - DNA, 3000 bp, Unknown
  misc_feature (1)..( 3000): cDNA_ID_1815686_gDNA_ID_1621108_Annot_ID_56035 3000 nt of promoter + ATG
agaaaagtttgaaaagggagcaggctggtgaggagtgacgagagcgtaatgggggaaaagagaacgtgtcacattttcctcttattcgtcgattcacgacgcatcatcatcatcactctttcccttttcttatcttttataaaacatggagtagtttttatcatttttgacgtcaagaaaatgggagagagtttcaagtcctgtaatcaatgcaagtggtttttgagttaatgattcttgtattcgcaatatctctaggcaaaaaaatgtagaataatatctaacctattataaagttttacctaataaaacattaaaaacttcaatagatttacctaaaatccaatctatcattgtgatgcaaatgtattgttcgaatcaatgacatcaaatcgcatattagaaatttagttgctatattatcactaagtaaaataaatgaggaaaaaaaagatatgtatccaaatgattttttctttcacataaaaataagacaaaacgaaaacgagagacgaaaaaaaaagttaacacagaacataatcattgcgttttaacaaaagcataatccatttgaatacgtaatcattcatcacggaccatagtcagaataaaatgtaacaaaatctcaatgtcttaccaggacctaataagtaacaactgatcattattcgaatcaacaaattatataactcaaattatacaaaaagaattgtgtaagagatgcggaaattgctagtttgtcgaataattgaagaggtaaatcggggtagtgcaaattattttattttatttcgattacttcttctcaaaagttttaacctttttacagtttgactttgatgtaaatcctaatcttgtccatttaaatatttgaagagagagcaaatccagattccaaaaatgaaaagaagaagtgaagaactaagacatataataaaaaaggtaaaacatgataaacaataaagatcatccatcaaaaacgagtccaaaaccagtcacaccaatggcgacataacattaggttcttttttttttttgccagcgaaaaaacaaacaaatctataatcccctaagctccgatgatttctgttggctcctcaaccattgtctcatcagctggcctgtctaccttcacaccaacatcctctgctgtgtaatctccatgcacctaaagataaaccaaaacaaaaagagttagatttcattacatccttggaaccaagactagtgcatcaatgatgaaattaatgtgacttcaatctacctccatgagctttccaaggtcaaacttgggagcctttaggatcttcactttacggatgaacacattctgcaacgggtagatgccctgtgttgccttctcaatctctcttccaatggcctctgggatgaacttggccactagctccttgaggtcacaagatgaagcctccttcaccataatctcactcatctttctgcggatctacaagaatcaagaaacatttacaaggaaaatgttaatcttctgtttacagaaagccaaatagtaagcacatggtatgataatgttgtaacctgacggatttggctggattgagcgtaacaggtacgcttcacttggttagcacgtctctttgtgaaggcgatgcagaacatcctcaaggtgtagccgtctgtggttttcacatcgacatgggcttcaatcaaagtctgccacttcttcaccaatgaccttagcttgtcggttgtgaaatccataccctacagagatcacagattaaaaaccgcactctgtatcaatatgccagtaaaggagtggtctttatcttacccagaactgggtcaacacattccttccctgaacatcttcagctctaagacggatcttcctgtaggcattatcctcatcattttgtagatcagcaagagaaacctcaaacaccctgtgtttcagtccctcagaggcaatctgtttaaattaagagatagcccagataacaaagtcagatttgtcgaagaggaacacgctcttttctatcacaaatgcaattcctattacttcaataatgaaagccaccaagagcaaatgcccatctctacacctcacattcagcaaatgacctatgccatgagataactatagactcaaaacctagaaagctctaacctttctccagtatagtaatagaaagacataagacattaccttggtaccctgagtcctggaaacaagagtcttcccaacattcctgttcgtgaaagaaccaggagccttcacgtcataccaatccttcttggagaagggatcaacactgcaccatccataacaattcaatcacgaacactatatacagattacaattagaaatctgagaattttattcaggacataggttacttacgccttcttctttcctcctttcctaccctttgaaatcctcttgttcttcctatatgatcaaacaaaaaccttaaatcagaacatgatatactcgaagctatgatcaaatgagagattccaatacagagactggagaaacaagcaaggaatatagagatgcgaagagagatttacccgacagccatggttaagggtcttctagatggtgtagcgacgacgagctacagtgaggaagaagaagaagcggcttcaacaagtgagagaaagccctaattcactggcttttcatttatatatgtctagggttttgcgtctttttagttattttgagatgatataaatttatagcttactggattttattttcaagcccaatgggctattatagagagcccaatattaaccttcttggtgaaacagagactttgtctatctttgatttcttcgtgttcgaaagcagagaaatttgttctgagctcaacgccatttttgacgatttcgaatctctgtcttctctgagttgttccaagtaatcggagggaactcgtaaagtggaagaataggagaaagagagaaggaagaagatttgtgaatagctcttgatctggtgaagaatg

SEQ ID NO: 6848 - DNA, 3000 bp, Unknown; identical to SEQ ID NO: 6836
  misc_feature (1)..( 3000): cDNA_ID_1809022_gDNA_ID_1621108_Annot_ID_56036 3000 nt of promoter + ATG

SEQ ID NO: 6849 - DNA, 3000 bp, Unknown; identical to SEQ ID NO: 6835
  misc_feature (1)..( 3000): cDNA_ID_1815684_gDNA_ID_1621108_Annot_ID_56037 3000 nt of promoter + ATG

SEQ ID NO: 6850 - DNA, 3000 bp, Unknown
  misc_feature (1)..( 3000): cDNA_ID_1815803_gDNA_ID_1621109_Annot_ID_56049 3000 nt of promoter + ATG
ttgaacttttatcggaacatctcttactatctcattgacaaaaggttcagtagtctcgacctgagcagtggcaagattggcgttatgtaaagtatctctttcttgatgatttgaatgattgaggaagctttgttgacccgtaaacttatccgtttgttggattctcatgatatcatctggacgagaagcatagaaagctgagctcacatatggcacatacattgtagaaccatcatttccctcccgcataatcggatcagaatgcatatgaggaaaagatgtctggcacatatgacaatcatttaccctttgaaaactttcagccatagttacttgttgatagaaacttccatcggggagaacaacatggttagatggtggaacttgagacccgccataaccatcaaatggtataccaggagaaatcgtaccttgatatgcagtgtttcttggctctgtaggaagcggtactaacttttgagcagcatgatagttccccaacagattttcttgggtttgcattaccgggttaatcaaaactggtgtggaactaatctgagaattcaagggagccattgacatgtgagcagcaggaaggaactggtgggatgagacacttaaaggactatcttgaaaaggttgttgggagaacaaagaagtactacttggcaaaagctggataggtgaatgaacaatatctggttgtcttaaagcttcttggcgagattcaacataggccggtggatgatgttcagatggtgtagtatacccctgttgttgctgctgcatcttaccaactattggtttctctgaaacagtctcaagctgaaaagaatgaggcggatcggcgtggacagtcattggcacaacataagcagaagagcgtggatcaggaggaacaagtcttgatacattactatgataagtctgaggtgaaaaattactcgaggtccaagtagttgcgacaaaatcactctgaccaacgcccaagctatcaacaacatccacgccactaaaatcagaattcggattagaactaccactagctacactttccttactcacaacaacaccattcacagcctctacatatctctgcccaatatcaactccatcaccatactccaatattccgaaagaatcatccacctcagacgaagaagcatcaaacaaaaaaactctcaacttccctgacccatcagaagatctctctaccaacttctcaaactcctccatcatattatcaatatcttcactagatgaaacagaaaccaaagcatcaagatcctcatcaggaagctgatacttaacaacaacagggtgaccataaacctgaatcatcttttgctcaaattcatcaaatctcacattctttttaacactaacgatccttgtttgaccaccaacgtaacgtaacatgccatcacttggtctagggattatctttccattgtagctacataaaaacttcaccttttccaattcttcatcatccatatcacttcttttattgcctaaatttggattgtttctattcgtagcatcaatacttacctgctcactcccaaacccagaaataattccatcagagacacgcttattactcaaatcagagctataatctaacccagaagctgaaagattggccggattagaaacaagattcgaacttgggctactgggttcatgtgccattgtttggagcagggagagggatagggtttatgattactcacctggtcagtatcgtggtcgtcgtattcgaggaagaaacgaagaatcctattttgtagagagaagaagaaaggagaggcaaagcgagtcgttggaactgatacaacgacgacgtttcattgggagtatcaaaacctcaatttggattttctctgtagtctttttagaatttttctaaaagggaaacacgtgagagatgggaagaggcacgtggtcgagcctcatgcaaaagaatggttgcgtttgttttccaaactgcgagagaatcgtgtgtgtaaatgctcccagttccaacactcgacatgttttttttgttttaggttattactgattattcttgaacttttagcaaaataatgaaacaattttgacttttataacacacaaaaaaagcaatacaatttcaaataataaatcgattaagagataaaaattgtgataatttggatattttaattagtttgtgcaatattcttttctcgttgatctctataaattagagaggcaaatgcgactgctaggagtagaaccttaccattggactacaaacgcttttgtgtttaagttgactattaaatttagatatctgattgtttaggatagtttaaaacgctaccgttttggaatctttatacgctaccgtgttattcttctttgaccaaaattctggagaatttgtcttcccttcgtatttctggcaacttttttaatactaaaattctctctaaagccgtcaaagaccaaaaaaaaaaaaaaaatacgaactcgaaatctctctcgtcttgttgttgcttaccattgaagctatcaatttctccgtttgatttctctcttctcaaaacctatttcgacggattattccgattcctgtttccccgaccttcacgcttcgtacttttgttttttgaaaaattcgtgtttcaggtacgttctcgatttctatttcgtttttttctgattcatcaatgaaacaaaatcgtttcttaatatacttgttgttctttgattcgattgatttttgttaggaagagcgcatgtgtagagttggtggtgtaattcagaaaactttccggagattttttggtgatgtgttgttcgtaggtaaattttgaaattttggatttaatggttgaggaagatagatggtgtttcttcaatggatctgtgaagacgagattgttggagattgatacttatcttattcgtctttatggctttgcttgattaagaaattgtgtgattgttttggggaggggtttaaacatg

SEQ ID NO: 6851 - DNA, 3000 bp, Unknown
  misc_feature (1)..( 3000): cDNA_ID_1815799_gDNA_ID_1621109_Annot_ID_56050 3000 nt of promoter + ATG
aaatgttccaacactttgacaatctgccagaattccggtctcttgtctgtttgcgatgaccaacatcgctcgatcagctctttcatggccgctggacaatccgtcggtataactggcctaattttctggccaatatcgaaacaatgaaatgtttaataacaactgaacaataatgatctaactcagtcagatctatgcaagatcacaatcatgaaataaggaggagatgcagaatgatttaccttgtatataactagatcacaatcatgaaataaggaggagatgcagaatgatttaccttgtatataactgcgtaggcaatttgttcagcaaatttcatctcctcatatggaagtgctccagctaccatttcccataaaagaagtccaaaactataaacatcgcacttccgtccatgtggtatccgttttaaaacttcaggtgccatccacctataagttcctatgttatcccccaaaacatcacagtactcctcctcgcacgctatgccaaagtcagcaatcttcaagtgaaagtcattgtcgatcaacacgttttctggcttcagatcctgatgaactatctctcttgagtgaatatattccattcctttagcaatatccagaccaaaatcgattagctgttccaaaggaagggatttctgctcgagcttgtgcagatatgatcttaaagaccctcgaggtacatactctgtgatgatacagtttccagtattcactccaacaaactgtttcaggacacatcaatcagaggaaaaaagtcaaacaaaccataatcataattttcaaacagagttgaaagatgtaatgttaattttcaaaggcatcattcatatttgatacaacctaaccaacataatataacatgatataaactcaccttaacgacatttggatggcttagtcgagataaaagagtggcttccacgataaactctttttctaaacgagctcccaagaatatgtcgtcactatcctcaggcgctgtgataatcttcagagcaacagctttgccttcatattcaccatgataaatctggctatatttcccgtgagcaaacctatccccataagacaacttagacacatcaatgaggcattcttcaagcactcctgcagaacttactttagaacctctatagtcaacagactttgaagacttcttatctatcttgctctttcccctctctttaactttctgcgtactaagatccctaataggacccgagtgagacagggaccgtagattaactgattttttctcagaagaatctttgcgggacgacgacttggccttcattcccttctctggttccactcttctaggatgtggagtagaaaacctcttaatatcagactttgcttcgataaaagcatcagaaagagccatatgaggcaacggagaaacagatctcttcttattagtaactggattcctctgcacttcagtaccaacaacactaccacaactcaaaccagtcagctgctgcgtactctgacaaattcctacaagtgatttcaaatcagatggtgaactcaaagtcattcttttcaatccagaactcttctcttggtttacagtaaaaggcatagattctaaactcggcgtaatcatacgataacaaacagtatgagagaaatttgctctcctaatccaagaagtaacctctccatccatgtttaaacccctccccaaaacaatcacacaatttcttaatcaagcaaagccataaagacgaataagataagtatcaatctccaacaatctcgtcttcacagatccattgaagaaacaccatctatcttcctcaaccattaaatccaaaatttcaaaatttacctacgaacaacacatcaccaaaaaatctccggaaagttttctgaattacaccaccaactctacacatgcgctcttcctaacaaaaatcaatcgaatcaaagaacaacaagtatattaagaaacgattttgtttcattgatgaatcagaaaaaaacgaaatagaaatcgagaacgtacctgaaacacgaatttttcaaaaaacaaaagtacgaagcgtgaaggtcggggaaacaggaatcggaataatccgtcgaaataggttttgagaagagagaaatcaaacggagaaattgatagcttcaatggtaagcaacaacaagacgagagagatttcgagttcgtattttttttttttttttggtctttgacggctttagagagaattttagtattaaaaaagttgccagaaatacgaagggaagacaaattctccagaattttggtcaaagaagaataacacggtagcgtataaagattccaaaacggtagcgttttaaactatcctaaacaatcagatatctaaatttaatagtcaacttaaacacaaaagcgtttgtagtccaatggtaaggttctactcctagcagtcgcatttgcctctctaatttatagagatcaacgagaaaagaatattgcacaaactaattaaaatatccaaattatcacaatttttatctcttaatcgatttattatttgaaattgtattgctttttttgtgtgttataaaagtcaaaattgtttcattattttgctaaaagttcaagaataatcagtaataacctaaaacaaaaaaaacatgtcgagtgttggaactgggagcatttacacacacgattctctcgcagtttggaaaacaaacgcaaccattcttttgcatgaggctcgaccacgtgcctcttcccatctctcacgtgtttcccttttagaaaaattctaaaaagactacagagaaaatccaaattgaggttttgatactcccaatgaaacgtcgtcgttgtatcagttccaacgactcgctttgcctctcctttcttcttctctctacaaaataggattcttcgtttcttcctcgaatacgacgaccacgatactgaccaggtgagtaatcataaaccctatccctctccctgctccaaaca

SEQ ID NO: 6852 - DNA, 3000 bp, Unknown
  misc_feature (1)..( 3000): cDNA_ID_1815780_gDNA_ID_1621109_Annot_ID_56057 3000 nt of promoter + ATG
ttgataccggaacttcaatgtcttgtccgcatgttgctggtgtagctgcctacttaaaatcgtttcacccacgctggtctccctccatgatccaatcagccatcatgactaccggtatgcaaaatcatatccactctgttttctgaatattctcatcattttttttactcacaacataactttcttgtattgcaagaaaacttataatactctgttttttggtgttttttgtagcttggccaatgaatgcatctacttctccatttaacgagttggccgagtttgcttacggagctggccatgtcgatcccataactgcaattcatcctggactagtctatgaagctaataaatccgaccacatcgcctttctctgcggcttgaactacactgcaaagaacttaagactcatctccggtgatagcagcagttgcacaaaagaacagactaaatcgctaccccgaaacttaaactatccttcgatgactgctcaagtatcggcggcaaaaccattcaaagtgattttccgtagaacagtcactaacgtcggtaggcctaacgctacatacaaagcaaaggtagtcggttctaaactcaaagtcaaggttgttccggcagtcttgtctttaaagtcattgtacgagaagaagtccttcacggtaacagcttccggcgccggtcccaaagctgaaaatcttgtctccgcacagctgatctggtctgatggtgtccactttgtgagaagccccattgttgtttatgctacgaactgatgagtctgaaccagttaatgtttctatctgttcatgctatatgtttgttgttgtttttattttttcctccatcactttagttctaaacatcaaatctagttatttttgctgttcttgtagaaaaccttgttgttttaaatttcgaaatggtcatgagagttttgatttaatttggagaatgatcgatgtacttgttttcttaaataaaagatattgattagaatcacattctactcttaaaattaggtatatgtaacgctaattaaggttttgagttttgtagcatatctattgttttttataccactttagatcagaaccttacaagagttgaaatacaaagggtaaatacatatgttggcaaggaaaacaatccttccaagaactaagccggcgagcacaagacatctcccggggactaagacagatctaatggggaaaaaacccaaattaaagaacaacaatgatactaaacctaaactttcaagattcattactaaaaaaactcaaaactgaaaagcaaagtctaaatccaaattttttaaattaaaacagatctgaaactatagatctatccaaaggaaataaaaccaagactctccttaccataaacggcgctgagacatcaatcaacatcccgggacccaaaagacaaagtctcaagaagaaaggaaggagatctagatcttcaatggagagagatctgcatctgaggcgttgaaggatagaaaaaaacctgcctctgccatagttggaacggccagaattgaaactgcagacgaaggagacaaacaagcaacaaaaccggaagaggaaaagatttagactttacagatttagatctgagaatttagaaaagaaaccgttagaagaaaataggattcagatcacattaaacccacaagaaatcgaaactagagacactaaaacaaagaaatccggttccggtgctgaaaaagccaccggaaccggtaaccctaggcggcggcggagctttgtagagagaaaaaaaaaatttgttttaagagagagaaggagttgtcgtcagtatgttttcatttctattgcagtcaaaaaaaataaaaaaaaattcatttctattcatccatataaataaaaaccggtggtgttggtttaggtgatctatagttttattaatcaatgtgaacatatattttaattatttcatgaaaataaaaatgaatacaaattctaccttatggagtctgaaacatacgttggacccatagtagaattcgttttctaccttacacattccactagatcaaccggtactaagaatcttccaaacatggccattggaatctaaagcgacaacgaccttgttgcagaaaaagtcgtcaatctaagtacaatcgctaatacattttgactttttcttttgatggtcattttcgcaatttcttcattttcccaaccagttctggccacctacacttatttcttggaaaattatttgtttttcaatcggtatgtatatagaagctaatataatatcatcaaaaatgaaacgacattaaaaattgttataggagttatttgatacagttcttagttactttgctctgtagaaagtatagatacatcgcctgtaaaatcaactaaaacaaatataatcgcgtggagaatatttcgttcatgtaaggtcaaatgataaacctctgccataattaaccaaatttcagaatatacattcccatagtttttcaattgcccaagtaatactcatttctctagtcataataaagttaaactataaataaatccatttctggtgaagttagtcgattttagtggtttattaagaagaataaaccgtttttaatttatttataaacgagaattaatatcaagtcaaagaaggttatttatttatcaagttttttctttgtcaacgataataaatatcaagtcaaaagaggttctttctatttaatgttttttttgtaaatattttaatatgtttgctgtattcatgaacaacaatacaacaaaaaaagataatgcaaatattagcaggaaagaaaaacggtagtaaattaaatggtatattcaaaaccattaatataactagaggaacaaatcttaaaggactttgatgcgtttttagatcatgtacataatcttaaaggactataaataatcgtttcatcctcattcttataaaatttgataataactaaataaagtaaaccaataaaaaatg

SEQ ID NO: 6853 - DNA, 3000 bp, Unknown
  misc_feature (1)..( 3000): cDNA_ID_1017117_gDNA_ID_1621109_Annot_ID_56059 3000 nt of promoter + ATG
atatacaaataatcacattaacactaaacaataaaattgaataaattcagtgcacctctctccggtgacatcttgaagaatactagtgtgatgggacataggcatgtagtcaacacgagcaggaagtgcacccatgtatactatatactcctacaagtatcatcatcatagttatggttagtcattagtaatataattagaaccatgatatgattataataatcaaataacgaagaaggatttgtgcaattacctgtttgtcttgatcatctttgtctgctgaagcgaaactcacaacaagcaaggcaaagatacatgagaggagacaataggagacagcaggttttgtcatttttttgattgatttggttataatcaaattttacaagattgtgagaatgaaaggattattatagggagagatactgtatgtacatagaacgtaatcaaagtcctcatcaaactcctttaagatttgtttctcaaattattcttatatattaatgacagtataatgtactttccatattaataggtttttgaatgcaccgtttaatttgctaccgtttcttgttctactaatccttgcatcatcttttatttttcttttacttgtattgtttgttcatgaatatagagaaaaatattaaatagaaagaattttctttgacttgatatttattctcttgacaaaagaaaagattgactaaccactagaagttaattttttttttattatgactagaaatgagtataatttgggcaattcagaatgatgggaagtaaggaatgtatattctgaattcggtttattaattatggcagcctaatcatgggtaagaggttcatcatttgaccttacatgaacgaacgaaatattctccacgcgaatattttttcttaaaagtacttttgcaggcgatgtatctaattaattaacctttctagagaggtaacaaaaaatgtaccaaagaaattaagaactgtatcaaatattatccttaaaatatgaccacttgtgaaaactctatgtgcatattcacatttatagatttaatttagatattgtgactaaatgtactcttaatagttagggtgaattatccaatagaaagcaaatatagtatacaaatagatgtatgcaattgtatgtatcggctcctctttcgtccacgcgattgccttcttttgtgctgtattcgtttaaaatcaatagcaacgtacaattgcgtcaagactaatcagcaagaattgcgtcaggattattcataacctaaagtaataaatgtttaaataggtcaaatatatactttttgaaaatacgttacgggagtacataacaccatatattctagcgcatgtaatttctgagtcgaaaagttggagagttgcccaagaactagaacatgacattgatgcggaggaagaacctgaagtagttgaagcttgtgagtatgcgcacgttcaaagaggagaagctatgtgccaaattgacgcttcgtggactggtattaaccagaatgttagtttggggttcatgttgactagctcaacgaccaagctgtttggtcaaagtagccagaattgttatcgcaatgccctctacgcagaactcggagctcttctttggacaatggagtgcactttacaacaaagtatccaatctatacattttgaaaccgattgcttaagcttacttaagatccttgatgaaagtaaagattggccggtggaaaagattttgctagatttaaagctagttttggtcggttttctttatctcatattccacgcactatgaatgtccgtgttgtctgcctcgcaaagagtgcaagagtacgaggtgtacttttttcccatataaaccctctcgtttcggagtagttggcccacgaaactaactttttcgaacaaatttaattatttgatgtttttgcgataaaaaaaaacaaaaaaaaaacttggtttattagagggcacaaaatcaaatttataacaaaatgaagttattacgttaggttgaaaaaaagtatgacgtttcagggattaataatttagcgttaatgacttaatggtcctcatcttcatcagattagaatgtaacattctatatgtgtcgcaccaaaagactagtctcgtcctctatagctattagcctattaccatcgcaatctccgacgtattttccactagacttgtagcatgttgccttctaaagccgccacatgatccactaccatcttcatttgcccatcggccatcgccaccagaaccaccacattgtttaattatattatatggatcagaactatattcttacaaatattatgggaagttgggaatgtagtggtcaattcatcacatcctcatttcattattttcttcttctattaaagttgttaattcgacattttcaaattgacgttgcttattatcattaccacactcacaaatacaatcattgctctttaacgcaattataaagctcaaaactacatttccaataataccccttggaacatgctcttactttttgccagcctgctaacgaatcattagttgccacatcagcacgataactgaagtctttgtctttttctcaaacgcgacgtcgtttctattccctgacacagagatacgtatagatacaccgtatattcactttattgctcctctcctctttctcacgaagaagaagacgaagcccatcaaattaaacaagaaaaattccattttcctccattgattgtgagtgagaacaaacatttaaagcttcttactcaaagtttctttctttatagatctcaaaaaattcgatatttttctcgattcatccgccattaaggtacacgaatcgtttttcgtcttctgaattacttgtgggttcgtcttaatttcgttggatctgggtttgattttggagaaaagtaataaagtttctgtcttttttttctttcgaatttgtaggttttattgcgagatcgaagagagaaggagaaa

SEQ ID NO: 6854 - DNA, 3000 bp, Unknown
  misc_feature (1)..( 3000): cDNA_ID_1019253_gDNA_ID_1621109_Annot_ID_56060 3000 nt of promoter + ATG
atgatggctgggaacaaatccgatctgaaccacttgagatccgttgctgaggaagatggtcaaagtttggctgagaaggaaggtctctctttcctggagacatctgctcttgaagcaacaaacgtcgagaaagcgtttcagaccatcttaggtgagatctaccatatcataagcaaaaaggcactggctgcacaagaagcagcagcagctaattctgcaatccctgggcaaggaactacgattaacgtcgatgacacatctggaggcgcgaaacgagcatgttgctcttcttaaactaaaggtaaactgtttatttcggttgctccttgttcagagattcaaacttttgttttcactggcttctcttcttttcaagttttggctgatgaaacgtaactatgcaagactatgtagaatactctgtttttattctcttcggtttggggtttgtgttcagtttaaagcttgttagtagtatacttagaatcttctggtgcttgcttgctttcccttcttcttcccttggtgtgtttctattgatttctggtttataaagtattttttctatctccggtttagtccggttcgtcttggctttgtttaatcaaatcattgattcctctcttatcaatgtattgtatccggttccaaaatcctctcttcatgttacacactgacaagcttctaccaaagaaaataaattttagtattacgaaagaaaaaattgttgacaaactaattttgctccatctattatcacaaataaaaatgcaattgaactgcagttactatcaaataatggctatggttttttattttgttttgaaccgaccaaattaaaagatgttttgaattaatggtattattttcaagtaaaatagaggaaagtgacgacgatacatggagacagaaaaggagtgattgagaaaccgataacaaaaacgtcattgtagcccaacttgcaaaaactaaccaattgcatgcatgaaagagtttataataaatcatggaattttacattgtcaacgtgtgaggtttttctttttggacacaacccaaaaggccttttagttctaaattgtttcatattagaaaattctaagttcggaaatgctatacatgaaaattcttggtgatttctaatgagcaaaataacatgaaaattcttggtgatccattatatatatttatgcgccgagaaaccattcagagaaacaataaggaagatagtaaaacctcatctttctaatcgataacttccatatccttcgattaaaagcttttgatcaatgcatagtccaaactttatactcacatatactcacatacccataatttagaatttagatctcatttaaattgataagctatttttgtagttataaaatacataaacccatccaaaatattatcattaagacaaaatattagaataggtatattaaaatagaataatgagagataacatttttaagaaataaacaataaagaatcaatgcatagtaaaaatgaatttgttatcttgtaaatacaatataattttatcgcctgttttgagccttcttgcttctatattattccaccctgagcacataaaatatttatcatggtctatttttattgttacccagtaactcttgttattctctaaaacttccacttgaagaccacttggaggcattacaaaattttctatagtgcgtagtatcttctctatctgcaattttggttaatataacctacccatgtgggaaagatcggtgtttgtaagaactttctctaacattttattttgatccatatcaagccaaatcactattttactaaactcttaacaaatttagaaattttaaaaaatgtttgtagaaaataaaatgtttgaagactggagctctacacatatgtttatatatagttctcggccaaaccaatgtgctttgtcttcaaaccctttaacaaaaaaaaaattgtgctttgtcttcaacttttaaaaaaaaaatgaaaaaattaatttgtccaaaaaaaaactctaaatgtagtcaattatatggatatatattctaatttttgtaatattaaatgaaaatattttctaatatgttatgtttctaaatttttacacttgttaccaacttgaagattaaactaattatagtttttttctaacatcaaattaattattaagcaaaaaatttcttataacaatcttacttttttagtcatttttattttaaatttcttccaaaatttaataaaaatcgattacattctttagaaaaataaattcagttaatactatcaaattgtattatttcaaaaacacttaaaaattgcacacttggcagcttatagttttcgattgatgtactttttacaataactcttttttaaaaaaagtttataacatcaacaagaaatttagtaattaatgtttaatgagattttcttttatagatttttttcattaaactttacaagtcgaccatggcattgtccctatgggatccactaatattataaagaaaatctatacaaattaaccatgaattctatataaacctttttttgtgaatatatttatgaagtttgtgaatatttaatatttttttgtttgacctaataataacagcagaaatcgacgtcgatacgaaaatatatatatatatatatatatatatatatatatatatatatgaaaaaaatgaaaatgtgtcatttatctaaaacgaaaaaaaagaaaagaagagaagcttttttagttctctctgcccaatggagaaaagaagaaccagagattgccaaatcatcttctgcaaaagcacccatcaaagaaattacttgtaaatagaaaacaaatcatcaaatctggaagacaaatcattaaaaaaggcgacaactttttttggttcagattttgaaaatttgattttttatttttcttatcttggcgatcgaatcctatccgaaagattgaaacttgggaggtgggtaagtgagtga

SEQ ID NO: 6855 - DNA, 3000 bp, Unknown
  misc_feature (1)..( 3000): cDNA_ID_2030742_gDNA_ID_1621109_Annot_ID_56064 3000 nt of promoter + ATG
aaattaaaattttataacacaaaataatggtctcgaagaaacagattacaaatttagaaccaaatattttgctcttaccaatttacaaattaaggtaaaaacacacaacaagagttcaagacaataaatcatgaaagtgtgtacacaaaataaactttaaaactgaactttcgtcccttccaagtttcagccgaagatgcacatattcatgacaaaagaaaatctttcatctttcttttgttaatggagattgatatgatcaaattaccctaatgactactctctcaaataaagaggttgttgtagcacttagggatagaattccataaagttctcggatcacacaatagattaatagttttgaataaagctaaacagaaaatattataaatgtaaaagacaagaaaacaataaatgagattggttgtagattcaaatgattaaaacgttgggtttaggaaaattctcaggaaatatcataataatagatctagcagtaaactaggattattaacgaaccattctagaactcaaatcactaatatacaataagcggtggtgttccgcgaaactcactatgcttaatagtattgatcccaactctcttgtaaatccctagagttaagcaagcattataatcaggtttgataaattcacctaagtaatcgacgctagcacgcatctaaatagtaggctcatctaagatagtttcagtaatagatacatatggtgcgtatacctattatcctaaaatcaagttctagttagttactctaaaactaacattaagaacaatcaaagatgaaaaattctaaatatattatcctaacagggttatcgatctactagttcatccaaatcctaaatgagaatccctaaacccaacaaagaactactcaagcatgatcatagaagaacaaaacatgattgaataagaaatcaatgatgaaattaagaagagaaaagagtttagaagaatcttctctaaagggagtctctaccgggttttgctcccaagaataaaagagataataagagttaggtctaaacaatgaccataaaattcaatatataagttcctaaaacgtgacgggccttcttgaaaataaggaaacgttctaggccgaattttataatcttcaaaacttcaataaattgcgcaattgaattgccgtcaagtattagtgtcgctcgacaccaggggttgtgtcgattgacacctacgtcaattttcgtctcaggattgcttctacagcctaagttgtatgttttgttcaagaatgctccataatctccaaatgcatcccaaacatgtaaagacttgaaaaagactagaaaagactctacaaataacaaaagaactctaaaaactatacctagatcatagctaaaagcagtgaaaatcgaggtatatcagagatgaagttgagaaaattatggaaagatgaacagtcttagagctaaaacacatcatccactcataacctaaaatagtgacacatcaattatttctttaaattttagattagggcagttaaaattttccagttatcttacaactatacacaaacttgtgaataatttttgacaaaaatcacataatgtaatatatttatagtatataatccaattatgatattaattcattaaaagttaatacatacatatattattcatttgcaaaatactttaatctgatttcataacaattcatcatatgaaagtcaaacttgactattgatgatcatatttataaataagggtttacatggtgagtttttaaagaaaaaatctataccatgaaccaaacattagatttcttattcatctaatcatttaaggatcacaagatttggtgatagttaatttttggaatcattttaactttcgttgatgatatttggcccactattgatgggtttatattaggatttattacgttgtgaatctattttatataccgaacttgaaatttatatcatctacagaaaatctgctaggacgttgcaaaaatataagagtagttttgatattttgaaaatattgtattcaaattaatattgaaaaacagcacattttagatcatttatattttaattaatacgtatatctaagattatataagtgtcaacttttaattttaagtgttttttctttttatgcatgacggtcaatcacatcaaattttttaacgagacacatacatattttacattattattgcaaataactactaaccgaataaaaatctattgaattttctgagattctctccggcttgtttttgctacgatgatacaaaaccactgcaaattgcagcatctgagtctggttagtgcaaaaaccgataaaagaaggtttttagaggaagacgaggagaaaaaaccaatacaatagatttctctaactgaatgtcccagtttttattaaaccgtttcttcagatttccgatttagattaatcagcgcgtgtcttccggttcctgttcgaattggaaatgtcagtttcttcattcagttgaaaagttcattagcaaaacacaattgcttaggaatatttatttgtatagaaaaatataataaatataaacagtctcaaattcgatgattttctctattaacttgatcgctgttctctgatttaactgatccctcaaaaccgatatcaaattctgatttaactttaatttcattttggatacaaatgatattacgtgaaaatattgtagcaaagctgaaagtattttaatatctgggcccgcaggatcaagattctgtggcgaaaagttcagaccaagccacatcaagatatgttaatgacgtggcattctattattggctatgaatctgttctggataacaaaagcatcatccgtaaaaaacacaaacaacgaaagtcttttttgcactcgccatggtgtctcatcttcaatgtatggcatccacattgtttacttgaggtacaagcaaaacgtctaagctcgtcgacctcctcttaatg

SEQ ID NO: 6856 - DNA, 3000 bp, Unknown
  misc_feature (1)..( 3000): cDNA_ID_1839107_gDNA_ID_1621109_Annot_ID_56068 3000 nt of promoter + ATG
gtgtttggtatcttgttctgcatctaaagaaactctctttacagcaatctgtgcattagaagagagctttcctttgtagactgtcccgttagcctctgtaccgaataactcgctctctttgaaccctttggttgctttgtagagagctttgtaagaaaacctctgaggactgtaatcttcctcccattcttctcgtacttcttcatacttgctgttcacatacattgatcttaatgctgctcccattcttagaaatatacctgcaaacatgtcagattttttgcagattctcaaggcagcttttagtcctctattgtcatcgttgtttctgtttggtgatttgtgtgttgtgggaaattagtagcagaccactttcttttcaggagaaggtcaactgttgtaccaggaccgtccattcttgttatttaatggtatttcatctctgataatggtattttattatactagtggcatttaaagtctccaatgaagattttcattatgagttatatgtaatttatattgcaacattgaacaggttcatctctttgatcacctggatgaattaaatactcaaatttttatgaagatgcaatattttcttcttattacagaagtcaactacaagaaggaaggaaacaaaaaccaaaaaatgagtaaaagaacaaaagaagatgtattagaatttcttatgtatgtatacaacagacttcagacaaaatgaatcttggttttggtatgataacataactaatagggggaaaaagaggattgaaatagaaagcctctttcttacatagaggctttgtaaacaatgaaaaacactctctgttctttagtttggttgaagtatctttccatgattttctgcttcaacaactgcagcagaatcaaatgcatcagaatacaattgcaggtgtgtcaaattgttaatagttgaggaataaaagaggaactcactttcatttgtgttggctacaagaggagctttgttgtctgctgaatttgaagcaggtgccatgtttgtggctgcaccaaaactagaagtctgagaagaacctttacgaggactgatagctttagatatcactcgagaaagttctctatcgtcttcgctaggctcaaacttctgcgatatgtattccttcattgatacgcctttgtcccatacctggttacaaacacaagatgattgactgatgtatttacctaaatgcacaaacagatagagaactttgtcgtaccttggtattgaagccagtgggctggttagttccggcagtgttgatttctgcaacatcatttacctcttcttctcgctctgttggttctggaaaagccatatcttgaatcttcttagttatagcttgagttgcgtcagagactttagcataaccaggtgctagcttctctgtcacagtttctgttactgtcttgcttggactaataggttcctgctggctcgtgcactctttccttgtcttctcagacgattctgttactattgttgttgtgtcagaatcagcaggcttctcttgcttgacatcagataaaacattcttctcagagatcacaggatgttctgttttggaaccattacaatctttttgttcttgttcagcgtcctgtttggctgggagaacagacaagacatttgtctcagtgatcacaggattctctcggggatgctgccttgctgtctcctttaactcttcaggtgccttctttgattcatacactgaaaataacacaagaagatcgatcagttttaagcaaattcctaaaagggtggttgttacttatgaagctttgttcaatttcatttacttggggctccaagatattcaggatcttcttcttcttcttctcctccttcttctctgactttacggtcttttgacttgtcacgtggtgacaatgacgcataaccaacttctctaacttcatgatcttcggatctgcaaaacggtgacatggttgcatcaccttcttcatcatgtctcttcttggtgctgagactgtgctgcagttttttcgccttatccttcattttagagaacaaagatttcttatggtgagaatgttctccatcattttcttttcttggtgaaccagaaggtgaccgctttgaagcttcaccagctgaaaaaaagtatgacaaacagatttcaaaccaagagtttgcgtccaaaatcatcaaatcactgagagtaaacaaaatggatattatcatttcttggagagacttacattggtgacgctggctaagtgttgagaagctaggatttccagaatgatcaacatgtgtttttaagctttcgagctcagcgacggggtctagttgacgcgacatttcagaaacacaaagttcttgtagatgttctgtttaggaactctgatcctctgagaacaacataagatagatataagacaagaaaaactgtgcatgtcgtcttgtttctccgaggttcttggacaaaccataagaaaaaaaaatgcttaaaatagtcatggtctcttattggagaagcatgaagggaagacaaagtcttggcctgagaaattgacgtttgaagctgaattataggactcacatttgtagagttttctagagaaaaactggaaccataaataacaaatacactgtttaaagaacttaagcaaaacttgtctctgaactttaatgaccaaaatattaagactatgtgagaaaaatgtaagaacacatttgtctggataaaatgcataagttacagaattatcacagactaaacatttttcaagaacctagtcagaagtttactcatttgtctcactgaaactgcgtgctgtttctaactaaagtaaacgtcacgcagttctatgttaaataaacaaaacgtaatgtagtctaaaaggaaagtctctctacctgcttaaaacccaaaagtacattttttcgccgaagccaaaaatcttcacttgcttcttcttctctctgaaaccttatcttctccgccc

SEQ ID NO: 6857 - DNA, 3000 bp, Unknown
  misc_feature (1)..( 3000): cDNA_ID_1815748_gDNA_ID_1621109_Annot_ID_56070 3000 nt of promoter + ATG
agacgaggcttgttgagattgaccaacaaaataggcaaaaagagagatgcttacaacatagttgaagatattagaaccctgaagagaagaatcttggatataactcgcaagcgggagacttttggtataggaagcttcaatgagcctcgaggagagaatattacaaatgttagagtgaggcagcttcgacgtgctccacctgttgatcaagaagagctagtggttggtttggaagatgatgttaagattcttttggtaaagcttcttagtgataatgagaaagacaagagttatattatctccatattcggtatgggaggtctaggaaaaactgcacttgccaggaagctttacaactcgggggatgtgaagagaagatttgattgccgtgcgtggacctatgtttctcaagagtataaaacaagagatatacttatcagaattataagatcgctgggaatagtttctgcagaagaaatggaaaagatcaaaatgtttgaagaggatgaggagttagaagtttacctttacggtcttctagagggaaaaaattatatggtggtagtagacgatgtatgggatccagacgcgtgggagagcttgaagagagcattaccatgcgatcacagaggaagtaaagtcatcatcacaacgcgtattagagcaatagctgaaggtgtggaggggacagtctacgctcataagttaaggttcttgacgtttgaagaaagctggacgttgtttgaacggaaagcattcagcaatattgaaaaggttgatgaggatctgcagagaactggaaaagaaatggttaaaaaatgcggtggattaccgcttgctatagtcgtgctttctgggcttttgtctaggaaaaggacaaacgagtggcatgaggtgtgtgctagtttatggcgacgcctaaaggataactccattcacatttccactgtgtttgatctaagctttaaggagatgcgacatgagttgaaactttgctttctttactttagcgtcttccctgaggactacgagatcaaggtagagaaattgatacacttacttgtagcagaagggtttatacaagaagatgaagagatgatgatggaagacgtggctcgatgttatattgacgagctggtagatagaagtttagtgaaagctgaaagaattgaaagaggaaaggtgatgtcttgtagaatccatgatctactgagagacttggctatcaagaaagctaaagagcttaactttgtaaatgtttacaacgagaagcagcattcttctgatatttgcagaagagaagtggttcaccatcttatgaacgactattacttgtgtgacagacgtgtaaacaaacgaatgcgatccttcttattcatcggagaacggaggggttttggttatgtcaataccacaaacttgaaactgaagctacttcgagtgctaaatatggaagggcttttgtttgttagtaaaaatatcagcaatactttaccagatgtgatcggggaattaatccatttgaggtatctagggattgctgatacttacgttagcattttaccagcttccatctccaatttacggtttctacaaacactagatgcgtcaggcaatgatcccttccagtacacaaccgatcttagtaagctcacatcactaaggcatgtcatcggaaaatttgtgggagaatgtctaataggcgaaggagtaaaccttcagaccttgaggtctatctcttcctacagctggagcaaactgaaccatgagttactcagaaatcttcaggacttggagatctacgatcactctaagtgggtagaccagagaagagttcctttaaactttgtttctttctctaaaccgaaaaatctccgtgtcctaaagcttgaaatgagaaacttcaagttatcatcggaatcaaggacaacaattgggttagtggatgtgaactttcccagtcttgagtctctgacacttgtcggaacaactcttgaggaaaactcaatgcctgctttgcagaagttacctagactggaagatctggtcttgaaagattgtaattactcgggagtgaagatcatgagcatcagtgcacaaggttttggtcggttgaagaatcttgaaatgtccatggaaagaagaggccatggattagatgagttgcgaattgaagaagaggccatgcctagtttaataaagctgactgtgaagggccgattagaactaactaagctgatgattcctgatcgattgaaagcgtttgttcgacgcaactaaaatatatgctgatgactgctgaaaggaaaaagctaaaaatgcttttataaagtgtttatttggtatttgtatatttcccttcttggttatacatatgtattattcttatcagcaaaaatgatgatgaagaaacgagttcactagcaggagacgaaaggaaaatattttaggtcgtcacaagactaaaaatcatgtttatcattacaataactttgctgatacataacgaaaaatgtgaatccttcacagattaaacttgggacatttagaggtcaataacttatctggctatactaactatacaataataacaaacctagcttttgttggaatgtcactttcataattcggtaaaatgttcgttagcgtgtggctatccaacacaaaggaaggttaacttatatgttaaagaatgcaagaatataatacgttagttgtatatattgtcaatcatatacgccagaaaaaagaatacttaatggtatactaatatcatcttcacagcctgtaaccatgccgggtcaatagatctgagactaaaacttttccattaattaatttcactagttgcaccgtgatttgaggattaatgatgtagcatgtggtaagatcttctttaccaaacaagtgacgtgtcaacctttatgtagaaatctttttcatggagatacaaagagagatagaaagatagaggacagagaaatatataggggttaagga

SEQ ID NO: 6858 - DNA, 3000 bp, Unknown
  misc_feature (1)..( 3000): cDNA_ID_1815740_gDNA_ID_1621109_Annot_ID_56072 3000 nt of promoter + ATG
aaacaaaacaaacagaatgaacacgcttttattggaatatataatgtcattttcttctttctattatatgtcacgttagcgtgtggaaatgttattattgcattaagacaaagtcgtagtatgcgtcacacgaggaacacgagagagttgttgtcacacgaggaacacgagagatagaatgagacgacaaaaaatgtagtttgcatcgcttaaattgaatattagcatcattagaaaaataaaattaacatcaattataattgatgtaaatgaattttacatcacttatataagtgactctaaattggtgacataaatattttgcattagttaaactaaatatttgtattattaattataattgatatgaatatacatcagttgttaaaaatgatgttattttctgcatcacgtaatataaatgtattatattagctacagttatgacaaatgaatgattagctacagttatatatttacatcagttggtcaatgtcccgtacacagctttctcaaaattgaatgatttattttgataataattcctacacgatggaaggtcatttgccttgaggaagttagtggaaaacaagttattggttaaagaaataaaatgaggaatgcgttaattcttataaaaaacataaaatacatttggtttgagagttattgatgtagcatgtgaccatgtgtcaagatttatttgctatgtaagtatgtgtcaacctttatctccacagctaagtagttgacttgctggcatttaataaaacacaatgttgaatagtcagtggcgtgtgtttctacaacacaatgtaaggctattgttgctttaaaaagtagacacttgactatataaaattgtctcctttgaaagattatggaattttagtaattttgtttttagcggaattaccggttataggggtgtcaaaatgggtaacccaactcaactcaactcataatcaaatgagtttaaaattaaatgagttatgggttgacccaacttatttaacaaaataagttgggtcaacccataactcatttaatttgatgggttgagttgttaaatgggttaacccatttaagtaataatttaattaattattattataaaaaaataataaataattatcattattaattcattatcatcaaacttaagatatttacagattccacttttcacaggtttacgtttttggtaccgaaaatcacggatttacgtttttggtgggaaaattataggtttttacgttttcggccggaaaatgatgggtttacgtttttgacggaaaaatcatgggtttacgttttggacgaaaaaataacggatttacgtttttggcgggaaaatctcgggtttacgtttttggcgggaaaatcacgggtttacgtttttggcgggaaaatcacgggtttacgtttttggcgggaaaatcacggggttacatttttggtgggaaaatcacggggttacatttttggcgggaaaatcacgggtttacgtttttggtgagaaaattacgggtttacgtttttggcgggaaaattacgggtttacgtttttggcgggaaaattatggatttacgtttttggcaagaaaatcacgggtttacgtttttggcgagaaaatcacgggtttatgttttttggtggaaaaattacgagtttattttttctcaattgcatcgcttgtatatttaagaattttggaaaaatattaattttattaaattggtttagatgtgtttgttaaacttaaattggcattggtttagagattttagttggtttaattcaaatttacaaaatttgatgggttaattgggtaaaccattgaaaccattaaccattacaacccaactcattttactcatcaaaccaattgactcatcaacccatttgacccatcaactcatttgagtaaaaaaatttaagggttcatgggttgagttgagttgagttgacccatgaattttgacccattttgacacccctaaccggtcattatataataatttttattatttaatatggtagtttattttattaaaaaaaaaattatatgaagatcttttacacaaaacttttatgtttttaatagagttatcgactatcacatcatcgatatacgaaaaagttatattgcagtgacttttaaaattttagtattaatctgcatttatttaagatatagattttttttacaaaaaaaaaggttacataaaaggttcttttacacaaaatcctaaatgtaaagtatcctttaattattttgtcatcaattctaaaaaaagatattattgtactaaattttaaaagagaaagacaacacatgtcataaaaatagaatgcaaatatcggtgtctgagaggtcgttttgaaaaaattttacttcattatataagattaaatacgttcataatactattatgggaggaaaaagttagaaacacagtgactttttcattggaatcagaagaaagatccaaagctcttgacatgccctattatctttggatttccttgtgtagagaggcacaacacaagcttcccagttcttgaaatcatttttgacaaactcttaagaaaccttctgaaccacttaaatacaatttcaacagaattataaggtcatattgaccataacaagccaattgctttaaaatgacagcatatgaaaaagaagaaccccatgatttgagagttattggtgattcatgtgttaaaaacttctctcccacgaaaatgatgtgtcaacctcatatttcctgctgatattcatgtgatttctcacgcaacacaacgtattaatcatagccgtgactagttggcatttaagaattatatcctttggaagatcttcgaatctacacgaaatgggattttaataattctacatatggatcacattcacctatatatatatagatatgctatgcattgagataaaacatgagatagggagagagtgtagtagagagaggggttaagaa

SEQ ID NO: 6859 - DNA, 3000 bp, Unknown
  misc_feature (1)..( 3000): cDNA_ID_2687434_gDNA_ID_1621109_Annot_ID_56073 3000 nt of promoter + ATG
aacaagccaattgctttaaaatgacagcatatgaaaaagaagaaccccatgatttgagagttattggtgattcatgtgttaaaaacttctctcccacgaaaatgatgtgtcaacctcatatttcctgctgatattcatgtgatttctcacgcaacacaacgtattaatcatagccgtgactagttggcatttaagaattatatcctttggaagatcttcgaatctacacgaaatgggattttaataattctacatatggatcacattcacctatatatatatagatatgctatgcattgagataaaacatgagatagggagagagtgtagtagagagaggggttaagaaatggagaaaagagtagagaagagaaggatagtgttggttccacttccattactaggacatttcactccgatgatgcaactcggccaagcccttatcttgaagggattctcaattatagttcctcagggagaattcaatcgagtaaactcttcgcagaagttccctggttttcaatttatcaccataccagattctgaactcgaggcaaatggaccagtcgggtctctaacacagctcaacaaaattatggaggcaagcttcaaggactgtataaggcagttgttgaaacaacaaggcaatgatattgcatgtatcatctacgacgagttcatgtatttttgtggagccgtagctgaggagttgaagcttcccaatttcatcttcagtactcaaactgctacacataaagtttgctgcaatgttttaagcaaacttaatgccaagaagtacttgatcgacatggaaggtatacaaaaactagcttattacccattatgcttactctccttatgttcaacataattttgttttgactttgcagagcatgacgtgcaaaacaaggtagtggaaaatatgcatccattaagatacaaagacttaccaactgcaacatttggagaactagaaccttttttggagctctgtagagatgtagtcaacaaaagaacagcctctgctgttatcatcaacaccgtgacctgtctagagagctcgtctctcacaaggctgcaacaagaactccaaattccggtgtatccattaggccctcttcacattacagattcatcgacaggatttactgtgctgcaagaggataggagctgcgttgaatggctgaacaagcagaaaccaaggtctgtcatatacataagtttaggaagcatggttctcatggaaaccaaggagatgttagagatggcttggggaatgttgaatagcaaccaacctttcttatgggtcatccgacctggatctgtctcaggctccgaggggatagagtcattgccagaggaagtcagtaagatggttttagagaaaggatacattgtgaaatgggcaccacaaatagaagtactaggacatccctcagtgggaggcttttggagccactgtggatggaactcaacactcgagagcattgtggaaggagttccaatgatttgcaggccttatcaaggcgagcagatgttaaatgcaatatatctagagagtgtatggagaatagggattcaggtaggaggtgaactggaaagaggagccgtcgagagagctgtgaagaggttgattgtggataaagaaggtgcaagcatgagggagagaacccttgttttaaaagagaagctcaaagcctctattagaggtggaggctcctcatgcaatgcattagatgagcttgtcaagcacttgaagacagagtgaagaattagaatgcaatgatttttttgttaaatggtttttttaaagagttaatgatgcatatttttcaaagtagatgattttctatgcgcaaataaaaaagttattggaaccagaggaaagatccaagcttttcaaattcaaggaacgtcattgttctaattcgtatttaacattcccaattatgtatagatcatcacaaaaattctatattgaccaaaatatgcgtttactctttcgaaaatgttagcttcttccttcgttgaaagttattgctttcaaaagatatatgaagaatacttaaaatggtatagcaaccctttgatgcaataattgaaaccaagattggagaaccatgcatttagccacttttgagaaaattttattatatttggagactagaaagtaaaacctcttagcatttttgttattattatctaaatctcaagacaaaacctacccaatggtgctcaaaaccaccaactcctatatctatctatatgagacaaaacaaaataaaacaagtttttcttggaattaatgtcatactctcagtaaatataaatgggattttaaccaaaaaaatactttttagtcaacagatttttaataataatttagatcacttatttagagttgttcagcaatgatgttatactaaccaataatcatggatgatgaagatgcaggtatgacttatgagtgataggtaaattttgtcaaagagaaattgaaagcctccgtaagaagtggagtctgagtgaaaacacggtgctaaactttgctaaagacagaataaatcaaatgaacttcatgtaacatataaaaacataagtaatagaccagctttgatttttatagatcaagcttgttcttgcaaaaattacaaaagtagatgctttgctatgcaaataaaaagctttcactttaattctcatacaaagagaaaatacgtaatggtttgagagttgttgatgtagcttgtgactttatcttcattaccacgtaattgatgtgtcaacctttatcttaacagctaaagtagttgacttgttggcatttaaaatctcttttagaagattatgttgaatagtcattggcgtgcgattattcttgctttgaaaaatgaacagttgactatagaaaatggtctcatttggaagattgtgggattttagttattacttggatcacgtataggattcagagacaagagaagagaaaagaggagagaa

SEQ ID NO: 6860 - DNA, 3000 bp, Unknown; identical to SEQ ID NO: 6859
  misc_feature (1)..( 3000): cDNA_ID_2687434_gDNA_ID_1621109_Annot_ID_171758 3000 nt of promoter + ATG

SEQ ID NO: 6861 - DNA, 3000 bp, Unknown; identical to SEQ ID NO: 6857
  misc_feature (1)..( 3000): cDNA_ID_1815748_gDNA_ID_1621109_Annot_ID_171752 3000 nt of promoter + ATG

SEQ ID NO: 6862 - DNA, 3000 bp, Unknown; identical to SEQ ID NO: 6856
  misc_feature (1)..( 3000): cDNA_ID_3049089_gDNA_ID_1621109_Annot_ID_171750 3000 nt of promoter + ATG

SEQ ID NO: 6863 - DNA, 3000 bp, Unknown; identical to SEQ ID NO: 6855
  misc_feature (1)..( 3000): cDNA_ID_2030742_gDNA_ID_1621109_Annot_ID_171746 3000 nt of promoter + ATG

SEQ ID NO: 6864 - DNA, 3000 bp, Unknown
  misc_feature (1)..( 3000): cDNA_ID_3049093_gDNA_ID_1621109_Annot_ID_171745 3000 nt of promoter + ATG
ggggcttattcctgctcgaaatgttctagttacgttgttcattcattatgtgcaactagaaaagatgtatgggacatggtagaactagaaggaacaccggaagaagaagaaattgcgccattcgaggtggttgatgagaacacaataaagcacatgagtcatgatcatgatttaatattcaacaatgatggtataaatctccatgaaagcaagctttgtgaagcatgcgtctcccagatcaatactgatccgttctatagttgtgagctatgcggttttattttacatcaaacatgtgctaatatgcctaggaagaaaaggcatgttttgtgcaacatacccttctctctacaaacagacgatagcaaggattcttcacgcctaagaagaaaatgtagtctttgtctccaacatttcactggatttgcgtataatctgcatattgcgtataactcgcgtaccgaagttatggatatacgatgtggttcgatatttgaaccatttgttcatgaaaggcatccacatcctttatactacaagttcttcaccttttcggcggttgcgaagtgcgacatctgtcacataacaagaaggcatttgttatgttgtgaagagtgtgactttaggttggatttcaggtgcgcaactttaccaaaaaaagtaatgaagcaaaggtacgatgaccatccacttttcttgtcttatggtgaaaataatgtggatggtgaatactggtgtgacgtatgtgaaaaaagggtagatgcaaagacatggttctatacatgtgatgcttgtggggtcactttacatgtttcttgcgttgtgggtgacttctcctatcatatgccaggaccattatcaaccgtagttagcgaatacaaaatggtaccgcccgcggtagtaagcttatacaaagtggtgccaaacacttcgatttgtagaccactttgctccaggtgtcacactagatgcaaactcccttgcattcttgaaacctccgaggatggtgttaatgtttacttttgttctaatgattgtcataaaaatccttgggagtcgtcgtattattagtagcgcacttggtttatttatttctttctattttcttatttacttttcaaagagtattttactttacgtttattattaataatgataggttttgtttgtgaaacctatctaaacaattgagagcgttgaaggattttatcgggttaggccaagggatagttctcttgggagagtttttctcttgttatattatcgttttgtttatctactatcataataaaagttttggttttgaattgcattctatcttgtacagttatcatctttcttttacccaaaatttgctttgctttcttttcattctctacattttcacatgtcgatatatgaatcccctagtgttatatgtacaatttatacatatatgtatccgacatgcactaaagggtacttccattcatggattcttatctaagaacactaacacttaaaacatagtgttctttactagtagatgttgattgtatatggagaaagcaccgaatatatgctctggtttctccgctgtttcacctctggtagcccaatatttaaaattataaaaatggcatctatgttttgatttcccgagtgaagaaattttttaggtgttcttcaggatgcaagcttccttatattcttcaaatacaggaaacttttgttgtaataagtgttgtgggaacactcacaactattgtggtcataatttgttctcaatagttgtagtgtatgatgatagtaatgttgtgggaacacttaatgtacagtttctatcgttgtttttctcttttgccaacctccgtgaataaaagaatgttttacataaattatagtttttttaaatacttgcatttaatttgatcaaatcagtatagtgctttttatataattaactagtgatcaaactaatttattcaacaattttagttatactgtcttccaaaagcagtgataaatttaatcttatggtactttctttttttgttgctatcggaggtttcttgcttaacaagcaagtagcgttcttctcttaaactatttcccctacgtaagccgccaaacatgtaccgccaaagcagcttcatcataacaatagattcatggtttttccgttttcaaggagtttgctctaggctctagcaaattgtattaatattctacaatttaataaaaggcaaaataacacattcgtcacaaacataggatccgcacaagtggaagttaatataattaagattagagttgtaattgggcagactataagtctataacgtactattaggatccagtgatttaataacagtattattgtgtatttttaatgaattaaaatcggcagaattagctgtctctagtgggatctgcaaccacggaaacagcagagaaactagtggcatcgacaagtaaaaccccgttgctcttgtgttgcttgtatctcaagaaagcacagttcttcgctatttcgcctccgggaacccaatactcacaccaaaacctatatatgtgcaagatgacgatcgttttgttctcccggattaaattggtagccaactagctagctcgtacgttgaaaataaaagtcatgaaagggccaaaaaaaatcttatcactaatcttggatctactcaagtggatgattgattatacataataacataaactataaagtagttgtatggaatttctataattctatgagtacgatcaaaatatttaataacacagataactattatagagacgacttttatttggagtattaaaaatgaataattcccggaaagtatggatgtatgtctataaattattttcttcgatcgagttgagagattgaatcgttacagcaattaaaaatctcattccatttaagaaaaaaaagaaaaaaaaaaaaaaaagtcaccttttccttcaaatcacaagagattaggttgatttggatatcattccgcg

SEQ ID NO: 6865 - DNA, 3000 bp, Unknown; identical to SEQ ID NO: 6854
  misc_feature (1)..( 3000): cDNA_ID_1019253_gDNA_ID_1621109_Annot_ID_171743 3000 nt of promoter + ATG

SEQ ID NO: 6866 - DNA, 3000 bp, Unknown; identical to SEQ ID NO: 6853
  misc_feature (1)..( 3000): cDNA_ID_1017117_gDNA_ID_1621109_Annot_ID_171741 3000 nt of promoter + ATG

SEQ ID NO: 6867 - DNA, 3000 bp, Unknown; identical to SEQ ID NO: 6852
  misc_feature (1)..( 3000): cDNA_ID_1815780_gDNA_ID_1621109_Annot_ID_171737 3000 nt of promoter + ATG

SEQ ID NO: 6868 - DNA, 3000 bp, Unknown
  misc_feature (1)..( 3000): cDNA_ID_2186844_gDNA_ID_1621109_Annot_ID_171759 3000 nt of promoter + ATG
atgagtgataggtaaattttgtcaaagagaaattgaaagcctccgtaagaagtggagtctgagtgaaaacacggtgctaaactttgctaaagacagaataaatcaaatgaacttcatgtaacatataaaaacataagtaatagaccagctttgatttttatagatcaagcttgttcttgcaaaaattacaaaagtagatgctttgctatgcaaataaaaagctttcactttaattctcatacaaagagaaaatacgtaatggtttgagagttgttgatgtagcttgtgactttatcttcattaccacgtaattgatgtgtcaacctttatcttaacagctaaagtagttgacttgttggcatttaaaatctcttttagaagattatgttgaatagtcattggcgtgcgattattcttgctttgaaaaatgaacagttgactatagaaaatggtctcatttggaagattgtgggattttagttattacttggatcacgtataggattcagagacaagagaagagaaaagaggagagaaatggagaaaagggtagagaagagaaggattgtgttagttccggttgctgcacaaggacatgtaaccccaatgatgcagcttgggaaagcccttcaatcaaagggcttcttaattactgttgctcagagacagttcaatcaaataggctcatcattgcaacactttcctggttttgactttgtcaccataccagaaagcttacctcagtctgaatctaagaaactaggaccagctgagtatcttatgaatctcaacaaaacaagcgaggcaagcttcaaggagtgtataagtcagttatcgatgcaacaaggcaatgatatagcatgtatcatctatgacaagcttatgtacttctgtgaagcagcagctaaggagtttaagattcctagtgttatcttcagcactagcagtgctacaattcaagtttgctactgtgttttaagtgaactcagtgccgagaagttcttgatcgacatgaaaggttcccaaaatagcttaatgacccatttcgaaagcagtcggttcactcattacataatttttgttttcttactttgcagatcctgaaaagcaagataaggtgttggaaggtttgcatcctttaaggtacaaagacctaccaacttcaggatttggaccattagagccacttttggagatgtgtagggaagtagttaacaaaagaacagcttccgctgttatcatcaacacggcgagctgtctagagagcttgtctctgtcatggctgcaacaagaacttggaattccagtgtatccattaggccctcttcacattacagcttcatcgccgggacctagtttactgcaagaggacatgagctgcattgaatggctgaacaagcagaaaccaaggtcagtcatatacataagcttgggaaccaaagctcacatggagaccaaggagatgttagagatggcctggggattgttgaatagcaaccaacctttcttatgggtcatccgacctggctctgttgcaggcttcgagtggatagagttattaccagaggaagtcattaagatggtaacagaaagaggatacatagcgaaatgggcaccgcagatagaagtacttggacatcctgcagtgggaggattctggagccactgtggatggaactcaacactcgagagtattgtggaaggagtcccaatgatttgcaggcctttacaaggcgaacaaaagttaaatgcgatgtatatagaaagtgtttggaaaatagggattcaacttgaaggtgaagtggaaagggaaggtgtagagagagctgtgaagaggttgatcatagatgaagaaggtgcagccatgagggagagggctcttgatttaaaagagaagctcaatgcctcggtaagaagtggaggctcctcatacaacgcactggatgagcttgtcaagttcttgaatacagagtgaagatgcttaacttcatatattacaaaagaacttcgattataagaaaactccaatagaaatgtttacattctttggaatattaatttttgtcttccgttaaagttcataattatcaaaatttaaaacttgaacaatttttgtgttttatgaaaactagaaaacagtctttccacattaaattcacaatattctaatttgtgtgattcaaactagagatgaattttgtatggatatatgtctttgaatttgttgttttgaagaaggacacgaaattgaatacttcctctgtttcatattagttgtaatttaagatttttacacacatattaagaaatcataaaaatctcatttaatctacctcttttatataaaaacatcatttattataaccaattcaaccaataaaaaaatatataattaaatataattagttaaatggtattaaataaataaaaacccttaaactacatttatatagaaacagagggagtatcaatttttttttttaaatgtcgattcaaaatctttagtagactacaaaattgtttagtagactacaatttttagataactttgtctatcattttcccacttgtttagtataggagcatttttgtcagttcaaaccacattaattcaaaattatgacagtttggaaaaaaataaaaatttatggcattattggtaagtttattggtcaaagtggcaaccaaaacttttggtcaagtgacatttttggtaagttttttggtcaaagtggcaaccaaaaatattattcaacatgcaacccaaacttttgaagaaaatttattatatatggagactacaagtaaaaagcctcaagacaaaacctacccaacgtggttaaaaccaccaactcttatatgagacaaaagagaaacacacttttcttggagtgtttccactttattacttcattcagaaagactagttgtcacacaaggaacacgagagtcgagagagtaatatatatatagagagatagagcttaagcaatggagaaa

SEQ ID NO: 6869 - DNA, 3000 bp, Unknown; identical to SEQ ID NO: 6850
  misc_feature (1)..( 3000): cDNA_ID_1815803_gDNA_ID_1621109_Annot_ID_171726 3000 nt of promoter + ATG

SEQ ID NO: 6870 - DNA, 3000 bp, Unknown
  misc_feature (1)..( 3000): cDNA_ID_2186844_gDNA_ID_1621109_Annot_ID_56074 3000 nt of promoter + ATG
gtatgacttatgagtgataggtaaattttgtcaaagagaaattgaaagcctccgtaagaagtggagtctgagtgaaaacacggtgctaaactttgctaaagacagaataaatcaaatgaacttcatgtaacatataaaaacataagtaatagaccagctttgatttttatagatcaagcttgttcttgcaaaaattacaaaagtagatgctttgctatgcaaataaaaagctttcactttaattctcatacaaagagaaaatacgtaatggtttgagagttgttgatgtagcttgtgactttatcttcattaccacgtaattgatgtgtcaacctttatcttaacagctaaagtagttgacttgttggcatttaaaatctcttttagaagattatgttgaatagtcattggcgtgcgattattcttgctttgaaaaatgaacagttgactatagaaaatggtctcatttggaagattgtgggattttagttattacttggatcacgtataggattcagagacaagagaagagaaaagaggagagaaatggagaaaagggtagagaagagaaggattgtgttagttccggttgctgcacaaggacatgtaaccccaatgatgcagcttgggaaagcccttcaatcaaagggcttcttaattactgttgctcagagacagttcaatcaaataggctcatcattgcaacactttcctggttttgactttgtcaccataccagaaagcttacctcagtctgaatctaagaaactaggaccagctgagtatcttatgaatctcaacaaaacaagcgaggcaagcttcaaggagtgtataagtcagttatcgatgcaacaaggcaatgatatagcatgtatcatctatgacaagcttatgtacttctgtgaagcagcagctaaggagtttaagattcctagtgttatcttcagcactagcagtgctacaattcaagtttgctactgtgttttaagtgaactcagtgccgagaagttcttgatcgacatgaaaggttcccaaaatagcttaatgacccatttcgaaagcagtcggttcactcattacataatttttgttttcttactttgcagatcctgaaaagcaagataaggtgttggaaggtttgcatcctttaaggtacaaagacctaccaacttcaggatttggaccattagagccacttttggagatgtgtagggaagtagttaacaaaagaacagcttccgctgttatcatcaacacggcgagctgtctagagagcttgtctctgtcatggctgcaacaagaacttggaattccagtgtatccattaggccctcttcacattacagcttcatcgccgggacctagtttactgcaagaggacatgagctgcattgaatggctgaacaagcagaaaccaaggtcagtcatatacataagcttgggaaccaaagctcacatggagaccaaggagatgttagagatggcctggggattgttgaatagcaaccaacctttcttatgggtcatccgacctggctctgttgcaggcttcgagtggatagagttattaccagaggaagtcattaagatggtaacagaaagaggatacatagcgaaatgggcaccgcagatagaagtacttggacatcctgcagtgggaggattctggagccactgtggatggaactcaacactcgagagtattgtggaaggagtcccaatgatttgcaggcctttacaaggcgaacaaaagttaaatgcgatgtatatagaaagtgtttggaaaatagggattcaacttgaaggtgaagtggaaagggaaggtgtagagagagctgtgaagaggttgatcatagatgaagaaggtgcagccatgagggagagggctcttgatttaaaagagaagctcaatgcctcggtaagaagtggaggctcctcatacaacgcactggatgagcttgtcaagttcttgaatacagagtgaagatgcttaacttcatatattacaaaagaacttcgattataagaaaactccaatagaaatgtttacattctttggaatattaatttttgtcttccgttaaagttcataattatcaaaatttaaaacttgaacaatttttgtgttttatgaaaactagaaaacagtctttccacattaaattcacaatattctaatttgtgtgattcaaactagagatgaattttgtatggatatatgtctttgaatttgttgttttgaagaaggacacgaaattgaatacttcctctgtttcatattagttgtaatttaagatttttacacacatattaagaaatcataaaaatctcatttaatctacctcttttatataaaaacatcatttattataaccaattcaaccaataaaaaaatatataattaaatataattagttaaatggtattaaataaataaaaacccttaaactacatttatatagaaacagagggagtatcaatttttttttttaaatgtcgattcaaaatctttagtagactacaaaattgtttagtagactacaatttttagataactttgtctatcattttcccacttgtttagtataggagcatttttgtcagttcaaaccacattaattcaaaattatgacagtttggaaaaaaataaaaatttatggcattattggtaagtttattggtcaaagtggcaaccaaaacttttggtcaagtgacatttttggtaagttttttggtcaaagtggcaaccaaaaatattattcaacatgcaacccaaacttttgaagaaaatttattatatatggagactacaagtaaaaagcctcaagacaaaacctacccaacgtggttaaaaccaccaactcttatatgagacaaaagagaaacacacttttcttggagtgtttccactttattacttcattcagaaagactagttgtcacacaaggaacacgagagtcgagagagtaatatatatatagagagatagagcttaagca

SEQ ID NO: 6871 - DNA, 3000 bp, Unknown
  misc_feature (1)..( 3000): cDNA_ID_1815818_gDNA_ID_1621110_Annot_ID_56079 3000 nt of promoter + ATG
atgtgataagcaagcaaaaatgtggcccttgttgtctggtggtcaacctgtaactgttgctatgcatgagggtcctatcgcagctatggcttggatcccgggaatgaatctccttgcaactggaagttgggataaaactttgaagtaagaatgattgttcattatttcctatgactgaatgtagcaaattatagaatgttgactgattcatttatttgctgccatgaatttaatgatgtatgttggttttccttccagatattgggacacaagacagcaaaatcctgtacatacccaacagcttccagacaaatgttatacattgtctgtgaaacatcctctgatggttgtcgggactgccgatagaaatctgatagtcttcaacttgcaaaatcctcaggttagaatttttccttgttgttccatgttataacttgcgcatgagagttctaagtgctaacaatgctgtcagcatcacatggttttgggaattcgtgatcaatttagcccatgtgctatcttacaaagaatagatgaacaggctttcaccattagattaacagtttctcttgtgtaaactgtagactgagtttaagagaatccaatccccactgaagtaccagacgaggtgtgttactgccttccctgatcagcaaggttttttggtatgtcttcttatttatgttctgttgtgttttggttaattcagttttacaggaattagcttgttcgttagatgcttacattttaggttagacattgcaatgtttttatttgcaatctcgagaagattttatgtatgtcattctagcaaaaaatagagtaattttatatgggagattgttttgctagtcacatctccagatcctatctaaatcacaatggtgttgaatatgaaaaattaaccagatccaatgatctctataggttggttcaattgaggggcgggttggtgttcatcatctggatgattctcaacagagcaaaaacttcacattcaaatgccacagagatggaaatgatatatattctgtcaactctctgaatttccacccggtaagctctatctatagttatactcttatactcgtatgtattctttgaagccttcagcatatgttgagcgatgaaaatgattgtttgagttgttgtggatttaaggtacatggcacttttgcaactgctgggtcagatggtgctttcaatttctgggacaaagatagtaaacaaagactcaaggtattttcctcctgcattgattttttattttgttaaccaagtaattatctaacagttttgtattctgtgtccccacaggccatgtcgaggtgcaatcagccaattccatgcagctcgttcaaccacgatggatcgatatatgcatatgcggtatgatataaatcttatttggtttcactttatttgtacatgctcatgttatatgttgcaaaatcgagatggtcttttacttggaatctaaaaccatcattgtgttgaaaaacctttgagagcatacatgaatgctttctaacatgtattattatataggcttgctatgactggagcaaaggtgcagaaaatcacaacccggcgactgcaaaaagcagcattttcttgcacctgccacaggtgtgtgcgcgtcacagacaatagtaatatcatcatgtttcctaaacattagtgtctgtatctaacggacggaatttgttttaaatgaaattgcaggaaagcgaggttaaggccaagccaagagttggagcaaccggcagaaaatgagcgttgcttagtctgatttcttcgctagtgattttttttttttttttagcttgtggacttcgttgggctttgttatctactttagttcatgacattttgaatatacattaggagtcttgtctaaaagactaaaagtaaatctctaatgtttctagttgggcctaatttggaaccatctcgtctcatacctctttcgtttcatcatactaaggaaatctttttttcttatcaagaatttattttagtacatctgattccatagttaaactttagttattttaataactcaaatcaataaaatcaaccaagaaatgtttatctaaaactagtataattaaaacgactaatgttttcttctctcattgttactgtcggagcaaattttcctaaatttggttattagttaattttttttttggttgtgtgattaaatatggtcattagttagttagtgaagaaagagagagagataacgtggcagtagattagtggaagcaggagaagaaagcgggaatgagcaaaggacctggactttgtccatagccaagaaactcgcgtcctcttcttcttcctcttcacctatataaacactttgtcttcgaccccaattttccttcaattttatataaaaaataatttgttttcgttttttgtgtttctgtttttctcccttttgttcttctgtttcgttagaataacaacagaaaagaaaaaaagatcgtgagaaaatttcactttgaaaaagaaaaaagtgcagagagagatactttggaaaaattttgtcaacaaagaaagaaagaaagaaagaaagagtgaaaaagaaaacaaagaaacacaccaccctgtttctgtaaaacaagatggcggggaataaagattctagctgggacgatatcaaaaacgaaggcatcgatctcgtaagtatccttctccattaatattcccctcttttacttttgagttagctgctcattcttggttttgaaaacaggagaaaataccgatcgaggaggttcttacacagctccgatgtacaagggaaggacttaccagcgacgaaggccaaactcgcctcgagatcttcggttctaacaagctcgaagagaaaaaggcacacatccttaaatatctttctctttttgtttcttcactctcaagaaactccatctaaaaccaatttgaatcatcccacaggaaaacaaggttttgaagttcttagggttt

SEQ ID NO: 6872 - DNA, 3000 bp, Unknown
  misc_feature (1)..( 3000): cDNA_ID_1024765_gDNA_ID_1621110_Annot_ID_171771 3000 nt of promoter + ATG
attattcttttggaactgatacactagttgatgcagttctctcattttacttttgtttgttgaatcacctttataattaatatagattacaaggatttgcaagctataagagctacagtttttttttttttaaacttgcttccatttctttgtacaacataacaaaacaacacaacatctcatgctaattcaaataggtcaagtatgctactttgttgtccaaacatagacttgtcctccagctgtggatcctgcaagcgttccaacattataaggatggcaatggattctgcatggtatagctctctgcagagggttatgcagttccatcactgttcgctttagttttggattgatcacatcaatcttctttgacaaattgcccacatagatgtatgaatcatcccacccccatactgccctgcaatcaaaatcattaccaacttcagtttttcgacaaatagacgaaatcaattcctacttcttttcatttctcataacaaaaaagagtggaaaaagagtgtattggtcagagaaatagtgaaagactcataacaattacttgtggattcttttgtcagaacacagtacattaagcaagaagtgtattggaactgagaggcttattaaggtacaagatactggaacatacttgaatttggagatccatctgctggtgttattgtgatatatcatgcaagtgttctcaaaattggcgccgcttagaacaccaatgtagttgtcaaggctacaaggaaaacaaaacaaaacaagagttcagcaaaccccagagatgcacatagggacctacattatacatcagtttcactctctctacacatgtttactcttgtctacgttgctaaaagtttatgagatgtatttatttcccgtctcaaaaccatcaaggcacaaagttttctagctaagtaaagttcccagacataattgcttcaaggcagtggtgttttttcaaatatgtgcaacttttaaaccgaaatgcacagactttatgacctcaacaaaactagaacatatattacttaatctctccaatataatgacaaacaacatttgatgtgacttaaatcaaggagattatacttgtagttcttaatgaagtgtattgaataggctgtggaaaaaatgacaagataccttgtagttgcaagtgaaaggccagaaggtgagaaataagcagagtgcacagccctagaatgattaacagtagacaatgttttcggttttttggctcccatgcttctcaagtcccaaaggcaagcagttccatctgtggaacttgtcgccatgacatgcggattctgcgggttgaagtctatagagttaatcctccgttcatgtaactcccaatggaaaactgactttcctgctcggaggtcccatacattgaacactccataatcctgaccaaagtacaagctttgctcatcatttggtctctgcgagagtgaaaatatagcttcgtccgtggaataaaccagatcaaaaaccgacttctcgacatccatcaaccggatgagaccatcatagctgctgctaataacctgccatgaatgcaccaacgaacttgatgacttaaagaaagagataacgtttctccaatttcaatagacaactaaataaagacaagtcgtttaacaaaaaacttacccttgataaagagttttgctgaaacacaatagatgaaactggtgctgagtgaggagtgaatagatatatcccatcattatcttcctcattcccacaatccaaattccaaaacccaacattcccaagtttgtcccctgcagcaaccatcttaacattctcgcaaggtaagaactggacaacaaaaatcctcccaggcacaacacgagctacattctgcggttctaaagtcaacaaatccagatcaaactcaattttctcaggcttaaccggaatactaaattccttgttcacataatcactgaaggaatcatcttcaggctcttcctttttaacagaaactttagatacacgagaactactcctagtcctcaccataggagactcgttctcatccttaaccactccaatttctcccttaaccaatttgcctctacaagacttactctcaatacccaaaagagtatcaaccaattgcgtataagaaccgtatccttcatacgcggattcgaagggaataggagccaaaagacgcggcgattgcttctgaggagatggttggttgtgtgtgatctgagaacccatccggaaatctgaaaagccatcaggtaagccagcggaatctggattcaaacctctggtgcgtagagacattcggataacagtgggcgttgaagcaggtttgggcttcttcttcttaaaagatttagaatcatctcgagagcgtttggcggcggagagaagagaagaagctttggcgcggacattgagagcagccaacatctcatcgttccgtcttatgttctccaatctcttccgctcgtactccgtcgccattgattgattgatgcttgagaaaattgagattttttctctttacacacaaacaaaaaaggagagatttttttcttcacaccaaaactgaaagaagacctagaagaaaaagaaaaaagctaacaacatttgatgggtcggaaataggcggcagaataacaactgccgccaaaaaaataaaaaaacgaaaatatataattacacatttacaccaaagtgtgatctaaattgaacggtgcagattagtttaacatttatcccaaattttaagaaccgtacgatggagcatcttaatgacttaaaccctaaaagaagaaaaaccccaatcgagctctgtcaatggctcgcttcgtcagatgtctgagaagaacactcttttctaattcgtctccttctattgctcaccggagccctaggattggtttgcccacgaatctaaatcctaaaattttaatcagccgcagatgtctgagctccgggagttacgtctcagaaatg

SEQ ID NO: 6873 - DNA, 3000 bp, Unknown
  misc_feature (1)..( 3000): cDNA_ID_3041331_gDNA_ID_1621110_Annot_ID_171776 3000 nt of promoter + ATG
ttgtaacgcatcatggatattaccagcaagcaattcgtaaagcttaattctctccttctcaatgaaattaaaatccagcccattccttctccaaaggtgaagctgctgcaagatatcattgcggtttacagttgatccaccagcctggctcaacaaacaagcaagtctaacatctcccttagatatggcaagttccacagctgaatcaagctctcgtccagttagaagaaagaataagtgctcaaggtagctagaaccatttagatcactcacatcttcttgtacacggtgactgacactttcttggagccaacaactgaattctgctcttcggataagcggaagagcttctgtatcaatttttgcagaatcttccttcacatcctgcatcacgtcttcctcgttatcagaagctgcatacatcaaacgttcagtactctgtctctcagaaaagagaacttttatgagttcccagaccatgacttggtgcattaaaaacagcttcgcagatgtggacaacccagcaacttccagctgtttctcgattataccaatataacttcggcagatatctgaaagaactacacgatcggtgacaacattctgaagtttaagactgaaagagccaaacctaacttcttcttctacatgattcaattccttgtggagacttaagggagcctcaaacgcagaatcaataagttctttctgaacttttccctttctatcccaaaccactttgtcaattgctatcttttctttattgatcacagaagacaataccatctgggaactggagctacatattggcttaccagtgtgaaaaagaacgccatttgggccccaacctgctcggaacgatcttcccatgaataatgctgcatcaacaacattgcgggaatagttatcagttaacggtgtgacatggctgatgtccagctcgaaacctcccgttttcgactttctcactgccaaattcttattttgttgtaccatcaggatactacctggggagcttttatcattaccagggttatactccagcaaagcaagcggagttttgcgcacgaccggtggagggtcttgatgactatttctttgagcaattttctgcgaaggtcttacatttcgtttagtcaaggatgtcataagatgggaagtttgctctctaaagtcctcactttcgtcttcatcttcattaggaaacatcagcattctcatttctttcatcttttcaggatcaagtcctaaatgagctgggagagaatgagaaagctctagctccgaagtttccatctgatcttcttcatcaatgtcagctacctttttaccatccagtcctacgggatctcccaaacctggcgcatcatccattgcaatatcttctgcctcatcatcactcaacccaaatctgctgaaatgaggaacgaagaacttccataaaccattatcgggatcaaatgagatgaaagttgctccttgtctttccgtgctctgtttcaatttataagcaatatggttaacttgctgttttccccaagttagatctggtatgtttacgaccagagtcacctcagcagccttgttaagtccctcaccaacaaccggcttggagctctcatcatcataaacaataacctcgtgcctatgaaacttaactatgtgatccaggtccaaccttctaacatccgtgtttccaagaaacctaatataaccgtaaccaatcctgccaatagtaaaatcaggaacccggctgcaataatcagggctttcaatttctcgctcaaccagctcgtttatacatggcttcaagaagtagtcaggagaattcaacataggcaatgaatcaatgatctctttggaatgctcacacaaggcagcaattccatctaaagagatccttcttttctttcgcgagtccaaatctctagccatccttgaaatctctgtcgacatagaatttttgaaaatttcaaaatcagatgataaaagttacaacctaagtagcacacgattctgaatcaaatgaacttagaacaggacttgagcgggtaaggtcagataaaaacatagcagagactcaaacatcagaaaaaaacaaaaagcaaatcaatgtactctaagcatcagtgttacaaactcgaattttataagagttgaatgatgaacatgattctgaagctaacatgatatgtaaaacattaatagcccaagttcaggcgcacgacttgagtagctaaggataaaaacatagcagagactcaaacatcaatagcaacacaaagaagatttacctggaaatggttgaatagaaagagacgtcatgattgaaggaaacagaaacaaacaccgagagggtaaagaaagcgacaagctagggttttctttcttataatcactgactctaccgcgacctttccgatttctcttacaaatccattactgagacgacgctaacttacggcggtgacgatgatcggataaaaatctaaaaccgtcctgattcccctaaattccagagttcttcacactgaagtggtcggagttagccgccgcaggggaaaagagagggaaagctctcatagtgtgtgagatctgccgggtttgtttaggatccgtttaaccacccgacccgaaccgaattcctttccaattaaagtcaacattgggccataataaggcccaaatattaggcccgataatgtttttccttttttcggtatgaaaatgttttaatcccagcgtctgataaacgctgcgccggacgtcaatgtgacgcagagagacctttataagtacttcgtcgcattctctctcttccgactcaattcgttttccctcctcttctgcttaccggaaaagtctatatctccgacggaccttcttctctctaggtttgtctcttttattctgataaaagcttttagagaaggattacttatgtgattctgtctcttgaattgaacttttaacagttaatcagacctcgcgctcgtgata

SEQ ID NO: 6874 - DNA, 2273 bp, Unknown
  misc_feature (1)..( 2273): cDNA_ID_2123533_gDNA_ID_1621110_Annot_ID_171779 3000 nt of promoter + ATG
tacctttgaggttcaagtgaactagtgattggtacttgtccagcagatacaagatcccatcaaaagtaaaaccgtggcaatcggagagaagaagcttctttagaggtaacttagcactagcaatcaaacagagcaagtcatcagacaaaaacgaatccgaaagatcaagctcagtcaaacaacgagcaaacaagaacgcatcggttaacaaagactccctcggtctcaatccgattccgttgatcgcaagagactccaagttacgggaattgcgaagaacgaatttgatgcaatccgacgaaatgaaatcacagtcacggaagattatctctctcaagagaagacaattctgcgagagagcaatcaaagatttatctgtgatgaaactattaccagaaatgttaatcttcaacaaacctttgagattcgaggaaagctcgataacaccagaatcagagactcgactcggacttgaattaggatagctaatgtccagcttctctagcaacggaaaattcactccgatggaaaccagatcgctatcactaaaacctccaactccataacatttcaattccttgacattcttcatctcaaaatctgggaaatagcgcgtttgcgagacatctaccgattcgaaatccaaaccggaacgagaaacctggagaagaatcgaattgagatcctgagtgaaatcagagaacctgattcgcttcaagttgcggaatcgaaggagatgacgattgagtaaaggaacagctcgatcggtgacgacgaaagtagagcgaacgcgattggtgattgagaggaacaaggttgatacgagtgaaacagattccaggaatcgataatcgtcttcatcgatagctttgcagattaattcccaacattcttcaggtaaatccatggatgatggatttgatgaagattagctcaaatcaaactaacaacaaacacagtatgtaactaactatatatcatccttcaatttcgctggcagctggcttttaaccttatccaattttaaaatttcgaaactgggcttgttgtggctttttattccttaatggcccaataactatatttgtttttccaacagatattgggcctaacgactgattcatttcaaaatttcaaaactgggcttgtattgacccaataagatataaaaggctcattattcttgtaaggccctcaataagtctagttgttattcaactgtacagttgtgactagtcagtgaccacttgtgtcggtaattaaagtttgaagaggacagacatagagagttcacatgaataatgctcaaacttttggacctttgtcgtctgtatttttttaaaataaaaagaataaaattcttggatgcactctattaaaccatgacttgtcgttttgttcactaaatccgcatgaattgaatttggggagtgacccaatcgaatcatttggattactgtgcctcgatgcaaacaactctatcgagagattacacaatccattctcaatccatattctttccatatatcacaccattttattaatctgattaaaaataataatttcttttacgacaagatgtattttttttttcttggaaattaaaagactaaacttatgaatatgaaggaacattaaaaacaccatttatgtaattggattgtactttgattgctttatgtactttctttgtattcttgatttttctaatttaataaagatatagtataactatacgttaaagaaaaaggaacaaggctttaattaatagataaaaatctgttagctttacgtataaaaggtttaattctatttgtcaactagtagtatcagcatcatctctaacattgggatgttaaattgttgtaatggtagagagaaaatcaaaattttaaagattggctaatgggaagaaactgttttgctaactacacatcctcctcctcactctctccacaactccacgtcttatcaccacgtctgggattaggcactctttgctgctttattagcctttttgtccaccttttcataactgccacatgaagaccaaacacctaaaacctttgtccttctctctctctgtttcccaactccaacagtgtctcttgtctacatctcctccagacaaagataatctctagcatttttcaccatctccataaaagaattagatagaacacgaagcagcttcgtactctttatctctctctctctctctttttgtcttttctctgcatatttgttgataccagacaacaaaattaaatatg

SEQ ID NO: 6875 - DNA, 3000 bp, Unknown
  misc_feature (1)..( 3000): cDNA_ID_1013190_gDNA_ID_1621110_Annot_ID_171774 3000 nt of promoter + ATG
aagtctatgtttggacaacaaagtagcatacttgacctatttgaattagcatgagatgttgtgttgttttgttatgttgtacaaagaaatggaagcaagtttaaaaaaaaaaaaactgtagctcttatagcttgcaaatccttgtaatctatattaattataaaggtgattcaacaaacaaaagtaaaatgagagaactgcatcaactagtgtatcagttccaaaagaataataacccacagaagggtacattcttcgtcatctaccacctaagtttcccttctaatcatctcagtgaggtccatcacctggtttctgtacattgcccttgtgttctttttctggctgtgatacttcttttggggagagtttagtagattgatcttcttgggttttggttggagcattccctgaaggtttcttggtttccaaaacaatttcttttattgtctcttcgatttttcccagtctctgtctcatctccattagctcttcgtgagacttggttgctgcctctacttgtaatgccttttgttcagcttcttctttctctttcttttcttcttctttccttttcttctctccaagttcctgagaattagtccaatatcatgaggcatatgctaacaataaccagaatgaagacagaggataaacattaagacatgactgaaacatcatcagaaactcatatcagtttgataatgaacaataaggagaactcacagcatccatgatcttcattttccggcgagcatattgagcaaccagatacacagctgttacaagaaacaatagccatttataaacaagtcacatttgacagtaaacattgaacataacaactaagataacgggagtgaatggcaatacctacagatggcaagcagacgatgatgaattgcaccacatgccaatcaaacctaacacaaagcaaaatccatatgagaacatactacaaacacaaagcagcacaagaactcaacttactatataagagatagtttcagaaagtcaaagagataatcgcagcagaaattgaaaaccagttcacttgtttcagcctaaagaagctcacattccacaattctacaatcctgaggttttgtagcctaaaattaacttcaaaatatacaaggtaagttgaaaaaatagggtctttccatgatttaaggcctatagaagcatgaatcaaacacattatagcatctgatagactaaacaaaggacaagatcagcgaagagtgtttgcacgcattcgagagtagaaccctctttaaaccccaaatctccggtagaaattacccaaatttgttcttcttgggtggttcagtgaacaagatcttcgcagcggtaacgaaatcgagcttatcgagtttcttataggtctcatcgtagcgagaaacactagattcagtgtcgctgtgatgcgcaacgctagattccgtcttctcgagtttattctctccttttgtgcagaaacgtcgggtcctgtaaagcttcaaccgggtcgataatccggaccacgagcctctgccgcgaatcatcttgatctctcccggcgtcagctccaatcactactcgcgcattttccacacaatatgagcgtttcaaaacgcggtcttgaggctaatgttggtctccacaataaccggatctgaccgtaccgtaccgggtctagggttattggttcgatcagatagcgaatttaagactctcatgtgtcaattgtgatcatctgactttgtaataaatttcaatcaaatttggtatgtttgtcaacaaatatttgttaccttttgttttcagtttgtttttcatttttttttttcagctttggattctatttgtgagctaagatattgaccttttttttttcccctttctgttcaattaattttaatgattattatattatgatagggaaacattttattttgaaggttaaccaaaggcaaattagtggcaggcctctaatatttcatatattaaagatagaaagttgaacttttcatacaacttgtaactcttaagtttatagtctttacaacatcttgtacatcatattatatagttgtaagaaaaaaatgaataaacgcaaagttatattgattatgatatttttgtggacactacctacattcaataaacaaacatagatccatgattagtgtcatttttccccccaaatttttattttccgcaatgaaaaaatggtttattgtactatatatatattcccactttgcaccataattagtcgcaccactttgacaccttaattaaaaaaaaaaaaattgtgagtgtattaaaaagaaaaagtgtggtctcgagacaaaaagttgagccaaagataggggaatattattaagctttatttatattggaccccataataaactgtgaaattattaaagcataccgccaatattaatttaagttctatgcatttataaaatcattggctataaacattctataaggtatctagatcgttcgcggtaatcggttttaagaaaaaagattcataaatagttttaaggaaattgtaaaatggattcataaatatatggaagtagatttatttattgaagattcaaaactagtaataaaagctaagcaagaagtctcatttctgttgctaaaggctttttaatcgaaaagaggaaacataattggcatcggaaatctcaaaagacaagtctcgttggcattttgtgtaattttaataatcttgaatttagagaaaaagggtaaagcttgtcatcaacttattcgacagtttatataaaaaccgagtcatctttcatcggaagtacttccctccggcccattttctgacgccggcgatactctctttcacctctttctttctttcttctctgtcttttttgctttgtttctctccagtgaggaaaatggcggagtcattacgattctccgactgaaaaaagaagttaaaacctttgaaagaagaggaagaatttgaaagaaaggaaa

SEQ ID NO: 6876 - DNA, 2273 bp, Unknown; identical to SEQ ID NO: 6874
  misc_feature (1)..( 2273): cDNA_ID_1815814_gDNA_ID_1621110_Annot_ID_56080 3000 nt of promoter + ATG

SEQ ID NO: 6877 - DNA, 3000 bp, Unknown
  misc_feature (1)..( 3000): cDNA_ID_1815855_gDNA_ID_1621111_Annot_ID_56083 3000 nt of promoter + ATG
ctctcacaatggttaagctgttctctcggaatgttctggttatgtctgagagaagaccaactcggtcttctgctgataattccagctctaaaccctgaaagtatgtttcatatgcacaatctgtcttgagtatatcagaaatcgatgcagaacagaatgtaatttgagccaagacagagaattttcacattcctaattggttacctccgatgctctcctctcaatggctgcttccagacattgtatgacacgttcttgctctgcttctgagtttatgggaagtccatccacatgacggatgtaaaattcctgcagcaaaacactcatattattgttagaagagagatcccaacagacggccgttgagtagttacctgataagcctccactggttctgtgctgaccatgccatggaacaccacatactgcatatcagtcaaagtacagactacgtcaaacacaagctttggtctatctttggacctcatggtaacaacggtataatccttctcaatgttcattagtgtgacactgggccttgacgccgatgtccttgctcttttgactccctcgtagtccctatcatcaaacatgatctgatgcaaccgtctctccctgtgtgtatcagaacaagagaagactgttttcgcagctcttgagccgctgtttgtcctcactacattgcacagcagctccttgatggtggaaaggcgaatcgggtcagtaatggcagaatgagttgaattgtccgtgacatgaataaccgctgcagctctggtgttgtgagtccatatctcagcgttcacaacgttgcagtgaaggtctgtgagaacagcagatacttcagacaagagaccgggtctgtcagttccagcgagctcaatggatgtgtattcgtcagtgggcattacaccaactgagcttctcaaaggtggaatgaaccacccagcgttgctctctatcctctgcgcaatgaattcaacaaacgttttacacaaagaaaaaaacctgttgaaaatgaaagaaaaaaagtgatgaaatacattagaaaccttttggatatagtcaaggacttgagtgtctctgatcttattgccatcttggtcgatgactttgaaaacgtccatgaaccaacctccatcggaagagatgtaagctttcttgatcacaagattcatatcagtgagcacttgtactacttccaatagagtcccatgtttgttcacactatcaaccttttatttagcaccacaaacaaacagggaactctgttttctcaaaatctctttgtttggtacagaaccacttgaacaatttgaagagacagatttatttacctgaataacagtggcatcgtcgcttgcgttgttgtctattacaactctgtatccaccatgaaacatacataaataaagatgaatgttttagcagctggaatctttacaagggtatagaggctcacaaacggagcatggagaaacagaggacctagaaaacaataaaagagtatggagagaaagagaaaaacctgggaggattcattctcctgatgagcttggcatattcatcatcatccatggttgtagtatgtatctccttggtgatttggctgcagcagaaacccagaagagtgtgagtcctccaatttctgaggaaaattcctaaaagagagagggagagggaagttgaaggaggataaaaatggtaggccaccggaaccgaaccttgttttcattagttgatcgagcacgtgccactaaagattcttagagatgacgtggcacgggcacagcaacttttagattctgttataattgttcgaatactaccaaaagtcgggtgaagatttggggtcaatttgatgatcataaaggggattatattctccttctcaagcaagatgtggtatttactagtataatagatcattcgttatcttgaggtagacctctccgtaacgttcacaggtgcatgaccaagtaacaatttgattcctttccagcataacgtcatgttggttgcaaaaagaaggcaaagtagagcaagcaagcaagcaaagcatttttcttattttatattttgttgcggattccaccacccacttgaaaaattgacatgtcacaatgatttcgtatcctagtcttttattatttaacactctcacaatcccattactctacacctctttcattaagtcaacacacggttttcaaaaatccactaccctcccaccacctagaatcttttgttacctaccaacaccctcctttgttctctttatatattggtccaactaaatcaataagggaaagcatccttttggttggaggaattgctttcattctcactctttgtgtgttgatcaatggactagctaataacaagttcctcctctatatatttcaaaagaatggaacagaaacataaacgaaagacagagtacctgatgttgatgattcattgtctgtctggagctcccaaatgccttttatgcttacatattcataaccaacaacggctattaattataaaccaaaaacacgaaataagtttgtagcaaagtgaaattaggaatcttggagatggatccattagtagtaggataataggatatgatggaatttggttggggaacagtgataacttacgcttgcttccggcgccgggaaagttggaaaacctacaaagtacagaaatggatctgggccttgaagtgggctttttattaaagaaaaaaatacatctccgttatcaatcaccatcttcttctatctacaaattaaagaaggtaacaacagaacgtggtggatcatgtggttaggcattaattatttgctttgtttcgccgttttggtaacacacagacacagttccggtaagagcttttgcagccactctttatagttatttagaattggcgatcgaatcaatctcactccctccctcccttaagtcttgttgaatctgctgaattgttttataaagagttactttggcaaa

SEQ ID NO: 6878 - DNA, 3000 bp, Unknown
  misc_feature (1)..( 3000): cDNA_ID_1815844_gDNA_ID_1621111_Annot_ID_56087 3000 nt of promoter + ATG
tagtgggaattaaagcttttatttggggtctgtaataagtaggcgagataagttactcttactctttgaaatctcaaaaccaaaataaaaagtgggaacttaattatgacaatatacatggttcataaaaatgattattcttgataaatgaaccaaccataaaagaaggaactaacagtattccacaagaaaatcagaaatcaagaaatgaagaaaaggagccatgacgtgaaggggaaggtagggttaattaggcggcgtagatgtggatgtgaagggcgatgagggagatggtgatgaaggcgaagaagaggagagtgtggatgacaatggaggggccgcttgtctgaaacccaccgaactcaaccgctttgctctttccgggcagctgaaacaaaactccagggctcaacacgatgaagaaaattaccgacattagcaccggtccccagtccaaccccatctttgttttctgtttcttctctagctataatatacgtctctctataaacatctaccactttattatgtgcttatatttataatgtacgcgtaaatgtgagaatgaacttgatgtcaatacgattaattaataatatatatgtggcttgggctggacaaaagtggagggttcttctcaagtttgtgggatgaaggaaagaactattctctgatatagtattttaaattatctgtacacaaaaataattaaatatctagatcgatagtattttgcttgttttgaaggccaagcatatgattctcctcctcttcaggcatttcaattcataagcaagcatatgattctcctcttaaggcatttcaattcataagccaacatataacaccttacgttcttgctccggttctgagtttaagggaagtccatccgcttctgacggatgtaataatattcatgcaacatatataagtcatatatatactgaagtaattttaaaacgtcaatcgcaaaaataatacacaatacactaattaacgccataatttttatttttttaacaccataattttattatgcactaacgcggttattaatcaaatcacgtagtattagtaatgaaatagggataagatccacatgaggaaagcaaaagaatcgaaaccaaaccaataaacgcaatcaagtatcaaacactttaactttatatacatagccactaaatgtatatatccatccaacaagaaagaaagatactggtcaagtctcaatctgccttcttttgtcatccttaaataatctcaatagtttctgaatttcaaaaaagtacacaaaacacacctattatcacacgtacaatatatatataccaagtgcattaatacacttgtgtgtgtatatgtaatattgttccaagtagtgctttgacacctaataagacgatcaaatctttttggagctctaattgaggtagatatgggaggagcggactgggggccggtggcggttgcggtggtgctgttcgtagtgttatcgccggggcttctgtttcagttgccggcgaggaggagagtgttggagtgcggcaacatgaccacaagcgggatctcaatattggttcatgccattctcttctttgctattatcacgattttggtcatcgccattcaaattcacattcacatctaacatctttattttaatcaccggcttatgtttgtagtataaacctagcttggtataatattgttatctattcatctctcatgtgcttgtttttcttttcatttttaagataaaagtgtacaagttagcttgtgaaactttactgaagaaaatcaaaaatagagtaagagtagtataaaatacttgagaataaataaatgtttggtttgcctcgttatcacttcttgatgttcccacgatcgatcccttcaagagaaaataattaaaacgaaagattgcattcgtatcagcatttatggcggatgattgcgattattaatgcctcctgtaaaacgtgttttattctgtttcttttgaaaattctttcgtcgaaatgaatcattgccgtaaataatcagacattaatatctgattctatctctttaattacatcagataaaacataaaaatgacaaagatttattataaaataatatagaaaatgaaccgtcggaataatgatctgatctcgctatcgataatgaagccaaaatatatatacagtagaaactaatgacataaacgaggttaaaaaatactatcaaatgcatacatcacccaatcaattatatgtggctgcatatggtaatttctttgtatcctcgattaaacgcaacctgtattgtaaaaaaaaaagggtacacatacagaaaaagactcccccaggcccagtagacattttgaatatagatattttctgaatcaaatgttgattgttttttatttttttttgggtaggcaaatgttgattgttgtatatagaggaataagctattgttagaaaatagtttctatttaaaagctaccagtaaacattggtggtgtgtgtgatctatcaactgagtgagattttttttataaaaaaatttaaagaataagagagatcatcatatattcagtcaatcttttttttgtcggctagtattatactaatcaatttgttttttttttctttgtcggctagtatactaaatttgttagttatcagatttaagttaaactttgaatggtaagttactaaatgagacctggaaaaatgattttgaatgtggtcccaaaatgtaagtatgacagggcatgcatcgccgccgaataaaatactagtaacataatgggaaatatttcgtttaatgttttgtctaattattactctaagttcgactaatacatttttttattaaaaaacaacaactgattaacaacagtcctagttaatttcttgtgaaagaaagattaaagggatctaaagatcatcatcaattcatcaagagaccaagaaagaaatacaaggttgatcgtacaaagaaatcgaaaaa

SEQ ID NO: 6879 - DNA, 3000 bp, Unknown
  misc_feature (1)..( 3000): cDNA_ID_1663391_gDNA_ID_1621111_Annot_ID_56088 3000 nt of promoter + ATG
ggcacactattgattggacttggctatggtgctcactgggccatcgtcccagccactgcctctgagctctttggtctaaagaagtttggagctttatacaatttcctgacgctggccaacccagcgggatccttagtcttttcggggctgatcgcaagttccatttatgaccgcgaagcagagaggcaagcacaaggatccttgttcaatcctgacgatgtcctgagatgccgaggttccatctgttacttcttgacgtcactcataatgtctggattctgcctcattgcggccgccttgagtatgatccttgtgcaacgtacgaagccggtttacacaaatctctacggcaaaacccgcaactgattttaagataccatattacgaaaatatcccaccaagaaaagaagctgggttctttgagtttcatacctatatatatgattgtgttcatcatcttattctttggcttggtcttccacttccccatacatgtgtatttggttatgtaacgattttttgtgtccggtgttgtgtatggattttgaattcgcatttgtaataattgtattcacattattcatattctccagctacaaggtgtctttgtgtgtagatgtcaaacaaagacctaatctgtgtctgtctctgttttaagtgccagacgccataagatcttggcgcagggaagactcgtcgtcctcaaccaccatccacggcaatataggtccctatacaaaccaaccacacggtcaagttaaggtccttggatggatgaagcacagaatgtttagataatatattaccttcccttcccttatgaccttgggatatggtcctgtcatatccacgatggtggatggttcagccactcgtatacctccgtctaccacaaaatccagaccctgtaaaaggaaaccgaaacagagaatagagcaaccaaagatgttctttagtcgctgagaaagagtgagagctataaatacctctggtccatatatgtcacctattgcggttgggtcgatcaataggtccctaggaaccaatagtaagtaaaaagcaaagtggtaaacatacaaaagcgagattattctcaagtctcatttcaatgtcaaaactctctcttgtgtgctaagtaaacagaacctgtgtgaaagtaaaacacctctgaactcattttcactatctcacaaacctgcattatcgatccaattctcccatcttatatcttcttacatattaaggatcagagaaggtgatcaaacctgataattatgtagatgtagctgaagctaagatataaggctcaggaaccacaaaaacatatcactgaatatttcaaattagcttcagcattttatgagtcaaaatactaagaaacaatgcaaattctctcatgaaaaggctctcacattgcttttgcattctccgcaattatgatccaaaccttaaccaaaaacaactaccctataagagtataagaccatgtctgcagaaatcagtagtaacacaagaatttcatgagatattaaagaagaagaaaagtaggccacacaatagaattgaggaatcaagaaaacagatacatacacttgggaaggaccagcacagcagacgtctgttactactaactaactcagacttgtcattgaactatattatatacggctcacttgttttgctgcagtaactggcttatcttcttttctggcttgcgttaataacatgagtagagagaaaacacgacttccgtcgagtagattcctatcaaacaacaccggttctcgaatctttcgacaagccaagcaaaagtaggtgggcatgaaaatttgttccccatgaaacagaggacattcgttgttacctattctaataaccgattcaaaattccgaatcgcagacttaataaatgtggacaattaaccaaaccgtgcattgctaggtctaaaccgcattggtttatgacccaccaatcaaggagcgatgggtgagaaacctaataacactgctgctgtgactttatcatatccttagtccaattgggatcttcgtctgcgtgagacgcgttcacacctgcgacagatgaaatcacggaaataccactgcccaacgtgttcgcaataaaagtcctctgatgcctaatttcgtcaatttactgaagaaaattcaacatcaacgccctttttgataatttccccaaagttagtgggccctccacacgaagcatgtatcctccaattgcatattgccaattatttcctaataatattgaaggattattcttttcccatctatataccaccaaccctaagatccgaacgtccattttaaagccgtgcgtttaatcatgatcgtcaattatattggcaaatttgaccacacgatatccgtcatctaacggcatctacagatctaccagaacgttctcattcatgactctatatatttcgcatttcttctcctcaacgctctcataaaaagtagtactcgtgtcttactcgtgccagccactcgcatttctccagattttattatccttcctcgaaacaaggtatgacggaaactctctctctccctctctgatccgtcgttgctgcttccattttcatcttgactcgatcggatcattgttatgcttggcttgatctgtgcttaatgatgtgtttttcgtagtagatccacgattcgttgctgcgatcggcgttattatcgtcagctctctcgtttctgttctgtggttcgatattgctgagtttctaggctaatcttacgaatctgtgaaagtttttgagagatttggcttctgtagctcactcctgcttgatttaggttttttttttttccactcgtatgaagctgttttagaggctgttgttgtttatgattctcagcttgttatgtatagttggatttcgtgagttttggatttgatctgtgcgtttatttagtagtgaggctcatgtatatatatctgtgtatttgttccagagcttagctaag

SEQ ID NO: 6880 - DNA, 3000 bp, Unknown
  misc_feature (1)..( 3000): cDNA_ID_1840643_gDNA_ID_1621111_Annot_ID_56090 3000 nt of promoter + ATG
cctcttatacacagttcaacttcaactgcatcatccaactttcatcacaaccctacatctttaacaaactatcttttcttcatgtgcaataaatatttagggaaagctcgacaaggaatcttcaaatgcaggttatgtgctattgatgttttatcacctttatgagggaaaggtattatcacatactccacaacttattcttttaagtaaatctatgattggatctaactgaactttctttaaattttagaaccgtaatgaatttgagagtgaattgattgagcgctttggctccctcatcaagatgccactattgaaatcagacaggtatacagttgacatcacatgcgagctaacaaactcgaacttagcacagctacaaattgcaacttcatatttaattggttcataagcaatttaattgtcttctctttgtgcatatacaggactcctttacctgatcctgttaaatcagttcttgaggagggcattgatttgttcaatctccatagtagaagacatgggaggtgggtaccaacactaccattttaaatgacttgaaaagttgaattttatgtcaaaccgaagtattttgagcatcgtatgccaaaacttgttcatcgtgttatatattaaacaacaccttctgttctgacgataaaaaatgaaaggcaatagtaataattttagcaaaaactaacaagacatcggatttatttatcctgtgactagatgtacttggatcatgtaactggagaaatcctacacatgagtgtgctcacaggcgtttttatttcttgttctggctgttctctacttcattcttttagctctagctcctgggttccttctgacctgttttccttctgatttttcttgttgtagactcgagtcaacaaaaggaacatatgcagcggaatggaccaaatgggagaaacaactacgagatactctagttgcaaattctgagtatctcagttctattcaggtaaaaaattcctttgtcattgatggctcatgaaaagcaagaaatctgcgattgaattttaaactgcttcaatgttccttcagtacatggtaaaagagtataagaagaaggatgtacatatgatgtctttgttttctggtttgcaactttcaggttccatttgagtctatggttcatcaagtgcgagaagagctaaaaacaatagcgaagggtgattacaagccaccttcggagaaaagaaaacacgggtctattgttttcgctgccatcaacttgcctgctactcaagttcacagtcttcttgaaaaggtaaccaaccaatttcttatactatcatataaaaaaacaaaaggaatattgagacaagaactcttcaactgccgaaaactaaaggttaagtatgggctttgttattaattaatagatgttattctcatcagttggctgcagcaaacccaacaatgagatcttttctagagggaaagaaaaagagcatacaggaaaaacttgaacggtctcacgtgacgctcgcccacaagagaagccatggcgtagcaactgtagccagctatagtcagcacttgaacagagaggtacccgtagagctcaccgagctcatctacaacgacaagatggctgctctaacagcccatgttggatctgtggacggagagaccgtagtctccaagaacgaatggccacatgttacattgtggacagcggaaggcgttactgcgaaagaggccaacacgttacctcagctttacttagaaggaaaggcgagccgcttggtgatagatcctccggtgtcaatctcaggtcctctggagtttttctgaatacttgattaaacatggaagtttctctcttgagggaggttgctcgtggaatgggacacatatggttgttataataaaccattccattgtcatgagattttgaggttaatatatactttacttgttcattattttatttggtgtttgaataaatgatataaatggctcttgataatctgcattcattgagatatcaaatatttactctagagaagagtgtcatatagattgatggtccacaatcaatgaaatttttgggagacgaacatgtataaccatttgcttgaataaccttaattaaaaggtgtgattaaatgatgtttgtaacatgtagtactaaacattcataaaacacaaccaacccaagaggtattgagtattcacggctaaacaggggcataatggtaatttaaagaatgatattattttatgttaaaccctaacattggtttcggattcaacgctataaataaaaccactctcgttgctgattccatttatcgttcttattgaccctagccgctacacacttttctgcgatatctctgaggtaagcgttaacgtacccttagatcgttctttttctttttcgtctgctgatcgttgctcatattatttcgatgattgttggattcgatgctctttgttgattgatcgttctgaaaattctgatctgttgtttagattttatcgattgttaatatcaacgtttcactgcttctaaacgataatttattcatgaaactattttcccattctgatcgatcttgttttgagattttaatttgttcgattgattgttggttggtggatctatatacgagtgaacttgttgatttgcgtatttaagatgtatgtcgatttgaattgtgattgggtaattctggagtagcataacaaatccagtgttccctttttctaagggtaattctcggattgtttgctttatatctcttgaaattgccgatttgattgaatttagcgcgcttagctcagatgatagagcaccacaatttttgtggtgagaaatcggtttgactccgatagcggctttttactatgattgttttgtgttaaagatgattttcataatggttatatatgtctactgttttttattgattcaatatttgattgttcttttttttgcagatttgttgacagtctctaacc

SEQ ID NO: 6881 - DNA, 3000 bp, Unknown; identical to SEQ ID NO: 6880
  misc_feature (1)..( 3000): cDNA_ID_4283698_gDNA_ID_1621111_Annot_ID_171804 3000 nt of promoter + ATG

SEQ ID NO: 6882 - DNA, 3000 bp, Unknown
  misc_feature (1)..( 3000): cDNA_ID_2123626_gDNA_ID_1621111_Annot_ID_171803 3000 nt of promoter + ATG
gaagccgaagctagaataagagatccagtgtatggatgtgcaggtgccatataccatttacaaagacaagtgagtgaactccaagcacaacttgcaaaagctcaagtggagatggtgaatatgcaatttcaaagatcaaatttactagagctgatttataacatggaccaacaacagaaacaagaacaagataatatgtcctttgagagcaatgatttgggattccttgaagacaagtccaacaccaactcatcaatgttgtggtgggatcctctttggacatgttgatcattactaagattttgactacttcgctttaaggccctctctagaactttactcagggttagttagcatacacaaatgtaacattgtacggtgaataaagaaaagtagaggcggcttttttaaattgtttttttgaccgggttttcaatgttttttcctgcggtttttagacacaaaccggaaagtataccggatctaaacaaccgcagagcggaaaaaaaaaatctaaaactaaacgacgtcgttcggctctttatcttgtcaccctcctcaggcgacggcgacgatgaacctccgttccaaatcttcccgtatcttttatgaaacgcgaccgactcttcaaggcccaaagaaaaagagaatagtcggcgggataggggtatgtttgtaatttggcaaacgaatccccatcatagctttattccttacttcattcaccctagccgctttactctcttgcgttatctccgaggtaagctttttcatcaccatctacgatctgcctctttctcttctgctgatctgtgttgaatctgtttcgatacttctcgtttgttgttgttatttcttggattcgattctctttgtttatagatcgtttggaatttctgatcggtggtgtaaagttttatcgatttaggagaacaaagttttacagtgcaatcgtattgttttttttcttcatgccagctgatgataaactataggatcgatctggttctgagatttttgtactgttcagtggattgttgattatatcttttgatgtatgtgatattaattatcgatttgattgggtaatccaagttgtggaaactctaggattgtttgctgtatatctcctcaattgctgatttgtttgaatttagctcgcttagctcagatgatagggcaccacaatttttgtggtagaaatcggcttgactctctttttctgccaacaaaaacaaaaaatagtctgagtcaaaccattgtagcagtacctaaaatctcgtttgtgaaccgttgtagcactacccaagtcaccggaaaggtaaaacaatgaagccgtgggattaaaccttcacagatctgtgttaccaaaccctcctcttcgtcgttcagtccgccaaaccaagccgacgagaaaggttgcgggaaaaggtacgtcgcagcttctcgtgtttgtggtggtgtgttgctaagaatattgaaccagaaattaaaccaatttaaaccaagagaccttacgtgtatttcagtattgaattgataaaacccaaacttaataatcgaagatgggattgcgttatacatttcagacaacaaagtgattttaactcaaggcattgatggtggagtgaatgtcgattacttccagaagatcgagtcttggcctttctgattcacagtattcaacattaacgtgtgaatgtattcacagggttctatgataatgattgtgaagattcttgtgaaccttgattatgtagtgtcctagtgtcttctattccatcagttgcacatgagagtttaccaaaactttgaagattatgttgtgggcagaaaataaaccaactgataaaaagccttttgtggtactttaacattaagagaattcaaagcctagttataggaaataaattataaaagcatgaaagatattgttttctttgcaagtttggtctgaaagagtgtattttaaatgggcttactgtgggtagttattgcagaaacgctgaatttaaatgggcttactgtggcccaatagatagatactgtgagtctgtgatgagcgggttatttgtgggtgggcattggtttatagaaacgacgttgtgttcaagttactaaatcgcgtgtgttttttacttttctgcaactaaatcgtgtttcttcctaagaaccctaaatctgaactgtctcatcttctccgatatcagtgagatcaataaatcatcttctcaccctagacgacagggaaactcggggattgattcggaaaaacgagttcgtttttctgcaaggtacttttcttacgaaacaaatcgtaattgattcacaggttctgaatcttctagttaagagtaatgttgtctacactcactgattgcagcaactgattcaagtttttcaaagtagtagatgatctcaatctaaatcggtttttgatagtttatgcttgtggaatttgatggttttgaatcttttgatcttgcatctaaagtagtttttcaaactttacttatttatgccaatgggtttctattttgatttcggatttttttgtgggctgggtttttggtggacaagtttatgattatctggaattgggctagttaaaatagcccagattaacagccctagatataccgtagggtattttcgtaaatttagtttatagatttttgtttgttacggtggtctttcccgcaccataacacttccactaactccgtcgtcgtcccgccggtttcacagcttgttagtgactcagcaagacgtcgaccgaacttggtcgccgccatctctctttatttttacgtggttcgcacaaaattaagccacgtgttgatgtcgttaattcctcacacaactcacttcgctttctctatcaacattcatctttctgctacttctcgaacctcctctcttctccgatcatcttctccttactttaccttagctcgctctctctgttttaactcctctatcagatttttatcctcagat

SEQ ID NO: 6883 - DNA, 3000 bp, Unknown; identical to SEQ ID NO: 6879
  misc_feature (1)..( 3000): cDNA_ID_1663391_gDNA_ID_1621111_Annot_ID_171798 3000 nt of promoter + ATG

SEQ ID NO: 6884 - DNA, 3000 bp, Unknown
  misc_feature (1)..( 3000): cDNA_ID_2123612_gDNA_ID_1621111_Annot_ID_171797 3000 nt of promoter + ATG
cgtctagatgaaatctatagcattacctctctctttttttgttttttttggttgtctttttgatattatagtatttttattcttttgaagctatagttgctttgaatttctttttaggctaaagtaagataaggattatacataaaacaaacgagacccacacggaatgaaagaggagctcagtaatgttacagccaatttcccacacacacacacaaaaagaaaaaagaaccgtttcgaactctaaatggtgtgaacgtgttcacaaaaagtcactccactcttcccttctctctactcgtcgctccaatctcatcttttctaaaacctgattacgacatagaccactcaagattcaagagggtcctaattgcagattcggttcaattcaagataaaaataagagacgtttccatcgacaacataaaaatagaaaaaaaaacggttttagagaagcgcataggcaagatccttcacctagaaaaggagtgctgaatgacaatcatttgaataacacttgacttcaagctctttactccctcggccgtgatcaaagcagcaaacactttggtaatcatagtggtgacattataagccagagccatccgtctcagctcacgccggtctttgatctaaagcatcgtctgatcaacatcgatggaatccgcctattcgggcaccacatcattacatgctgttgcatgtggtgatagaatcactttggattggtttatgggtatggaactaaaattcggtaagtgaactggtctagattggttttggaacaatgtcaggtttaccattgatctcgtagtacatagtcaaatcatgttatactaatacttctacttctgattaaagatttggctgtttatcactttatataggcaattagccactgtatcttcaaactcttaatccaagttctactgttattagagactaagcagatatgaatggatttgaggcataaatatcgagagaaattaattttattaatgtgtctaagcagcaaaagcgcaacggatgtgttcaaatcgcaacccaccgaaaaaaacagatacgtaaatccgagagtacattaagcaatcatatgacaaagttcaaatgcaatgcgacccctccagcccccaaccaaaaacagccatgactctcggggagacacacacacacacacagagcatacgtcacagcttaagcatcagcaaacctgcaaccaacagatacaaactcaaatcacaccactgaattaatatttactttctaaatgattcatagattcaggataagtacccaagctcagaaagcttcatgtgggcctcagcgtaatcagcgaaaaaggcatcttcatcctgttcacattgtcacaagaaaccatgagttctcttctctctctctctaccaagtgaaaaacagaaaaaagggaatgaaagacatacagcagcgtatttctcgaccaaaggacggaaaacagggtcgtccaatagtgctttgtcagagacaagctgaagaaggccttccttctctccgctcaagagttccctgcccatatataatttgattagtaaccatataagccactgaatcctcctacaagggaacttgggatactcacttgaagtaagagttgtcgaagattagagggtttgatgtccatgcaccttcgaagccagacctatccttgtggcatcgtccctgcgatatcatattttgctagcactcatcagaatttgtaagcttggagcaaacaaattttaaagttttaagcagttggagagaaacgaaccagagtgtgggcaccagataaagcgacaatgtctttgtcagataagcccatctgcttagcaaagacatctctcaaatggtcacaacccttggtagcatcaggaagacgaccctctggaggtggttggggcttgtcctgaaatcaagatatgcattttagaaacagaaaatcaagtcccacaattatcaatcagccatctctacaaagaaagcagaacacgttctctcgaccaaattgagtatatgataaccttagagacggcaaacaaatctacagcaatgactaacctctcttccagggtggaaaggaatgtcagggccaccagtaacttcaacggccacaacaccagcaagctgaatgatcaatttcacaccacaaggatatctagagttagaatccaaaccttacagttatcaccgttaaccaaatagtgctttttaaaatttaaaaccatgtacctgatggaaatcagcaaaagagatggtagggaattgctccctgatggggtccaacaacctaagagcaatgtggataccactgttggctccatgagcttgctcagcgtcaaacctcattgttccgaatggacctccagtccttgattgacaatcgaaagttccagcagagtgccatctgcagtttagccagacagatcagccatgagaaagttcataatcctacatacttcaaaaccacaagcaaatatggttagttacttacgcgagtcggaccatgatgggtgcacagttcttctcagcgatcaaacctctgagcttcctcctgcacttctcaacagccttcttgtaatcttcgctcacggttgggtagttcttcgtcatcttagctaagctctggaacaaatacacagatatatatacatgagcctcactactaaataaacgcacagatcaaatccaaaactcacgaaatccaactatacataacaagctgagaatcataaacaacaacagcctctaaaacagcttcatacgagtggaaaaaaaaaaaacctaaatcaagcaggagtgagctacagaagccaaatctctcaaaaactttcacagattcgtaagattagcctagaaactcagcaatatcgaaccacagaacagaaacgagagagctgacgataataacgccgatcgcagcaacgaatcgtggatctactacgaaaaacacatcattaagcacagatcaagccaagcataacaatg

SEQ ID NO: 6885 - DNA, 3000 bp, Unknown
  misc_feature (1)..( 3000): cDNA_ID_2027099_gDNA_ID_1621111_Annot_ID_171791 3000 nt of promoter + ATG
ggagagggaagttgaaggaggataaaaatggtaggccaccggaaccgaaccttgttttcattagttgatcgagcacgtgccactaaagattcttagagatgacgtggcacgggcacagcaacttttagattctgttataattgttcgaatactaccaaaagtcgggtgaagatttggggtcaatttgatgatcataaaggggattatattctccttctcaagcaagatgtggtatttactagtataatagatcattcgttatcttgaggtagacctctccgtaacgttcacaggtgcatgaccaagtaacaatttgattcctttccagcataacgtcatgttggttgcaaaaagaaggcaaagtagagcaagcaagcaagcaaagcatttttcttattttatattttgttgcggattccaccacccacttgaaaaattgacatgtcacaatgatttcgtatcctagtcttttattatttaacactctcacaatcccattactctacacctctttcattaagtcaacacacggttttcaaaaatccactaccctcccaccacctagaatcttttgttacctaccaacaccctcctttgttctctttatatattggtccaactaaatcaataagggaaagcatccttttggttggaggaattgctttcattctcactctttgtgtgttgatcaatggactagctaataacaagttcctcctctatatatttcaaaagaatggaacagaaacataaacgaaagacagagtacctgatgttgatgattcattgtctgtctggagctcccaaatgccttttatgcttacatattcataaccaacaacggctattaattataaaccaaaaacacgaaataagtttgtagcaaagtgaaattaggaatcttggagatggatccattagtagtaggataataggatatgatggaatttggttggggaacagtgataacttacgcttgcttccggcgccgggaaagttggaaaacctacaaagtacagaaatggatctgggccttgaagtgggctttttattaaagaaaaaaatacatctccgttatcaatcaccatcttcttctatctacaaattaaagaaggtaacaacagaacgtggtggatcatgtggttaggcattaattatttgctttgtttcgccgttttggtaacacacagacacagttccggtaagagcttttgcagccactctttatagttatttagaattggcgatcgaatcaatctcactccctccctcccttaagtcttgttgaatctgctgaattgttttataaagagttactttggcaaaatggaaaatccggcgaagagagtgttgatgacatccaacggcgacgaggtgtcccgaaacatcgctttccatctagccaaacacggttgcaagtgagtctctcattttgtcttctttcctcctatcctgtgtttcttcttctagccccgatttgtgttgtggttgactttggtgtctatagttaaccttcaaaaaatgcaatgtactgttgctaggttggtaatgatgggaaatgagggttccctaaggagcattgtagacaagattagagattccattgagggagccttccctgccgatgttatagcactcgacatggaatctgactctgaagttgcttttcatgccgctgtccaaaaggcatgggaactttccggccatttcgatgcttttctcaactcttatacctaccaaggtttaatttgcttcttgtttttcactaccctgcctttgatgctcttgtgtgttgatcattcctttattcaacaatctttctttcttgcaggaaaggtgcaggacattcttcaagtctctcaagatgagttccacagaatcacaaagatcaatctcaccgctccatggtttctcttgaaggctgtagccacaaggatgaaggaccatggatcaggaggctccattgtcttcatggccactatcgccagcggagagagggcgctttaccctggcgctgatgcctacgcttcaacttctgccgctattcaccagctcgtccgggtatgcatcctagctcctaattagacacatcgcgttcgtaacttgaatatgtttgttgatgattgggtttcaggcatcagccatgagtctcgggaagcacaagatacgggtcaacatgatctctagagggctgcatctggatgatgagtatacagcttctgtgggaagagaccgagcgcagaagctggtcaaggacgctgcacccctcggccagtggctcaacccggacacagacctctactccactgttatctacttgatcagcgatggctcacgcttcatgacaggcaccactgtcttggtggatggagcgcagtcccttacgcgaccccgtctcaaatcctacatgtgatcaatgcctagtattattataattctatgttgtgtgtaaaaagtgaatatgaatcaagtttgaataactatggagggatgaataatccatggaatcaatgattatatacttttgacaagtatagaagaaagcaaagagccaaaatagtcaacaatctcaacatcattcgagctcattgtttattgaattcaatcaagtttggtaggtgaacctcaaatacacgtgatattggatattatcttggaaaccttgctaatccaaattgtaaatcaaataagaaaagaatgattacctcagagatctagatgcatattgattcttgaccaagaaatatgtttgaaatttgaatccattgaaccaaaatttgaaggagttgcatatataataatataaatcagaatgatgtagccgccacacctttttgtttccacaaaactctttttctgtgatggatccgctaatgtagccatattttcaatatatatcactttctctggcatcttcgctaccgtgtacgtctctctttctctccctcccctccttggcttttttcaagttcccaccataaacgcagagggagttaagaa

SEQ ID NO: 6886 - DNA, 3000 bp, Unknown; identical to SEQ ID NO: 6877
  misc_feature (1)..( 3000): cDNA_ID_3040948_gDNA_ID_1621111_Annot_ID_171790 3000 nt of promoter + ATG

SEQ ID NO: 6887 - DNA, 3000 bp, Unknown
  misc_feature (1)..( 3000): cDNA_ID_2123597_gDNA_ID_1621111_Annot_ID_171789 3000 nt of promoter + ATG
attttacatgtatgtatatgagtctcttatttgatcaccatagcaagcatacagtatcattcattgatgattaagtacgtacctggggaatggattgttcttgactgctttttggccgtacttcctccacctgtatccatcatccagtatatcaacctggcttcttgtctggaacgcgtacctcgcttctctctctttcttcttcttcttactccttggcttctcttcggatgatgttgtcggctgagcagagttgtcgaccccatgaaactctgtcaagcgaggatcaaccgatgatgaacatggaaacaacacatcacacctcctatcctccatttcttaactccctctgcgtttatggtgggaacttgaaaaaagccaaggaggggagggagagaaagagagacgtacacggtagcgaagatgccagagaaagtgatatatattgaaaatatggctacattagcggatccatcacagaaaaagagttttgtggaaacaaaaaggtgtggcggctacatcattctgatttatattattatatatgcaactccttcaaattttggttcaatggattcaaatttcaaacatatttcttggtcaagaatcaatatgcatctagatctctgaggtaatcattcttttcttatttgatttacaatttggattagcaaggtttccaagataatatccaatatcacgtgtatttgaggttcacctaccaaacttgattgaattcaataaacaatgagctcgaatgatgttgagattgttgactattttggctctttgctttcttctatacttgtcaaaagtatataatcattgattccatggattattcatccctccatagttattcaaacttgattcatattcactttttacacacaacatagaattataataatactaggcattgatcacatgtaggatttgagacggggtcgcgtaagggactgcgctccatccaccaagacagtggtgcctgtcatgaagcgtgagccatcgctgatcaagtagataacagtggagtagaggtctgtgtccgggttgagccactggccgaggggtgcagcgtccttgaccagcttctgcgctcggtctcttcccacagaagctgtatactcatcatccagatgcagccctctagagatcatgttgacccgtatcttgtgcttcccgagactcatggctgatgcctgaaacccaatcatcaacaaacatattcaagttacgaacgcgatgtgtctaattaggagctaggatgcatacccggacgagctggtgaatagcggcagaagttgaagcgtaggcatcagcgccagggtaaagcgccctctctccgctggcgatagtggccatgaagacaatggagcctcctgatccatggtccttcatccttgtggctacagccttcaagagaaaccatggagcggtgagattgatctttgtgattctgtggaactcatcttgagagacttgaagaatgtcctgcacctttcctgcaagaaagaaagattgttgaataaaggaatgatcaacacacaagagcatcaaaggcagggtagtgaaaaacaagaagcaaattaaaccttggtaggtataagagttgagaaaagcatcgaaatggccggaaagttcccatgccttttggacagcggcatgaaaagcaacttcagagtcagattccatgtcgagtgctataacatcggcagggaaggctccctcaatggaatctctaatcttgtctacaatgctccttagggaaccctcatttcccatcattaccaacctagcaacagtacattgcattttttgaaggttaactatagacaccaaagtcaaccacaacacaaatcggggctagaagaagaaacacaggataggaggaaagaagacaaaatgagagactcacttgcaaccgtgtttggctagatggaaagcgatgtttcgggacacctcgtcgccgttggatgtcatcaacactctcttcgccggattttccattttgccaaagtaactctttataaaacaattcagcagattcaacaagacttaagggagggagggagtgagattgattcgatcgccaattctaaataactataaagagtggctgcaaaagctcttaccggaactgtgtctgtgtgttaccaaaacggcgaaacaaagcaaataattaatgcctaaccacatgatccaccacgttctgttgttaccttctttaatttgtagatagaagaagatggtgattgataacggagatgtatttttttctttaataaaaagcccacttcaaggcccagatccatttctgtactttgtaggttttccaactttcccggcgccggaagcaagcgtaagttatcactgttccccaaccaaattccatcatatcctattatcctactactaatggatccatctccaagattcctaatttcactttgctacaaacttatttcgtgtttttggtttataattaatagccgttgttggttatgaatatgtaagcataaaaggcatttgggagctccagacagacaatgaatcatcaacatcaggtactctgtctttcgtttatgtttctgttccattcttttgaaatatatagaggaggaacttgttattagctagtccattgatcaacacacaaagagtgagaatgaaagcaattcctccaaccaaaaggatgctttcccttattgatttagttggaccaatatataaagagaacaaaggagggtgttggtaggtaacaaaagattctaggtggtgggagggtagtggatttttgaaaaccgtgtgttgacttaatgaaagaggtgtagagtaatgggattgtgagagtgttaaataataaaagactaggatacgaaatcattgtgacatgtcaatttttcaagtgggtggtggaatccgcaacaaaatataaaataagaaaaatgctttgcttgcttgcttgctctactttgccttctttttgcaaccaacatg

SEQ ID NO: 6888 - DNA, 3000 bp, Unknown
  misc_feature (1)..( 3000): cDNA_ID_2034471_gDNA_ID_1621111_Annot_ID_171786 3000 nt of promoter + ATG
ctacgggttataaaacaatgtatatattatatatatacaaacagctggctcatatatatctgtaatacactgatacagaggaaggtacatatctgtgcctatgtatgcgcgtggtgtagctgtatatgctatggaacatgtatatatgttataatgtatattgaatttccaaaaagctttagttagtaaaaaaataaatggaaaacgtaaaaacaaaaaagaaggcaaaagaaaaaggaagatatcgcatgtcggtgtcgcggcgaaaaggcggtgagggtattgtgggagtgctcacgaattcccctaaaaatcctcatttataattagtatataaccctaagcccatgcaaactgcaatcccactcatctttatcactaacactaactatcttattatttcaccaaaagataaaagtatttcatcgagatatacgtcgatatgttgttctgcatgcaggtgcatggccctctattattttttgtcgaccacaagtttttgtctgtttacaacataagatttcacttattattgtttttttattttaattgtttgtttatcgcactgatagtctgatacacacattcacgaactgcgtttatccctcattgccacctaataattaacttaggcttcacaacatttgtatatcccaattcatttattatatacagttgtttaccgctacatatatgtgcatagttaatctaggaaattaatgttctaagcttttatcgtagttaatattggaacaaaaatatataaccgagtaacaaaagtcgtagtaaatagttttaaatataatatttaacaaaaaaatatagtataaatataataatgccgatcgacaccaaagttataactatatatcaatccaagcctcctcattcagaaagctttcttttataaaactgaaatattgtttagtataattagtactaaacaatggtcaaactgaatattcacaattgtgtttagtatatttcgaagtaatttatcgtgtaaataaaatattaattgtatatatcgttgtaaaatataagaggaacaaaaaaagaaatggaaatagagtaaataaatcagtgattaaggaatgggatagacacaaatgaatcatacggatttaaattagaaaaaaagaaattcaaaataagagagagggtgattgaccatcgggaggaagagagggacattggcaacaaagtggtaaatagaagtagaattaagaagacaacaacaataaaagaaaagaaaaaaaagagagagagaagaagagatgaaacagagttttgtgccccacgcgagccgcctcgcctccccctataccctgaacctttttttctctttctcgcttaaacagacctaaacccaattaatcatcccttagcttatttattagggatcatattgatacggaatttgcagtccccactgataactgaaaggcttttatgtagtactagtcgtatttacgtgaacacattattctttgagtattatcttccatacaagaggagtatattaatagacttttaccttagcactccgaatgatcctcgactattgtttattaatacacaaaacactcctctctttttttattcgtacacaaaacactcctctcttcttttattcgttattttaagaactgaattggtgttcctttaaattttttttaacacgttccacgcgtactttttgtgtgtttaccttttttaatttactaattaataatgtagtacgtactatatagttaaagaaagagggcaaaatggtaaataagagaagagcagctttaagaaaagaagagaagcaatattaactctctctatatatcttaaagatgtactgtaataaataaaaataaaagaagaagaagaaggagaaggggccgttaaaggagtaaccgacaagacggctttactttttcaggctttgctcctttgattgcctcatctcgctgctgacgttatcctcccgttgactgtctacgcactcccttttttttttttttttttttccctaaatatatttactcattattatgtcatagttttacaaggtcgaggttttgtagttttgttaatgctgcaaatactactaatgtatactaatgctgcaaatactaatacttttttttgtttgttccattttttattggtatataactataaattataagaacgtatagagatgtctagcagttttggtcaaataatttgtaatattacggagtatataatatagaaatatatggtacgttgtaaatgtaatgaagggatatatgcaaaatagtactaatatatagcttcgtgcgcgtgacaagcatgagagcatctgatatacctccttgtcttctttcactttcaaacaacagtcaacggctgctttcttctgtttcttcttcattctttggaatttgaaacgtattactattactagtattttgttatgctgcatagatattgcgtcaaaagttatatcacatcacgatattgtctgttatgtttggttgtttatcgatttcactaggttcgttatttttattttttgcaaatttcaatatacaaattattcattttagagtagtaatttacccatggtttttattttattgggtcaaacaggaactttgatcgacgcgtggcgtgggaatataacgtatcaatattttgggctttttaagtgatgattgttttgtaagctttttgagtgatgattgtttgatgggcttattaggcgactgttttatgggcttttagttaattgcaccctttgggcttatgtactctgatttttttgtttggttttttagttgtatttgtaatttctgttcgagcactaaaaaaggggaacattgtcccaattgttctttcgccattagtaccaaactaaactggagatcaatatatagtattagtatgattgattgtatattggggtttcgtaatcatcgcgaaactgcagtataaaattcgaaagtttggtttaggcgtatg

SEQ ID NO: 6889 - DNA, 3000 bp, Unknown
  misc_feature (1)..( 3000): cDNA_ID_1022008_gDNA_ID_1621111_Annot_ID_171811 3000 nt of promoter + ATG
gactccttaactaaaactccgcagatagaggagacataggattcaacatacaccatagggtttatctggttctatgaaacagataatgaggaatataagccaattataaatgattaaaaaaagcttacaagttaatgagcctgctattcaaagccttgcattcttgaataatctcttcctcatcaagaagctcttccaacgtgaaattttctttgtctaatattatctccacctgcgctcataacaaaaggaaagaacatcaatacatgaacaattcacgactcagagacaataattcaaaaaattgaaatctagcaaatccaaaaattcgacataaattatatgaaaaagcaaagcaacggatagaaactccaataatctaattctaaagcatatcagtatctgtagacaagatgaacgctaacatacaacacgacatctaaaaattcaactcacaggagatgatgcagagagagatgtgagcttccaaaacatggtggcgagggaggagtggagctagagaaagtttcgccgtagctgaagagaataaggagaacttggcgagatccgccagaaacctagaagaaaaatctaggtaatcgcttcttcgcggtggaggagtatcgatttcagctcgaaaaccctaatcgatcagtgaagaaagagattgagagatcctaaagatgatggaagcggagatgggagatcggaggtcgaaaattttgaaaattaagaggccgaattttgcataaagaaggggaaaagtaaaaaatggtcttattattatttgttattttattcctttgattgattaagaaaaagttgagcgaattattattaactaaatcgccattttcacagatttgtgtgtctaataaaagtagacttatgattttttcgtagtcgttgtctgatgatcatgattcatgacgatggtggtggtggtggtgatagtaacatacatcatctttatggatacaattgaatgatcgtgagatattgtaacagagagggggatacttgcgtcaccagcagcaggtgacttgtgaatttgttgtgataaagatcacattaatttaaataaaatcagctgttcaatttgcggaataaatagttggcgaaaattgtgcttataaattttacaacgggatgatgaagtacaataagcaaatcaattttgtggataaagaaatgcatatgattgtcttaagtttgatttaatggtgtagaataaaaacatataaagacaaaagttggttgaagtgtcaaacagagtgaactccgtaaacagcctctttttcttcacaccttaagaaaccatagacgaaaaaaagtttacatatttttagaaaattttcgatctttaaaaaatttatgaggagatttgttaaccttacataatacttgacaagagaatgatgaaatttttttagacaaaaaaaaacacgttgaaaagtctcatatatgatgtcactgatttttagatcaaaatgttgacaccccaatttgatcgggaagcaagaaaacccggagaacagatataaaattaaattgttctattctacacaaaaccttgggcatttgttaaattttaactatttacggtttattttaaccatctccactgagaatttatcgttacgtttatggaaatgactacacacatcttcgtttttctaatcatttataggtgtgtacttgtttttccttcaaattttcattgtttcacttgaaaagtgcactctgaaaaatagaaagtacactgaaaattcattgttgttttcacttaaaaagtgcatactggacaacaaaaaacctcaacaaacaaacgatcaaacaagagagtgagagacctaaagatatttttttccactagcgcttcaacaaagaaaaaagaagagaagctttcatttaaacgtggtacgttgaagtatacatgatgatgtaataaagtactacaatgactcaacaacgccagctcttggaatggatattagtgggagaagaagatccaacaactttatcaaccagcttcctcaatcccttcttcttcttcggggtcttcttttccttatccgtcttatcttctctcttcctctcttcttcaacttcttcctcaaactgtgaacacagcttaagcacttgctcctctacattattaagtctctctagcaaagttcctttccgctcagtctcctccctgacttgttccatcgaacggcagtgtaccttccctatgctcctcggtgacgacagatccattgacgatggctgagtcccactagatggagtcgatgggctcgagcttctaggcgagcttcctttcatctcctctaacttcctcaccatgaaatcaatacgatccaatcttgaaagtatcggttcttctacaacagccattattgataacaaacgacaacgtttccagaagctttggttgtgtcggaatagttgaaagacagtatcgaaagcaaaactcgtcttctcttattaatagagtaataattggagattgaaagaacacgagctaggccacgtttaaatattgcagagagagttcatggagactcacacgtgttgttgataacacgtggtggttccagcttgcggacacctcttctgtctcatactccaacattacccattcttccttatctaatccctaaaatttctttacattatgtcgggaacaagataatgtattttggatgcttgtataaaaacattatcttatcccaagtacatttaccctaatttatttatttctccataaactatacaatgttttacgaggtgtatgcgaaacagtgaaagcatgtccaataatttattttgaagtagtcgtcatgcatcttcattcctcaacatcaccatgtccattccttaaattgatcatatgataaatgggcctaaaaggctcaaacaaataagcccatgtaaatatccatcgatttattcaggcgaaagggtgaaacatactgtagttctaaaaaattaatg

SEQ ID NO: 6890 - DNA, 3000 bp, Unknown
  misc_feature (1)..( 3000): cDNA_ID_2123646_gDNA_ID_1621111_Annot_ID_171810 3000 nt of promoter + ATG
acagccattattgataacaaacgacaacgtttccagaagctttggttgtgtcggaatagttgaaagacagtatcgaaagcaaaactcgtcttctcttattaatagagtaataattggagattgaaagaacacgagctaggccacgtttaaatattgcagagagagttcatggagactcacacgtgttgttgataacacgtggtggttccagcttgcggacacctcttctgtctcatactccaacattacccattcttccttatctaatccctaaaatttctttacattatgtcgggaacaagataatgtattttggatgcttgtataaaaacattatcttatcccaagtacatttaccctaatttatttatttctccataaactatacaatgttttacgaggtgtatgcgaaacagtgaaagcatgtccaataatttattttgaagtagtcgtcatgcatcttcattcctcaacatcaccatgtccattccttaaattgatcatatgataaatgggcctaaaaggctcaaacaaataagcccatgtaaatatccatcgatttattcaggcgaaagggtgaaacatactgtagttctaaaaaattaatggtgtcgtcaaagaaacccaaggagaagaaggcgaggagcgatgtcgtcgtcaataaagcgagtggtcggagtaaacgcagctccggttccagaacgaagaagacgtcgaacaaggttaacattgtgaagaagaagccggagatttacgagatctcagaatcatcgagcagtgactctgtggaagaagcaataagaggcgatgaggcgaagaaaagtaacggcgtcgtgagcaagaggggtaacggaaagagtgtaggaattccgacgaagacgagtaaaaatcgagaagaggacgatggaggcgcggaagatgctaagatcaagtttccgatgaatcggattcggcggatcatgagaagcgataattctgctcctcagattatgcaggatgctgtatttcttgtcaacaaagccacggtatagtactaattagacatataaatttagcttgaggaacttaatttcacatggtttttgatgaatttgggagtatcaattgctagtcagtgttaattgggcgttataatctcgcaaattgctacagtaatgagattgtttctgttaattaagccgggaattaacgttattgcttcatctccatgtgtgtttgatgaaaccgtagttactgtgcttgattgtcataggtttagcttttacatccagaacttgtagacacctaacacatgagaaagtccttatatatgatttaggttcatattttcaaagcttaagtgatgagtgtttaattttcctgtattggaacttggcattgttttttctttcttttgatttcatcttgtgttcatcgaaattgatgttcattgcgtttacagtacattaactggtttttgtgattgaaggagatgttcattgagcggttttctgaagaagcttatgatagttccgtcaaggacaaaaagaaattcatccactacaaacacctctgtaagctctaatctcgtccctatttgccaatatctggttacctcaatactgaatcccatgtcgaaaatctcatgctgctgcaccaattgctgaacttaggatttctggcttctgcacaagggccagtagttagtcttaggaagagtttagataatgagttaatccgttcgtatcacttgcaagatttgttgcactcctaacataattgatgacactgtcatttctactcgttggcagcatccgtagtgagtaacgaccagagatacgagttccttgcaggtacttaataacctctgaagtattcgttttatgagttccatgtggtttacgaacagcattttaatacctgtaatatcttgaatgcagatagtgttcccgagaaacttaaagcagaggccgcgttggaggaatgggaaagaggcatgacagatgcaggctgaaataaatccggttggaatcgaactgaaccatttggattcaaatttgtgtccctgtcctggtttatacttcataggttccatccgcccgatcttcacctttcttattaaccactactgagattgcacatatttgatttctagaatgtatacattttttttcttgtttcaagttaaaatttgtaagagttgtcggaattctaatatctttctttagtatcaaaaaatacatttttgcagccattttgtgaaataaattttgtagttggacttatttacaatggctgccactggattttgatgtttgtatttgataattagaaagaaaatcttcgaattaaatatttgacatttaacaatctttccaaaatctctccacattaactaaacagagacaaaattacaaaatatttagacaatgattcataaacatatcataaataagatcaacattaataaaataaatggttttttttactggacgggtttgacaggacgttacttaataataattgtaaactataaaataaaaatattttatagttagatacaatttgtaaacttttatatatactaacattaaaaaataaattgtttccgcggtgtaccgctgagttaaaatctagttataattataggacaattggtcagaaaatatttagaaaatatttttaccataattattcttactaatcaaattataatattagtaaaacaagccaattatcaaaaaaaggtttttaaaatcattcttctagaccaatttgaaaaaactttccacattttcttttctttttacacattttataattctgttataaaataaataatccaaaataagagtttgggggtaaaactaaaaattcaaataatatgatgggtatgaataaaaattagggtgggtccaccagaagcagcgactgagagcagctctcagccgggaaaatccgacgatccctaaaacccttttccttctctttggtttgctcgagaaatcgtttcctgccatg

SEQ ID NO: 6891 - DNA, 3000 bp, Unknown
  misc_feature (1)..( 3000): cDNA_ID_3049165_gDNA_ID_1621111_Annot_ID_171806 3000 nt of promoter + ATG
gaaaaggtttctggtgtcagtgtaatgacttccgctttaactaattcaatcggtataaaaaggagaagtataatcatgggagcaacaagccgagcacctagcgtcatcgcagcaaaaccccaaattttgatacttcaccagtcctgttaacttttcttccaaatttgcaaaataattgcatttaaccacactatttccaaaataataaactacaaaggatcaatgcacagtgcactgaaagggagcataagaaacaccaaaatctaagacaaaaagattatgaaacaacacacgattaaatagattgaagttgcaaacccgagtttaactaataacattaaaagaatgaaactttcaaaacctttcaaggttttactaatcaattgctagcaaaggcaaaactccaaaccgattacaagggacgaaattaggatttggttgagaaaacatttcaaaagagaaacgatctattcatctgatctgaaactaatacgaaagaattgaagcaagattcattggagggatcagatagaagagtagggatatcaaatcttagatgtgtctgaatcgcttaccttctgcaacaccaattccgagagcagaagaaagagaggaatgtcaaagcatgtttggttttagaaagttaagtcccctaataataataacttaaaacacaaatacgtaagcccattactttaggcccaatactaacatcatgctcctttttttgttgggtggatcttcttcccatagccatcagcttcttttactttcttcgtttctttgcaaaagaccagcgataattatgaacaaaggcggtggatccggtggcggatccggtggaggaagcggtccaacggccgccgccgccgccgcggctttacagaagcaaaaggcgttgttacagagagtggagactgacatcacatctgtcgtcgataacttcacgcagatcgtcaatgtttcaagggtaagtgtggtttctttccggttttaaagttaggatttatcagaaatttcaatctcttagattggctttaagattagtgtttattgaggcgaaacatgtttggtttcggtaggtgagtgatccgccggtgaagaactcgcaggagacatacatgatggagatgcgagcttctagaatggtaaataattacttcactccattgaattcgaatgatttctttaataggttcatgcaaatcagggtttaaatcagatgtgaaacgttttgaatctctgccaaagtacacatatttggaatgtttttgagtctaccaaacattcactcatgattctccaaaatctaatttttactgttgtttcaaaactgggttgttttgttagcttatgtcctcattgtgtttgttgaatgatttcttttaggcatatggattagggaagttacataggccactcaagtgttgttgaaagattttcttatgagtctctggagtgttgttaacttacttcctcaccaatggtggcaggttcaagcagctgattctcttttgaaactcgtatcagaacttaagcaaacagcgatattttcaggatttgcatcactaaacgatcatgtagaacaaagaatagaagagtttgatcaagaggccgagaagacaaatcgattgttggctagaattgctgatgatgcatctgccaatcttaaagagctcgagtctcactattactcttctgctcagagattgactctagacatctgatattagaatgcctggagacaccagaggaaacagataaaacaattggttcataaaccagaggaaacggccatcgaaggatatgcagtttgaagtcatggacaacgttttggactatcctttcccacattgatcatatttcctctctcaattcgcatattacttagcaatcttaaatgttccagtctgatgaacaagcgtttgatgttttcatcaatcattagtgatttttttgctgttatcctcttgtatgttttgataattacgtgaaattacattctcttaacctgcaaagtgtatatcgtccaagtaaaaccttcttgatttaattcgcgttgaaccaaatttaattatattccacttttggattgaaactatcaaattcaaattagcttgacttatgaaacaagagcgacccctcgaggttagtggacttttatgaaacgcgaccgactcttcaaggcccaaagaaaaagagaatattcggcgggataggggtacgtttgtaatttggcaaacgatgttatgttaaaccctaacttattatttctttcgattcaccactataaataaactcgaatcccaaacatagctttattccttgcttcatttttcgtcaccctagccgctttactctcttgcgatatctctgaggtaagctttttcgtcaccatcttcgatctgcttctttctcttctgttgatctgtgttgaatctgtttcgatccttctcgtttgtttgttgtaatctcttggattcgattctctttgtttatagatcgtttggaatttctgatctgtggtgtaaagttttatcgatttaggagaacaaagtttttacagtgccatcgtattgttttttttcttcatgccagctgatgataaactatatgatcgatctggttctgaaatttttgtattgttcaatggattgttgattggatcttttgatgtatgtgatattaattgtcgatttgaattgtgattaggtaattctggagcagcataaacaatcaattgattcattcttcttgataccaagttgtggaaactctaggattgtttgctgtatatctccagaattgctgttttgattgaatttagggtcgcttagctcagttgatagagcaccacattttttgtggtagaaatcggtttgaatccgatagcggcttttaacaatgattgttttttgtgttcataagtctactgtttttcttgattcaatatttgattgttctttttattgcagatttgtttgacagtctctaaccatg

SEQ ID NO: 6892 - DNA, 3000 bp, Unknown
  misc_feature (1)..( 3000): cDNA_ID_3049169_gDNA_ID_1621111_Annot_ID_171805 3000 nt of promoter + ATG
atgatctgctgttgtaacaaggtaaccatatctttcatctgttatgtgactacacattgcttctctttttgtgttctgtctcattaattgcggtttgttacatgttgtttgtagatggatgccactacccccaagtactccaaggccaggtacgatgaaatcatcaaggaggtgtcttcctacttgaagaaggttggttacaaccccgacaaaatcccatttgtgcccatctctggatttgagggtgacaacatgattgagaggtccaccaaccttgactggtacaagggaccaactctccttgaggctcttgaccagatcaacgagcccaagaggccgtcagacaagccccttcgtctcccacttcaggatgtctacaagattggtggtattggaacggtgccagtgggacgtgttgagactggtatgatcaagcctggtatggttgtgacctttgctcccacaggattgaccactgaggtcaagtctgttgagatgcaccacgagtctcttcttgaggcacttccaggtgacaacgttgggttcaatgttaagaatgttgctgtcaaggatcttaagagagggtacgtcgcatccaactccaaggatgaccctgccaagggtgctgctaacttcacctcccaggtcatcatcatgaaccaccctggtcagattggtaacggttacgccccagtcctggattgccacacctctcacattgcagtcaagttctctgagatcttgaccaagattgacaggcgttctggtaaggagattgagaaggagcccaagttcttgaagaatggtgatgctggtatggtgaagatgactccaaccaagcccatggttgtggagaccttctctgagtacccaccacttggacgtttcgctgtgagggacatgaggcagactgttgcagtcggtgttatcaagagtgttgacaagaaggacccaaccggagccaaggttaccaaggctgccgtcaagaagggtgcgaagtgaaccatcctcaaaacctctatctgccgcagtgaatcaaaggacagtgttagttttattacaatagtttggtatttggtcgcgtgtctgtgttcttgtttcgttttctccccgtcagagcgttgttctcgtatggttctgatcgagtggcggatctacacacacattccttccctgtttttgctttttatttgttttctcattttgaactgttttaaaatttctgttatatgaatgaatgttttcctgcggttattatcttctttactctaattttctcttgttgcgtaaatcgtttccgaaatctttttacctctcttctctattgtgcataattaatcgctgctttcaatttaaactttttgaaagctaaaataaaagttttatggtttcaaatactcaacccgttaccgttctgtccgcaacacgtgtattcaatttgttgctgggctgtaatgatcggcccaaatcaatctaattttttatttatttttacatgtccaatataaggcttaatagataaattggacttggttaaggtccattatagatgccactgtggtaccattagccttgcattgttttttttgtttttacatgcccaatataaggcttaatagataaattgaacttggtttaaggtccattatagtccaaataataaggcttaatagataaactggaattacatgagagtagtggtatcataccaaaattcatgaattttgcatcattattttctggcattggatgatgatgaatatataaatatttcgcttatgaaatagaaagcctttgctcaaataatgaagcacatgagttgacttaagcaaaataaggcgagatgtttttttttttgttaagggtttaataacggcgagatcgttaccagtgtatttgaagcacatcaatgtaatcagttgtacacaggcaggagatatatagcgatcagtacataggctatatgtatatacgtacttttgcatgtgctctctacagcgtttcatatgcagcttattttttttttttaactgatttgttctgatttataaatcttcgtatgatcgtatctaaagagaacatgctcccgtgagtcgttgacgttaagtatggggggagacattaccggaacgaaaattagtaaaacaggcggccagacataagggtaaaattgtcattacgctaaggagattatcttaaaccctaacttttttccgcttcaccactataaatacaaacttgtttacccttccaatttatttctctacttgtccacttttctacagccgcatcatccttctcccttgtgcgatatcgtttgcgtgaggttagcttttcatacgattcttcgatttgaattcttattcttccgatcgatttggtagattcaatttcgtcccgttgtcgtttgcttcttcttaatcacttctatgcttctttacatgtaactctctgatttgttgataggatcgtttagattctttgattccatggctttgaacattatcgattgaggaaattaacgttctgtagtgcaatcgaactggctttccttttattatttcaaattcagaatcatgtaatctgtcgatctagttctttgaattttctgttgtgcgattgattgtttgttagatccatatgtgtaaggttaaattgatctattggtataatacatacgtttctagttatcaaattgatttgtgattgggtaattctggagcagcataaaaactccattgtttctttccttcttgaatctaagtcgtggaaactctaggattgtttgctgtatatctcttgaaattgcttgtttgattgaatttagctcgcttagctcagatgatagagcaccacaattttgtggtgagaaatcggtttgaatccgatagcggcttttaacaatgattgttttttgtgttcatatgtctactgtttttattgattcaatatttgattgttcttttttttgcagatttgtctgaaaagtagctaaccatg

SEQ ID NO: 6893 - DNA, 3000 bp, Unknown; identical to SEQ ID NO: 6892
  misc_feature (1)..( 3000): cDNA_ID_1988895_gDNA_ID_1621111_Annot_ID_56091 3000 nt of promoter + ATG

SEQ ID NO: 6894 - DNA, 3000 bp, Unknown; identical to SEQ ID NO: 6891
  misc_feature (1)..( 3000): cDNA_ID_2993545_gDNA_ID_1621111_Annot_ID_56092 3000 nt of promoter + ATG

SEQ ID NO: 6895 - DNA, 3000 bp, Unknown
  misc_feature (1)..( 3000): cDNA_ID_1816083_gDNA_ID_1621115_Annot_ID_56169 3000 nt of promoter + ATG
caatgatggcattccattaaattactactattgaattgtacacaaatcctccatcacatcaaccaacaaacaaagaataatacaaattaagaatatattccaaagaaattgataaatagtgattgttagttgtaactgtaaacacaaaaccagaattcttaattattaatagaaaaacaaaggtttcgaatggtaaccaaaatgcaccgtgcaatcatacatataacattagttagttatttttagaatatattgaaaagataattattgtataattactaagtatattcaatttaaagtcgtaagaaaaaaccctttattggctctaattgtttaaaaacatatattaggattcactaagatgtataattgaaatcaatttccaaaccatgtaaaagtactagttttctcaaatagtttgttgctattagtttgttactaaaactaattcacacatttttatcaccaaaagagcaaaaatggacgtgggatgaatatgatgatattttttttgaccttgttgtagggtctctcactctcttcttccattaaagaattctcagagcttttcttacttcaactgttttcttggcccatctcactgaaataagtgtgataaactctgcctgttacattatttggattttaataggtgaagtaacggaatatgtaatctacatcaaaataatattcacttctatctctctaccttatggcattagaaaaatccaattattacatgaaaggaaactatagtaattagatgaagcatagaagcgacaattaaaagacataaagagagacaagtcttggcaagttttctctgtttcacactttggagacgaaaccttaaaggcttaaaactgagaaaaacaaagccgttggcttttgtaagccgctcgttcttcgagacaaaacacactacactctttctctctcactcactcttcatctcttttcttctttctctctctcctaaaaatccgacgaaattatgattcactttaccttttaatcaggaatatccctgtttcacccttcttcttcttcttcttcttcttcttcctcgtgttttttttccataacattccctctgaatcttcgttttttattggaaagaaacaatctaatccaagttcaagggttttctcatcttcagtggctgaagttatgagctttacaagatgggaagtgttctttggtctctctgttttagccttgacaatgcctttctcagctggagttactaatctacgagatggtaataatctttctctgcaaagttttttttatttggattttgctttgactctccttcttttggtttagtgaacactctagattttttttagacttgtgtctagtgaaaatgacttacatcagttttagggtaaactaggtaagcaatatagctgtttgggaagctccagattggcaaagttctatgattttgaggctacctcaaaaaccctaaaaagtttaggtttttgacacataagctcttgttagggttttagttcaagaccaagaaatttgttcttattgttcttcattaaatggttatcataagaaagattctttaatctctagaaattttactttttgatgtgtttgtctgttgtttaataacttctgcagtttcggcgattaataacttgtatatcactttgggagcaccatctctacatcattggcttgcttttggaggagacccttgtggagaaaagtggcaaggtgtggtgtgtgactcctcaaacatcacagaaatgtatacttcctcttctgctcttgtaactctttgttatggtttgctttgagtcaccaattcaggttctaaccacgtgaattattgttgttggctgcagaaggatacctggcatgaaggtaggtggaggcttaagtgatactctggctgatttttcatctatccaagtcatgtaagcaaagcttcttgtcttgttttctttcatcttcatcttttgtatgaggcttcttgctatgtgaagaacatgcaagatgttgttaccattgactataaggtttggttataatcttgaattgctttgtgatactttttctctcttctttgtttgagtggacagggacttcagtagcaatcatatttcagggacaattccgcaggctttgccttcttccatccgaaacctgtgcgtttgagaattgactatgtgtatggcaatacttatgtttccaacagttaaaagacacttcatgtttggtttcattttcttgtttcagatctctctcaagcaatcgcttcactgggaacattccctttacattgtcctttctatccgatttgtctgaactgtaagtctttattaatgtagataccgtttcttgcatctgcggtttttcctctgtttgaagcagactctttcttttcccttcaggtcattgggaagcaatcttctatcaggagagataccagattactttcagcagctatcaaaactgacaaaactgtatatttcctcctcactaagtctcattttgtatcctcccatcagcgtctttcatttatacattaagtttctaatgcagggacttatcgtctaacatactggaggggcatttaccttcttccatgggagacttagcttctcttaagatattgtaagtgcacatatatgaaaccgtatacaaacattgttatcattgcttttatatgtgatgtggtcggactgtaggtatttgcaggacaacaagctcacaggaacacttgatgttatagaggatcttttcttaaccgatttgtaatcgtttttcaccttgcatactctttgttcttgactctccaaccattaagccaacttcagtatctcactatggcttttcatatttttgattcaggaatgtagaaaacaacttattctcgggacctataccgccaaatctattgaaaattccaaacttcaagtaagtattactaaaagaaaacttgaatgttttttttttccttttctttagccattcatg

SEQ ID NO: 6896 - DNA, 3000 bp, Unknown
  misc_feature (1)..( 3000): cDNA_ID_1816087_gDNA_ID_1621115_Annot_ID_56174 3000 nt of promoter + ATG
aatatttaatcttaatttcaaagatatgtacatcccacctaactttttttttccaaagtattttttacaatttcttcacgaagtcacccgcataagaatcaatcaatctacttatgcgatttcttatgttagttaacaacgagtcttataagtcatcaactagtaggtgacttggttgtggaatctctaattggrtggtaatatatcaactctctaatcgttttcttaatacattttccttatcagattatccatcaataacatctcaacgcgtgtcttattgtgggatgtctttgtcctagaattaaagaatacattgactgattcacaatttttctagaaacgtatccccaaaatcttttggccaataaggttattacaattccacatttaattgatattcatagttaagtgggtatccatagttctgagaatcatataagtggacatccattggccaatatggactcatggagtctggtctaacagttaagaggtccccatattgaacacaaaatttaattttataatcttctatttgcgctaagagatacaaaataatgtaaattacgtacaaaacaactaaaatagcaacacaactatttgaaggtgattagataaatcattatctcctattatagtagtacaaactacaatataacttataagtttcaagctagtggccattcaccgattcaagggatacaagtaggaaagatttactaatagatctatctaaaatttaagtttattcaaccatatttttttgttatacatcaaaataatatgaactgtcttatttttcatatagtattttagttattaaataaaatatcaatatagcaaccctttttttagaaatgaagctccaaaattaaatgtttatgtaaaatgctctatattcacgtagcaaataaacagccggaaagctatccatgaactgtttcttgacatatataaaaataaattaatgttcattgagcatgcaattcttgcactaaatgcccaattcttctattaacacttttatatacatagagacattaccttcccaagaaaaagacaaaaaaaaatgaacagttaaatgcaaaaaattaagtatatccatgatgaaacgtaacataaataatccggacatgatttccctctcattccttagcaaagaaagttgaattccatgtcataaccattcaacaaaacacttttcttttgcttcgtaagttttctctagtcttctaaacatgtatttaaactatttcgagacgtacacaacttgtccatttgaattatggaagtaaaatcgtatccacacttaccattatcaagctagcgacctatttttcttggccaaagccattattatgtgaactatataacggtcaagtgtataaatcagtttgtttaccccaaaaaaaaaggtgtataaatcagtttaaaatccgttttagttttgaccaaaatgattacacaactgatctattatacaatcatttaatatactccatgtgtagtggcatagtggatgtgtgctaataacgttcgcagactccgtggttcgattcctctcgtccaactagtttagtggtgagaaaaaaggcctatatttgatttattttctatatgatttagatattcaccattaaattaattagctattgtttgaccaaaaaaaaaaaaaaaaaaaaaattaattagctatcttgaaacaattagtacattgaattgaattcaagaatcccaacgcataaggttcgccacaaaactgcgtcattcgactttctagtttctaatgatgaggttcccttgaatttatttaactctttttttgcatatacattagaaaaaaatcactataaaataaaaattaaagggcaccatcaatttggaatatatcctccatttgcctttctctcaagtctcaacactcaacagtctgctcaaagatgttgcaacgtgacatgtctattttcttgttgttttaatgaaataaatcatcttttttcttaggaatatccgcaccatatataacctgtgagtctatgacgttagctatagttgtgagaagtattcgttagtttcatcaattttaatgatgctatattggttcgtataactttatcttatgatcttttctataatcttattgatatagttcctttataactgattacgctctgcaaaattgatggacaacatgtatttgacttcgattttagtgggcgatacattattaaagagaccatgtgcataacaattaaggagtacgagtgagctttttactaataaatataaagtacgtacatagcaaaaatcatatattcgaaagtttttaaatttatagttcaaattttttgaatacataattagcagctgatagtattgatttgtgtatccacaatacataaaataatcttcatcagtcggtaaacactaaacataccactcctaaacctggtttggtactgcaaaatctatataccctagctactttgacttcggaatcgtgcgtatttaaagtttgataaatgtttatgcattatatatctatattccaatttcccaaattatatatttcctcactagttaagcttatgctattgtggggtcgattaatccgccaattttcttaggttaataggattgtatattagttatatttatattacttttggccatgacgtggttcaaacccatataaaagaaagtgcttcatccactctatttaagtcaagtatacgaattctctcgaatttgtgcctataaatcttagtttttaagatggaattattcgaccaaatgaacaaattaaagccaccaattgccacctaggactattcttccatatccacttaattaaacttttaagaaaaaggaaaagaaattaaacaaaagcaaacaaagatctcatgatctttgcttataaatagaagtccaagtcttagatctttcttatcatctcactacaattcttgatcttcttcttaacttatacctcaaata

SEQ ID NO: 6897 - DNA, 3000 bp, Unknown
  misc_feature (1)..( 3000): cDNA_ID_1816149_gDNA_ID_1621115_Annot_ID_56175 3000 nt of promoter + ATG
gctcatgggtggatatgatccatgcttagatgattacgcgagagtattttacaacagagcagatgttcagaagtctcttcatgcgagtgatggagttaatctcaagaactggagcatttgcaagtactctccccaatatcctttatggttttttttttgtgtaatatttgaaggaatttgtctgaatgttctttggtattctaacttcagcatggagatctttaataattggactggttcaaacccgtcggttttgcctatttacgagaaactcatcgccggaggattaagaatatgggtttacaggtaaattaaattacgttcacgaaaaccaactaaattcctaattaatttcactctgacgaaaagtagttgactacaacacaaattaaaaacttcgatcactgaaactaaaaaaacagagtatacaattaggtggcttcctacgcaagtaaccactacatactttagcttcttctactttggttggttaataacaatatgaaagaaagtttattctccaatttttctaagccgttggtttttggtttctttttgtgatggatccagtggtgacacagacggaagagttccagtacttgcgactcgttatagcttaaacgcactcgaattacccatcaagacagcttggaggccatggtaccatgaaaaacaggtacccgtggacctaattcaccagttatatgaaattcttgatttgagtattgttagaccggttaaattcttgatgatgctataacaggtaagtgggtggcttcaagaatacgaaggtttaacgtttgctacgttcagaggagctggacatgcggtgccttgcttcaaaccaagcagctctctcgcctttttctcggcgtttctcagcggagttcctcctccgccatcgcggtagagaagaaattcaatgattaaaaagatgatttagtacgtaatctaattatgagtatttttgaaagatttttgggttttgtttcgttaacttgtcagacacacgagataggggaaaacaaggattgtaacttgtaagagagaatatgtgatttatgttacgttttatgtcatgatcataatgatcaaaagaaaaccttcaccgctttgagattatgatcaaatgaaaaataaatagctttttggtgcaatgtcattataatgaaatccaaattggaaccccagactagtttggcgcacacatttttttggtggtttttgttaattctcccttttatataattcattagtaaccgtagatttttgctacttaaatcgatggtcaaatataataaagttatgtatacggtatatgataatctctcttttgggtaagaatggaacattcatgcattaatcatcagaaaatctcttcccaaataagatagtaggatttcattcttaccaaccatatttacttttgtattagcattatattattattattcccatttgttatcttagagataagtttgaaccattgacccatcaaattattattttttcattcagaaatataaatatattatcttctttcttttgccatctttcccattatggattaggaacattttacattgtgaaagaaagaaagcgttacactttttttttttttttgttacagtactctgatttcaagtaaaataataataataatactacacatacttattttttatacttggagcctaaaatttacggccgcacgaacggagtgcacgtttgcttctgtcacatgtttgtttgtccgagtttttgctcttgcatactgccgttgtaaaaagttggaaagaaaataatcttaacttttcaatttcaaattagaaatgaaatcaaagaaattggagcttgacttgtctttttatagatatcctccttttacctattttactatactcaattcttctatttttaggatccttctgaaaattaaattaatttttccatttatgtttgtagtttcttatttctgacaaaacaaatgttggaaaaaatctatccttagatgccacgtgtagctattcgataagtgataagattcagtattatctggagcgttagcgttaaataacactcttaagcttcacatgttttatcgcttacactcaaattaagtctatgtaattacaaaattacaacactctctccatctctttgttttctccgcagatgatgagtgtgaaaacctgtaaagttgaggtaaagcaatttatcggtttcgcttttaaattgtttgttatcgaaaacttgttttgatatctcttatggcttttcttatttatgtgttgtttgttataaactttgttacagcctttaaaagggcaaacaccacttagaagtagcaagaccaaacaggatgctaaaccttattcgtgttcttcaccaccatccatcaaggcgtatacatctccattcgtaagccaaaagacttcaagacgtgttgctttgtctgctgaagatatcaagaatgctcatagagaagcgacaaagatctcgagttcgagctgtggatcaagcaaatggacaggaaatttcattctcatggtggagcttcgaagaaagattatcaattttagaaccatcattgatcttcctcctctgacctattatctctctatatccaatgtacgttacctcttccctacgttttctttctttcagataatcgtatctttgacctaataaactcacagactaatcacaatgagaattttcttttagtttctgaggtgaaaagtaatgtgaattttccattaacaaaatcgaaaaaatgttatttgcataatgaataaagaatgtgaagaagttgtaactagctatatctcatcgtagcaattacaaaaaaaaaagatatcccagttcataagcagtgatcaaataggtaaatccagtgaaaatcgattccttggttaaaaaaaaaaacgcaccacttgatttgtgtgttagatatgactgatttgtggcgttgttgtttgttttctggatcaatggtag

SEQ ID NO: 6898 - DNA, 3000 bp, Unknown
  misc_feature (1)..( 3000): cDNA_ID_1816145_gDNA_ID_1621115_Annot_ID_56176 3000 nt of promoter + ATG
caaaattttataatcctagtactatctattaattttgctttttcaattttcccacatttaacattaaaaacgaaagtgaaacgtagccactatggaatatgtttcattcatcgttagtgttggcagttgcaggtggggacaagctgcatttccatgttgcttccaaagtcaaacagatcaaagcagcctctttgaccaaaagaatccaacttttttcctcaactttcatggccgccaaaatcaatcactcactttccaccaccaaaaaacctcagattctccaaacccatatcttcgatttcaccataatccaacataaacatgcctaactcgattctctttcttcttctttcattcctgtatctcacaaactgcgttgctcaatctccatcacaaacttgtcctttagatttctctcatgtcctaacaatcccatggaacacaacagattgtcaaaagtccgacaaatcagccgatagcaagaacagttgttgccaatctcttttaactctaatcggaatccctctagctcatcgtctcaaacaaacttccaatttccgtctcccaaatctcgctacttcaatctcttgtctcaacaatctccaaacgaagcttagttcactctctctatcttcgaatctcacctctctctgtttcgatccgaatcagttcgtcatcaataacgaaacctgtgctggaatccaaacgactcaagattgggtatctcgtctcggtccatctacggcgcttgactccgcctgtagcagtggtctcactgatctaacgcgatgcgacgcttgcgtggcggctgggtttagggttcaaaaacagctcatcactttggacggtaatagctctcacggtgtttattgttaccattttgtggttacttacgctgctggtattgttaacaagaaaggacctgagagtgatgatgctttgtcttgtctcttctctttgagtttgagatctccattgaactcaaagaagaaaagacacacggtggctcttgctttagggataaccggagctattttcggggctctggttattgccggtttgatttgtttgtatttccggtttggtaaagctgttaaaggaggagaggttggttgggaggatcaagggtctagaccgaaatggagaccaaacactggctctatctggttcaaaatcgaggaactagagaaagctacgaataacttctcgcagaagaatttcatcggtcgaggcgggtttggttttgtttacaaaggggttttaccagatggatcggttatcgcggttaagaaggtgatagagtctgagtttcaaggggatgcagagtttcgtaatgaggttgagatcattagcaatttgaaacataggaatcttgttccgcttagaggttgtagtatggtggatgatgatagtgagagtcagagatatcttgtttatgattacatgtctaatggaaatctcgatgatcacttgtttcctcgaggtgagactacgaagatgccattgagctggcctcagagaaagagcatcattttggatgtggctaaagggttggcttatttgcattacggtgtgaaacccgctatttatcaccgggatattaaaggtacgaacatattgttagatgtcgatatgagagcgagagttgcggatttcggtttagctaaacagagtagagaaggagagtctcatctcactaccagagttgcgggaacacacggttacttggctccagagtatgccctctatggtcaattaaccgagaaaagcgatgtgtatagcttcggggttgttatattggagatcatgtgtggaaggaaagctcttgatctgtctacttctggatcaccaaacacttttctgatcacagattgggcttggtcattggtaaaagcagggaaaacagaggaagctcttgagcagtctttgttgagagaggaaggctcagggctctcgaatccgaaagggataatggagagattcttgcaagttgggatattgtgtgcccatgtattggttgctttaaggccaacaatattagatgcattgaaaatgcttgaaggagacatcgaggttcctcctattccggaccgaccagtcccgctcgcgcatccttcgtaccgtatggacggaaacggattcacaatatcgcctgcgcttagcggactacaaatacattccggagatatgctcagatgaaaaaactaggctcatgtgagattttattttgtaaatatttgaaagcaacgatcacgtcttttgattacatcatgtaaaacaatttcagaatgttgtagtatatcataagtagggaaaacatatagttcattgtaggattatattctaaatcaaagtagaggcgaaggctgagatgcgggggtgagggcggtagctggtggaagccttccggtacaagtgcaaaagttattaaggcactcacatttggtgcagtggttcacagtcctgcaccatcttgacactaatggtcctctcgcctcagccaccatgtaaaattctgcaaccattcaaatttgtgtttatttttgtccgttgcaaaatttatatgtatataaataagaagaaattacatattttttttttttgtcaacaagaaattacatagtttgatacataatgatttgtcaaagcattttcaacagaaaaaaatcagatacatattttactattaattttatatctggtaaattctatattttacagtatacagtacattacacaatttcctgaatcagttgaatataaaatgctcaaactagcataaatttaaaactttccagcattggtaatactcaaaaaaaaaaatcaataacaaataaatgtttagttgtaattcagacacaacttgaaaccccaaaaatcagactgtgaaaatttgtgtgctctttttaacttttaattgctaaagttagttagtaatttaaaacattctggttactcacttagtattagttattactgtggtaacaacaaaatttaatg

SEQ ID NO: 6899 - DNA, 3000 bp, Unknown
  misc_feature (1)..( 3000): cDNA_ID_1816127_gDNA_ID_1621115_Annot_ID_56181 3000 nt of promoter + ATG
agatacttaatgcctaggatgctttagtttccagtcatatataccctagtcttcttgactttgttcaacagcaaagaagaccaaggtgatgaagcgtcagtctacatttgttttccatcatgcctctcatccttggagtaacaatcgttttctcatttggatggtaactccccatgcttttaccttaagctgtaattttttaaaaatttcatatctctagttaagaacactgttatatttttctccagaagctatttttacggcatttgtccagcaataaaatatatgtttgcattgcagctttgtttcctgcggcaatttagaggctccatacgaaagtctgactacttcgcacttcggttaggtttcctcactgtgagtaacttttttatttcgtttctcagtctttccttcaaatttaaaatataactttctagtaatttctcaagaattctcatctaatctggtagctgacatgattagttttctgaatccggtcttcattactttaaaatttcagaaacataatttgccatttacatacaacttccatatgtatatggtacggacgatggaagatgagtttcatggcattgttggaattaggtatgcgtttctgagaattgagatcttatcaaagactctttattcaactgttttcagaagatttcgtaagggagttacagaatgggactgatgaatgtttcttgatgaatcaacagctggccactttgggtttacgctatagtatgcatctgcataaatgttcatggtaacttatcggttcaataaatacaaactacattccatttctatctccacattaaagctttgtctttactaattcagtgatttccttgcaggcctgaatatgtacttttggatatcattcgttcctgccattgtaagtaaaagcaagattaagtaaaaagcttgaaattcataaggcagtactaacactcagagcatgtgtttgtatctgttttgttgtctaagcttgtcatgttggttggaaccaaacttgagcatgttgtctccaagcttgctctcgaggttaaggagcagcagacaggcacatctaatggggctcaagtcaaaccacgtgatgggctcttctggtttgggaaaccagaaattctgctacggttgatacaatttatcatttttcaggtaagcaaaaagacttttcctttctcaattcttcaagccatgatattactctattcacacagatgatccttatatatttcctgctaatgcagaatgcatttgaaatggcaacattcatctggttcttggtaaggccaccttataaaatgcatcaatacttaaatcagctatgcaaagtttttcagtttttgagaagatcatcaatttcatgtatcagtggggaatcaaggaaagatcttgcttcatgaagaaccatgtgatgatatcaagccggctaatttctgggtgcgtttcaaatacacaacaattcgcagcaacacactgtctcttaagattttttttttctttctggtgaatgcagggttctcgttcagttctggtgtagttatggcactgtgcctctcaatgtaatcgttactcaggttcgtcaaaacctttcatatatctacaattccacaatcttaagcctatccaagtctgtgactaaacatcgttcataaaaactctatggtttcacctgaatctgaacagatgggatctcggcataagaaagctgtgatagcagagagcgtaagagactcacttcacagttggtgcaagagagtgaaagagaggtctaagcacacgagatcagtgtgttcccttgacacagcaacaatagacgagagagacgagatgacagtggggacattgtctaggagctcatcgatgacttcactgaatcagattaccataaactccatagaccaagcagagtctatattcggagcagcagcttcatccagcagtcctcaagatggatacacgtcgagggtggaagaatatctgtctgaaacatacaataacatcggttcgataccgcctttaaacgatgagattgagattgagattgaaggtgaagaagataatggagggagaggaagtgggagtgatgagaataacggtgatgctggagaaacacttcttgagttgtttaggaggacttgatcttgtttctgcttttagaagcttggttcagttgtaattacttgacatccatacaagaataacaattaacaaagtaaatcttttgttggtccagtaaaaaaaagtattcaatgatcaaagtacatcttttgttggttcagaggtaaatttaaaatataatagcatggattggaacgagatattatggcattaggaaactttttgattatggcagtataaacaaagaccacaaattatggcagctatacatatattgatttcaaaacagagataaagacttgtcacctgtcatttgattatttatgaatttacctctgcagcattttccttcttctgtgcagtcacgcctaccgatggatttgattaatttcctgtcgattattactaagttgtatttctagtaaatacaacttaaaagtagttttgtactcggtcttaaaactagttttgtacatagtttttgagtaagatactttgttttttttgggacaaagagtaagttagtaatatcaaattttatcatagtgattgttaatttatgtcaactacgaaattaagaagttatcaaatctgatttgagttatgataacaatgtcattgatagactcggtcaattatggcattaagaaaatctaaggatttaagtaaccaggtatcaattattaccgccgttggtattgacttttaaataagacttgccagttgtcacacacatgtcataaacaattgtttttttcttcttcttttcattcaaatgataaaattaaacttgcactatacagtttctatagaatcatccatcactagatctggtctggcgatccccaaaagatcaagtcaaaa

SEQ ID NO: 6900 - DNA, 3000 bp, Unknown
  misc_feature (1)..( 3000): cDNA_ID_1816123_gDNA_ID_1621115_Annot_ID_56182 3000 nt of promoter + ATG
tgaaatggcaacattcatctggttcttggtaaggccaccttataaaatgcatcaatacttaaatcagctatgcaaagtttttcagtttttgagaagatcatcaatttcatgtatcagtggggaatcaaggaaagatcttgcttcatgaagaaccatgtgatgatatcaagccggctaatttctgggtgcgtttcaaatacacaacaattcgcagcaacacactgtctcttaagattttttttttctttctggtgaatgcagggttctcgttcagttctggtgtagttatggcactgtgcctctcaatgtaatcgttactcaggttcgtcaaaacctttcatatatctacaattccacaatcttaagcctatccaagtctgtgactaaacatcgttcataaaaactctatggtttcacctgaatctgaacagatgggatctcggcataagaaagctgtgatagcagagagcgtaagagactcacttcacagttggtgcaagagagtgaaagagaggtctaagcacacgagatcagtgtgttcccttgacacagcaacaatagacgagagagacgagatgacagtggggacattgtctaggagctcatcgatgacttcactgaatcagattaccataaactccatagaccaagcagagtctatattcggagcagcagcttcatccagcagtcctcaagatggatacacgtcgagggtggaagaatatctgtctgaaacatacaataacatcggttcgataccgcctttaaacgatgagattgagattgagattgaaggtgaagaagataatggagggagaggaagtgggagtgatgagaataacggtgatgctggagaaacacttcttgagttgtttaggaggacttgatcttgtttctgcttttagaagcttggttcagttgtaattacttgacatccatacaagaataacaattaacaaagtaaatcttttgttggtccagtaaaaaaaagtattcaatgatcaaagtacatcttttgttggttcagaggtaaatttaaaatataatagcatggattggaacgagatattatggcattaggaaactttttgattatggcagtataaacaaagaccacaaattatggcagctatacatatattgatttcaaaacagagataaagacttgtcacctgtcatttgattatttatgaatttacctctgcagcattttccttcttctgtgcagtcacgcctaccgatggatttgattaatttcctgtcgattattactaagttgtatttctagtaaatacaacttaaaagtagttttgtactcggtcttaaaactagttttgtacatagtttttgagtaagatactttgttttttttgggacaaagagtaagttagtaatatcaaattttatcatagtgattgttaatttatgtcaactacgaaattaagaagttatcaaatctgatttgagttatgataacaatgtcattgatagactcggtcaattatggcattaagaaaatctaaggatttaagtaaccaggtatcaattattaccgccgttggtattgacttttaaataagacttgccagttgtcacacacatgtcataaacaattgtttttttcttcttcttttcattcaaatgataaaattaaacttgcactatacagtttctatagaatcatccatcactagatctggtctggcgatccccaaaagatcaagtcaaaaatgaataacagagaaatgaaacatggtaaaaaaaaagacgagaagatgccggttttagtgatgccaggtttcatagccggagcaacatttctggttatttggatcatacgacgtgagttccttttatcttacttttggtgtaacatagatttccttgcttctgtttatcttttgaataatccatatataggctatagaaagggctccaccaaaactaactcgccgccaccatccgcgcttccaaaggctcgagaatgtggtcctgtggcgtccactaaacctaacttaacacctgcgccgccgctaggtcagccacggctatacgctcaagaatctcaacagtacagtcttgtggcgtccaatgaacctgacttgacacctgcgctgctaggcccgccaccgctatacgctcaacagtctcaacagtttagtactattgtggtgtccagtgaaaccgacataccccagcttctggttcaatgttgtccgccagatggagaccgtggattaacaaatcaatactatgcgggacaagagttcgacttaggaggacacgacaaggacagcgattccgattaagagtagagtacttttttaaacaacttttgattatgaatttacctcatccaccatttttcttctctttatcttgtgtgcaccggcatctttagactataatatatgtcgtaagaagaagaagaagattataattggttgatttcagttattttattatcaaaaaggaaagagaggataatgtaatgttgtaatcttatatatatatatccgaatcagggcgtcatttcagtttactaaatcatttttatttatctaatttatgaaccatagatgcgttaaaacgtctacttaaccttttgtaaacttgagtgaattgatgaatggagtaaaatttcaagtttcatcgcattcgtttgtgttattaagttttgtgctgagagcaaatcttcttttagccaaacaatgggtgttgtggatttctagacttgattttattttctagcaaactaaataaagttttgggcccaatgggcctgactcattgaacaacaaactagccgttggtccgtgtttgtgcatagctcggagacgagaggttgtacgtgtacggaaagtaacagtacggagattagtcatgaaaaacaataaacatggtgcttttatgttttatatactccaaaaaggggtctgcgtgacagtgagatagacagagagagaagaaaaagaagcgagtgagcaaagtttctcaaaa

SEQ ID NO: 6901 - DNA, 3000 bp, Unknown; identical to SEQ ID NO: 6896
  misc_feature (1)..( 3000): cDNA_ID_1816087_gDNA_ID_1621115_Annot_ID_171839 3000 nt of promoter + ATG

SEQ ID NO: 6902 - DNA, 3000 bp, Unknown
  misc_feature (1)..( 3000): cDNA_ID_1807878_gDNA_ID_1621115_Annot_ID_56183 3000 nt of promoter + ATG
tttatagtgtgagcttgtagatttgggttttaccgcttcttaggtactggatttagcactttggtgtaaagtttccaaggaaattttaagagatatatgtatatgagcttatagatttgtattactgtttcttattggattttactatttgcatttctatggggatttttggtttcttatggatgttcatcttttatgtttttgtaggtttgatgatatcactttcgtaagaaccaaggaatctgctagcaagcagaattctactctggcagctgcaggcttggtggaagcgatactgtttgaggtgaagcagcgagatagagttggtggatcttttttcaaatctgaggacatgtgctgtacgccaaaacttgcggatgctggttcctgcaatcttggagaggttatgattagtgcagatcctaatgatcctgaatggcctaagcggattcccacttttttcaaaaggggtgaggaagaagtgaagatgtctccggaagctgtcattatcaagaaaactggattgtacactgtttacttcatgacatgtgatccggaattggatggcgcaacaatcagaggaagaacagtttggaagaacagaggtggctatttacagggagagaaagctcctttgaagaagttctacgcctccatgcttttggcttacgtggttcttggcctagtttggtttccacaagttgctcagtattggaaagatggaatccagttgcatagtcatatcaactttgtaattgcatttaccatgggtgaattggccttcctctaccttgacttcgtttatctcgactcagctggtacaagtcctatggaggttacagtatgggcaataaccctttcttccatgaggaaggcactctcccggcttctactgttggtcatatcttcagggtttgggatagtgagacctaccctaggtggcataacattgaagatgcttcttattggtgtcttatgctttgttataagtgaatccctcgggttggctatgcaatttgggaacatctctgaaaatggaatgaattacttaatgctctcttgggctatactggaaacttgctttatccagtggattttcagatccttgtcgaaaacgcttaagaagctcaaggtaagagaaacatacaatcctccttttcttttgattattgatataacaggttaggcacactgattgctacatgtttctaacatatcacttgtaaatatatctttcttgttaattgttgaaagttgcagaaaagccatttataaagatccatttcttcttagattattcatccctgctaatcccatatttttcttatgtagctgaataagaggaacattactaagctgcagctctacaagatgtttgcaactgtgcttgtaatcatggttgtgctcagttttgcctggatttatgtggaggtaacatctcaacagtctagtgataactctggggaatcacttgaaaaaagtcatatgattgtgtgactgaaattgttttctgaatcaggtatatctctacagctccttgagtcagttttggaaagtgaagtggattgttccaacactttggtacatcctttcttatgcaatgttggtactgatttgcctcttttggcctccatcggaaaaaccaatgaggtatggtatcaatctttctgtacttgccctttatcaatcgggtgcttatgtggcctgttttaagttccacactaagatcttgtctgttttgtactaacatgtttgaactttgtatatctgatcttctctgctgctagttacacatttttctgatgtatatatactggtttgaaattgcaggtacctatacgtagctgacatggaggaagagactgaagaagaagatgatctctccactgcagaaaccggtatgaacgcaacaaaggctgaatacgagaggagtgaaaggaagaccctgctggaagcattcatcctattgcttgggaatataccaggggagaagtgaaactccccatcttacaaagttaccgtccttttagcttaagctgcctacttctcatcctttttcagcttaagctactcctaatcatccttttaaacctacggctttaagtttttttttaactcatataatcttctgcagtagacttgacttaatcggattttctgtttcatgaacttgttggtagtgtggaacaaatgggaaaatgaatatttttggaacaaattgattttctgtttcatattaagttaaatcattctgtttccactgaaataaattgttttccaaaaatcactccgtttattatgtctttgtttttaagaaataaaagtgagaaaacagaataacgcgaaaatgtcgacatatttggctaagtatagacaagattgggaagctctgtttagttatgcgtcagtctctcatcagtgttcaactgccacggagcgaaccgattcctaattgcaacgtcccgagtccatagaatgtcgacactctttcactctttctccaagttgcctcctttgagtcctttctcatattttatagactcactttctgtttcttgatcccgaggaagaagaagaataaactcttgttcccatgatcttcgtcgatgttagtaccttgagattcgattcgtctctccgattctttataatcggaatttattggtttgtggaatctgattttgggttctcttctattgctcttataggttctttggaaattgtttcctctatactcgtttggatcaggaagagactctctctcaggtatttcatcgaacacttaccctacaatttagtgaaatttctgtgtgatgtagaattctctagattcttctaatcgagttttagctgagaaaattagtgaaatgaaatgagattttccattgattgctagattccaaaactttagcttgttgttctgaattgcacttatttgttgtgttgtatggaccatggaaacatccaaaagagtccattttgcagatcattcccgagaca

SEQ ID NO: 6903 - DNA, 3000 bp, Unknown
  misc_feature (1)..( 3000): cDNA_ID_3049188_gDNA_ID_1621115_Annot_ID_56185 3000 nt of promoter + ATG
gagctgtctctgtgagttcccttggcaaattctttaggaaccatgaatgtttcttgatttctgcaatggtgatcctctacgaaacaacaagtagctcaattgttcagaaaaatcaaaaggcatctttgaaaacatttagttcagttgattgatgtataccttgagtgaattggcgacaaatatacgggaaaggagatttttacaatcctgtgagatatggacgtagtccgggatcttgtactggacagccattattttctgtataacaagatcacacattgacgaataggatgtggcgaaagcgagatatgcagatacatggcttcaaaaaagaaacctacttgtattgttttcctgaagttcttggggtcttcctggtcttcaaatgggtatgctccaaccagcatgacataaagagtcacaccacaagaccatacatcagccatctgaaagaagaaaaaatgcttcaaatcttagcgacttccacaaagatgactttttaaattcaaaagtaaaaatgtaaagagcatgacaatatcataaatactcatgggtttatggaagttcattgcattgtgcatgatgcttgattaccttgccatcatattctcttcgagaaaggacctcaggtgcaatatatgctggagttccaactgttgatttgggcctagagtgcagcagagaggactaaaaaaaagagaataacaaatcacaaaagaggatctcgtcgacaaggggggaacttggatttttttttagtgtcagaccttggaataaccaaaatcacagattttcagacgtggagcaggacttccatccaagagcgtattctcgagcttcagatctctatggcatatttgctgcaacaaaatagtcaacacatgattaaaaaaaaacgacttcaaacagccaatggataagtaaattttgcttaagtcattgtctctacattaccatagcatggcaatagctaacacctgatataagctgctggaagaaatatctcgcctggaaaagagagaaaggattagaacgtagaccctaactgtttaatgcctgatactaaataaaaggaggttcacatgttttctcttgttcccttcctcctaatctttccaaagaccatgcagattatcctaaatactagtaatttcatattcgcaaaagcacagcacaatttttcaaatggcaagctcacctcatcctcactaaatcttccagcactgcatatacgctcgaatagttcaccaccagcagcatattccatggcaatggcaagatgggttggagtcaacaccacctataaaatccataaacccaacaaggaatgcaagatgaaagatataagagattatcaacaaactttttcatagcaagaacaccacccatgtcaagcaacaagaaattcactaacctccttgaaccggattatattcggatggcgaagtgatctgtgattaatgatctctcttgccacattctcatcaatctgtatcaaaaaaaacaaacaaagcaaatactcattgtacaaatcttttcaggaaaaatattacaactacaagataactaacgttacgttaaacacccaatcagctaacgataagaaatttacaaaaaaaaatcgactcttctgcttaatagcaattcattccaattatgcatatctgggtataggatcaccagctcatggagagcaatgaaaacacaaaaacagagaggaatataccttaggaccacgctcgatgtacttcatggcaacaagttccttagagtttttgaccttcatgagcctggcaactccaaaattcccagcacctatgtctttcaccagctcgtacttgtccattctcgctcgacaaccctaattccaaacacacaaaacagaaaggaaaaacccaaacaaaaaaaaaatctccaaaattctcgttgaaattcaagtccagttctagcagctaagaatttcacgtgaaaatgaaacaagattaaaaaaaaaaaaaacagtatcccaaaatcaaggatgcgattccgagatctcgcgattcgcaaagaaagtgggaaaaaaaaagggaaagagatgacgatggaaggttaatttgagatttggattggagagatttcaagcctaagcgaagaatcaactttctttttcttttttttttcttgttggaatttttcttttttcttttttggggtgaaattaatagagaaataatgatgagaatgaagaagaatctcccctgcctaaacaaactcccatcatgtttttttttccatttatttaattaatacgagattttttaaaagaaagagggacccacaagtttccatgcgatccatacatgtttgtttcccttgctgattcgagtgtataactacgtttttttttgtcaccaacgcgctttttttctccctaattcaacacttcaactatacactatttacacgacacgagtggtcagcagcaagcaaattcgccttagattcttttggttctatatagagagagtcattgtccataaatcacatttttctctatgaagattgtcactcaaacgtaaccttttaatgaatttatgtcatgattttcatctacttttaacatttttcaacatatatacaaaaaaagaagaagttatgttcccatgtgtgagtgtatattttaattgaaatgacatagttcgtgcgcgtatatgaaaacattaatagaccttatatgggccgctaaactaatatacacttgttagaacgaaaggcccaatcaattaatagagcaaacattaaaagaccttatatgggttttaaacttaatatacgtttcttagtactacaagcccaattaattaatagagcaaaaaagaagttgtaagccttatcgttgtttttgtattacccaaaatctctacaaagtgaaaacactgagctgaggatctcgctctctctcgattggtatctctcgctccgtccttcctcagatctgatcgtccgccggttttcacgatg

SEQ ID NO: 6904 - DNA, 3000 bp, Unknown
  misc_feature (1)..( 3000): cDNA_ID_1375255_gDNA_ID_1621115_Annot_ID_56186 3000 nt of promoter + ATG
ccacaaagcctacaacagcaatgagacagtattaaaactatataaaacaaacaaagaacataataaattttggatgtttcaagtaaatatacaaagttcataccccacaaaggtagatcatctgaagttagaaccacccgatgaaagtccacgccaatcagatgccacagaaaaaggtgagaaataaggttagcaatccaaagaagttatgtaagattatatatcctacaacatccaatgccgtaaatgatattggtaatgcagtgaagttagatatcggaataatttagatttgcatgatgtaaaaatgaaccaaaggaaaactcagcagatacaaaatgtttccaaactttacatagtaggaaattgcaacatcatagataataaatcagcattattttcatgaatttcagtggtaatatgtacaacagacgtgaaacatacccataaaaaattcgaaccagtagctagattcaatggcatctttaaaatgcttgaccttagcttcatcgagttcaagcggacagatgacacttctctcgacattctctgtggaaaaaacagaaaaggtattgtaactagagaataagtacgaatgtacgataactgttaactagtatgaaaaagaagcttgtataagaattgaaacgtactcatgaattttatcgcaatctcactgtcaatcagctcatttccacctagaacttcaccaagaccaccccatttgtgaacattgtttccagatgggcggcaaaatggaagactgtaatagttgtatgtttcttgtggattgttatatgggccaactttgtttacccatagggtgacctgctcctcggcttgatactgaaaaaggtgaaggcaaaaaaaattgacttgacagaaaagcacagaaatgtaaaagtttatgggattaactagtaagagagagtaagaaccaaaattccattagagagaacagaacaaaatgtcaaacgtagacagacagatactgataaaggctacgttcaatatcatttcaaaaatcaggagttaaagtcttcacacaaatgatggttccatagaaataatggctcttgaataatgctaccagattgctcttgaataatgcataacccgcctttatctatcatctttcacgcagaaaatatatagttggaatcgactttaaatgtcacactacttgcgagcgtaagaaggcagaggagcaaaagcattaaagctagatctcatgatctccaatatcacaaaaggcaataacaattttgagctgaaactgaccatcagcaaaagaagccatgtgtgacactttcagtatcacattttagataccaattgaaaaaaatcatcaacccgacctcggaactataagatctacatctcgaagatgctaatacattaaatgccactcaattacaacacaactcagtgttgatccaagtatttgaacatcaaacaggctaccacgtgcagaaatcaacgagaatctcaaaccaacatcaaaatttcttattaaaatcgagattgtgaaaagcctaaatcacaatgaatagacaaaatacgcctagacttgcaacgaaaagatacgcctaaatcacaatgaatagaagctcgaggatcctagcaatccgtaaacgaacagatccatgaaaaaaaattcaatcgcaaacaccatgcaaatcacggatctacggacacagtgctcgatttcgagctgcattaaaagaaaagaaaaaacgactggagatccgagtcttaccttgtgatctgaatcggatgcgaacgtaggagtgagaagggaaacgagaagaaggaacacgaggacggcggcggaggaggaagacggcatcgtgaaaaccggcggacgatcagatctgaggaaggacggagcgagagataccaatcgagagagagcgagatcctcagctcagtgttttcactttgtagagattttgggtaatacaaaaacaacgataaggcttacaacttcttttttgctctattaattaattgggcttgtagtactaagaaacgtatattaagtttaaaacccatataaggtcttttaatgtttgctctattaattgattgggcctttcgttctaacaagtgtatattagtttagcggcccatataaggtctattaatgttttcatatacgcgcacgaactatgtcatttcaattaaaatatacactcacacatgggaacataacttcttctttttttgtatatatgttgaaaaatgttaaaagtagatgaaaatcatgacataaattcattaaaaggttacgtttgagtgacaatcttcatagagaaaaatgtgatttatggacaatgactctctctatatagaaccaaaagaatctaaggcgaatttgcttgctgctgaccactcgtgtcgtgtaaatagtgtatagttgaagtgttgaattagggagaaaaaaagcgcgttggtgacaaaaaaaaacgtagttatacactcgaatcagcaagggaaacaaacatgtatggatcgcatggaaacttgtgggtccctctttcttttaaaaaatctcgtattaattaaataaatggaaaaaaaaacatgatgggagtttgtttaggcaggggagattcttcttcattctcatcattatttctctattaatttcaccccaaaaaagaaaaaagaaaaattccaacaagaaaaaaaaaagaaaaagaaagttgattcttcgcttaggcttgaaatctctccaatccaaatctcaaattaaccttccatcgtcatctctttccctttttttttcccactttctttgcgaatcgcgagatctcggaatcgcatccttgattttgggatactgttttttttttttttaatcttgtttcattttcacgtgaaattcttagctgctagaactggacttgaatttcaacgagaattttggagattttttttttgtttgggtttttcctttctgttttgtgtgtttggaattagggttgtcgagcgaga

SEQ ID NO: 6905 - DNA, 3000 bp, Unknown
  misc_feature (1)..( 3000): cDNA_ID_1816111_gDNA_ID_1621115_Annot_ID_56188 3000 nt of promoter + ATG
tcacataagctatattatttgtaatcaaggaatgcggtcgtgctggcagggatggccagcggtcatcttgtgttttatattacggttatggcgactatgtaagtgcatataaaccaacatattgtatttttcttatccgctttggtagcctggaacgatgaagttctttcatctttccgctcttgatcatgtttatgcatataaaatataatttcagatacgagttaagcatatgattagccaaggaggagttgaccaaagccccatggcaactgggtataatcgtgtagcaagttcagggaggttacttgaaacaaataccgaaaaccttctccgcatggtacttaatgtgaagaatcctacttttttgctttcaatggtatacttgctgagatatttctcctattttattgctgcaggttagatactgcgaaaatgaggtggaatgccgacgtttcctacaactagtgcatttgggggaaaaattcgattccacaaactgcaaaaaaacgtgtgataattgttgcagtagtcagagtttgattgacaaagatgtcaccttgatcacaaggcaactggtacagaaatcattagaatgctcactatgtatgtgttatttttggtcacatctcactatcttctgtgcgttgcacaggttgaactggtgaagcaaacaggagaaaggttttcttcagctcatattcttgaagtctacagaggttccttaaaccaaatggtatgcacaaataataattatccatacttccttcaagctttatgagatatttctacacatatattttgtttttcttccagattatgctaattattaaaacctgtttggcctcataaaccatagtctcttttctatacttggtaaagactaattaataatgaaagcgtaatccaaccagtgtgggtcgatctcttgaaaaaataactgttttctttgcatctaggtcaagaaacacagacatgagactttgcagttccatggagctggaaaacatttatcgaaaattgaagtctctcgtatcttgcattatctcgtaacagaggatattcttgtggaagatgttaggaaaagtgatatgtatggatctgtgtcatcgttgctccaggtacttaattgtgaattatttccatttcgcttctccctctcagtaatgattgaggatgatagtaagctaactggaaccctaattgtctctatttacctatttgtatctaggtgaataacgcaaaggctaccatactattttctggaagccagactatagtgatgaagtatgactttgcgcttatatctttctttatggtttataggaactaggtttaagcaaatcattgcaattacctgtattttatgtgttaacggcttgttaaaattactttagctaagacttccataatctgttgcaggttcccttcttctgtaaaagtattaaagccaagtaaacagggggcaaccgcagcaaaaggtccgctaacatcagagaagcaaagtactcttccacttacaacagaagatgctcctccaaaagatgtggtatagttctgtttagttcagtctctttttttcttgtcgacatgaatctaccactctgaattgctgaggttggttccttgatctttttctctagaatctctctgccaacatgtacacagccttgaggaagcttcgtacagctcttgtcaaagaagcccctgatggtgtcatggcatatcatatattcatgtatgtctgaaaaaccattccgcttttcattttccaagctttgtacttgatcatggtcaattcgattctttcctcacagtctctgtgtttgtggtggcagcaattcaacgcttcagcagataagcagacggatacccagaaccaaagaggaactccttgaaatcaatggccttgggaagtaagtagttctttatcttaaaacctctactcaaaatgaagaaaagtccaaaagtgtttgatgatggtgtgtatctttaaactctctttcagggccaaagtaagcaagtacggtgatcagttgttggaaacaatagaaacaacggtgaacgagtactatggaaccaataagaaagactccatcatcagcaacgatagtcccgattcagggaagagaagaagagacgagaacattagtccaaatgtagccgaggatgatgatttcgaagtaagcccaagccagtcctgcaaaaaaacagtgagaaacaaaagcaatgaggttcttcatggtgaatgtatagatggagatagaagaggcatggagcttgattttgatttcaaagacgaagatgggtcagagatacgaccggagggaagagtattaccgtggtgaagttgtgaccactgaaattttagttgtaaagaaattttgatgtaatattttgttaacttctatggcctactcaatgtaccttaattttcagtagattgaagaaactagttattaaatgctgacttctttgatgatctcttttttttttttaatcaatcatatattgagatttgattagaatgaagaacctacaggtggcgatggatcattaataatataagagattaataatataagagatattattgtgaagaaaccacttcagccaatggattggttagctagacaaggttgactttgggtcaaccctctcactggacttttatctgaggctcttcttgtcgtgaccacacaagctcttttttgcttcacagaaggtaaattcttgtctgcttgttttgctttgatccgtcgtttatactttgttgtggtgagtggaatttgcttcaaaataaatcctgaaattattacgagattctgaaccagttccatttgatataatataataatataaacaatacctgaatctttaagtcaatacttactacaggtttgttatctaaacaagttcttctctgttttagtaaatgtttcttctgtctcagtctcactagaacgatctgtccatgaaattttctcgtaaagggttatt

SEQ ID NO: 6906 - DNA, 3000 bp, Unknown
  misc_feature (1)..( 3000): cDNA_ID_1816107_gDNA_ID_1621115_Annot_ID_56189 3000 nt of promoter + ATG
atacacagaagtaagaatctagaggtcgaatcttcagaagatgactcttacaagtaaacaatttcaaagaagaaaacaaaatcggacctggattcgcaggagacttgcttaccgagatgatgaaacttgtgaaatcgaagaagaaaaggctgaagattgatagagcaaaagctttgctttgttgcgttgagaagctattgctgctgagaatttattctttgaatttgtgttgttgcccccattgcaccaagttccattcaaacacctttctttcttttcttttttagcgaatttatgctcacctccatttttttttatttttttccttatataatattttattacatatcgactgtctggtaataaatacggacacatactttaagaaaagaaaaaaagaaaaaacgattttattcagacgaaaataacgacagattaataatatgagaagctttggctaaatacaattttatacgaaaatataaaacatattaagtaaattcttaatttattaccaacctaatttctgttttctcgttacagtcaaccaaataatcataagttcaaaacgaaatcaataattaggatcgcatataatggtcagactgtcatatcattcaggactctcaaatccatattttattgcaacgttcattatatttgactattccacatataacacacgtctagctcatgttacaaaaaaaagggtattcacaaaatacgcgaactgttctagctaatgacctaatgttatatacaaaaaaatgtattagaatacaatattatcatcttcgatcgtgtggaaacattttcacatgtagccttaacactttacataatcttagcaaaaatgagacttattaaactttcatatttgagtactgaatcacatgtggttgatcagtggccattaacccaccagggctcttggtcgaataaaacctttattccatcgagataaaagcattttcttcagacactatattgtatatagtatgtggtggcgttgaatatgtgtgcctttgtgtagttaattagttattggatttgaatttcttaaaaagtggtgtcagttcaaccataaatttgtttccgtcaaaattcaacaaattattttcaaatgtcagaaaaattgcagaaattgtattcctcgataaagtaggtcaaccaatatcgatcatatttacatcttcgaattcttacgttgactattacatcgcacctatatactatcaaataaaccaaagtatttattgacgttgactaatcctaactccacaaagatgtgaacaataacgataacttctcgaaatcttgagggaaacccaccttctgtttatatatccgaatcggaccaacctcgaggagctcctctcaaacttttttgttggtttgatgaaatagtaaaacgtatgcatttttgtgtgataggttttagaaacacaattaaatcgcactaatgcaaaaaaatgattttaaatcggaaaaagacgttgcacaccgtccaggatcagattcagatatcgctgaataaataaaaaagcccgaccactaaaatattgttctgctgatgattttttaaataactaaatttagatgcgattaacgatgttgacgtcggaagatatatataaaagagatatggacgatgttgttaatcgcgattccaagtgatagggacttggtgaatcgtgacaacacaacaaaacaagacaaatgatattgataggacccttactatattgctagttatttttgttgcttctgcttcaatgcttattggttattattagtatggagttcaaatctttgtcttttcttctgttcaactaatatgtgtttaaatccgtatgaaaataatttaacgattggaaactatcgaatttcattgtgcttgtatgtgtattctataatccaatgactaatattatactacgagattcgattccaatgacggtgtaagttaagtattgtgatagtggtaagctactcgcatatgttaccaaaaaagaagaagataaagttactcgcatataatttgaatgtgtgattagcaaaatactggtctagatagtcctagcgtagtatgaaatagtataattttacatgttacatatatgagttaataggggtatatcaaaaagtaatatatgagttaatagttttttttttttttaaataccaactttgtaggttaagaattccataaaaaaaattgaccaaagcgagaagaaatggtgaagtggttaaaaattcaaaaaaaaacaaaaaaaaatggtgaagtgggtgtcacgaaacgtatgaagagaaggggagtggggctgtgcttgttccttgtcggtctcctgccgtacaagccgatgcaaagaatctgttttctgtttttgaattctttcttctacaatacatatgtaatttagagaaactaggttcaatagaaacgccattttgttgaaaaacatgtcagtgatgacaagttattatttttcttgtatgaaagtgcatggagcaatacataggacgcacaaagaacagtgcatgatgtgacaagtgcgtgcgcatgggaatatttgtccagaaaaactattttgttactgtacctctttttttgtttgtcaaagattttgttactgttcctctcagaattttcgtcaccaatttggatatggacaacattacaaaatttggtgttgcactttttttaacaatatggcccgttagataatcctttcaaattaatggtttgcctaaaagcccatttgtctctcccgaaaagcccatcataaaacggcgtttgtccttgcgttgttgaggatgagatttggccatttgggattagaacttttttctaatttactatactacccttcacttctcaaactagcactagattacaattaaaaacgcggggatactttggtaaaagaaacaagaacatgttcaaagatggatggatactttcgtaggctctggctcggttagctcgaaaaaacaatg

SEQ ID NO: 6907 - DNA, 3000 bp, Unknown
  misc_feature (1)..( 3000): cDNA_ID_1816103_gDNA_ID_1621115_Annot_ID_56190 3000 nt of promoter + ATG
tgtccatttgtattccattatgaggcagctctccaatgagttcaatagccttagggtatccattttttaccttaatgcaacctgcaagcaactaagacatcaaagataagatataattcagaagccaaacgaaacgagatgttgcatatgcagtcatggttctttcacctatataattctaaatgcagaaacgtatcagcaagtctcaataagctaaaggatctaaatcataagtgaaagggggaataatcgttctaagcttcaagggaagaaaatatgcgaaatattttgacactcactaaagtgacgaaaacttcagctggcataccgtgttatatgtaaccacatctggtttcagaccatcgcgcttcatctgatcaaacaatttgatgcagctgtcaagctttccattcttgaccagacaactaagaatggagttacatatatagacattgattttggtagactcgtctggaatgctttggtatatttctagagccttggagacatttttggccccaacaaactttatgcagctactgtaagttgaaacactaatctttccatgttgttgcatccattcaaagagctacaaaaagaaaaacactttgattgactatgcacatcttggaactcttgttcctcaggaaacaatgaaacatacaatagtttttatgaaaccatgttcaaagcaacagacctgtataagatcctgccatcttccagagattccaaaatcacgcaaaattacattcaaatcttgtaccttcaaaactgttgctaatctgcagaggggacagttacatcgtgagaaactacagtatccagatcctgaacactcttgacgacggagtataaagattacggcatgctcattaatcgaatcttggatacaagaattcttatgtatctctagtaatgatgtggtcaattaactttccccaatttgaatcaatttaacattctatagagtatagaccaattccattagcaggcactactacatctacttcagaactgagcattctagagatttttgtttacttctgttaagaacaaaatacgtttttaaagacaaatttttgaaatgttgactgaagtaaaatgaatcacagaatttgaagataagtgataagtaatagatagtaagacctctgcagagaagagagaaaatccgaggagcgttgaacttcagaaatggcggattttctcgccaggtatgaattggaatggcgtttggaacgaggagcttctgctacgttcgccggtaattcaataacagcggaagatgtcgttgccgccgtcggcgtgaggattcgtaaggataaggcgggaatggagagagatgaagagggacgagagtgagtgttgaagagatgaggaggacaacgtagttcgagtcccacaagaagtggcgtctccattgttttttcgagctaaccgagccagagcctacgaaagtatccatccatctttgaacatgttcttgtttcttttaccaaagtatccccgcgtttttaattgtaatctagtgctagtttgagaagtgaagggtagtatagtaaattagaaaaaagttctaatcccaaatggccaaatctcatcctcaacaacgcaaggacaaacgccgttttatgatgggcttttcgggagagacaaatgggcttttaggcaaaccattaatttgaaaggattatctaacgggccatattgttaaaaaaagtgcaacaccaaattttgtaatgttgtccatatccaaattggtgacgaaaattctgagaggaacagtaacaaaatctttgacaaacaaaaaaagaggtacagtaacaaaatagtttttctggacaaatattcccatgcgcacgcacttgtcacatcatgcactgttctttgtgcgtcctatgtattgctccatgcactttcatacaagaaaaataataacttgtcatcactgacatgtttttcaacaaaatggcgtttctattgaacctagtttctctaaattacatatgtattgtagaagaaagaattcaaaaacagaaaacagattctttgcatcggcttgtacggcaggagaccgacaaggaacaagcacagccccactccccttctcttcatacgtttcgtgacacccacttcaccatttttttttgtttttttttgaatttttaaccacttcaccatttcttctcgctttggtcaattttttttatggaattcttaacctacaaagttggtatttaaaaaaaaaaaaaactattaactcatatattactttttgatatacccctattaactcatatatgtaacatgtaaaattatactatttcatactacgctaggactatctagaccagtattttgctaatcacacattcaaattatatgcgagtaactttatcttcttcttttttggtaacatatgcgagtagcttaccactatcacaatacttaacttacaccgtcattggaatcgaatctcgtagtataatattagtcattggattatagaatacacatacaagcacaatgaaattcgatagtttccaatcgttaaattattttcatacggatttaaacacatattagttgaacagaagaaaagacaaagatttgaactccatactaataataaccaataagcattgaagcagaagcaacaaaaataactagcaatatagtaagggtcctatcaatatcatttgtcttgttttgttgtgttgtcacgattcaccaagtccctatcacttggaatcgcgattaacaacatcgtccatatctcttttatatatatcttccgacgtcaacatcgttaatcgcatctaaatttagttatttaaaaaatcatcagcagaacaatattttagtggtcgggcttttttatttattcagcgatatctgaatctgatcctggacggtgtgcaacgtctttttccgatttaaaatcatttttttgcattagtgcgatttaattgtgtttctaaaacctatcacacaaaa

SEQ ID NO: 6908 - DNA, 3000 bp, Unknown
  misc_feature (1)..( 3000): cDNA_ID_1816099_gDNA_ID_1621115_Annot_ID_56191 3000 nt of promoter + ATG
tctacgtgagatttcgaaccattggtttcctttccgccagtcagagagcgacacgtgtgggagcattttaggggtgtaacggcctcggcccatgggccttgggtcgtcgaatgagccgaggaaagagcgagtggagcgcgtgaggtaagtgtagattgtggtgaagttgaagagagggatacaagtctcggagaggaggacgaagcgtgcgttggaaggttctagtagggcatgagatataagacgcttctctgcatccatcatcgaacattttccccattcaacggcctacaatattttacaaatgtcaaagtatcgcaatgttatcttgtaaaatacaataatatgttaaccaacaaggcaacaaattaaacctaattaatgaatgtaaatatataatcatataccttgcttggtatccgtttcttgtaaaatactgaagattccggcggctcttgagtgaactccggcgaggtatgaacgtagatggaataaaacccttcatgacctttgaagaacatttcccaaagaggggacaacggcaaattccacctcgttagaaacatgaacgcaacctttggatgggtctcattcttcatggggctgcgtggggccatcgctgctcgccacatcagctcttcgtctgcaatattactaccagagctgcgaggagaaggagaaggaggaggagagagggaaggagaagtgagaggatttgaggagagagtgtgataatcttcgacgaggaagagtgatgtttggaggcgttggttaaggtaaaaagcaaggaggatgacgagagaggagacagaggagaagaagacaacggtgccaaggatgtgaatgtatcggagacttatcggttctttcttcgaattcatccgtaagttgagttctttaacaaaggttgtaatcttttgcttcttcattttcctttcttgtgtctattgattttagtctaggttctttggcttgcgtcgttgaagtcctattttgtgtgtgaataagtgtatgcatttatagtgcatattaagaacgcgtctccaaagtggtgctaaagtatattgtagaatgagattaccgttttggccacaaaataagcctataaaggaatcgaaagttcacaatcaattatgttgattctttaatatatacttataataattaatagaaaaataggatcatgtaattgatccatatactcaggattagtaaacctaggcatgatgtgtgaattgtgatgtgtatacatgatggacgtgcatggtgtgagaagaaatgtgcatgggaattgtgggtttagtgaaacgtgatttagtcaagtgaaaaagaagagaagaagagcatggaatttgcggctatgtaaaattatgggtatgctaaaaaggttaaaatgttaactgttttttctttaaccttaacaaaacttaaaaacttggaagggctcaaaacccatgtcgaatttaataagcccaaaaggcttcaatgtttaataagcccaaaaggctttcaatgttcataacgaacaagaccaattccaataatttacaaaagctggcttcatcttcttaaacgttgctctatgtatcccaaacccgacgaattttggttcgctgctgcataatttttacccatacatcttcctcatcttctctctccgtgttgactcttgaggcgatccaacaaacaacaacaacaacgccgcgattctcgagggtaagtagtcatacgatttcagctgattttccaggatggtttcaattttgggtttatgcagaagatatttaatagattgtgtgtccgcaatctgaaagttgctgctaggtttctgtttgttatacctatttagattctgataggctgtttcaattattaacatgagttgttgaatctggaatttgcaggaccaatccgttcagagagattaaagctgagctgagcttctccttataaaggaagatactgcttgttctacggaattttgagagatgcctcgggacttgtcaagatcgaggtcaccgtctccatcaccttcacgtcgtagaaagcactcgaggtctcccgtaaggcagaggcatagcaggaggagtagaagagacagaagcccttctccatactcatctcattcgtatagcaggtgatacccctagtgtttgttttttccgctattcgtttgccttagttatcattcgtttatacgaactgtaagaaacattggtggaacacggttatagatagacatgtaaagtttacagactcaagaattgcttttagtaaagttcctacttatagatatattttctacccttctctaaaagagagtgcaatgtctggatgctgctggctctgtatcgtaagcgtttttttgagtgatgctgcgtattggaaatatatcgtgtttatttggctgttgtgattaaatttgttgcaagagaatatgttttatgacctgagctttgtgatttttagaatgaaacctgtatattcggtaaagacataagttaagctgggataatagcactactgatagtctgatctagtttatattttaattgtatctgtagattattagttagaatcagttttaagagcgactatattatgttcttttaaatggagtttgttagcaatagtgatacaaaaccaccactattccttaggtaagataatatagtaatttgttgagaacatggctgagaagctaggaaaatgatacatgcgcttaccattataaaatagctcagtttcttcccgttcccacgggaggggaaatgagcagctgatggattgctcttaggtgttctttcattgatcccttgtctcgttagcttctcttcgtgtgataaaagttggagctgataattctttacagtgtatgaggtaactgcacatacttttgttttctttatgtgtaactgtgggctacctgatgcctagtcttcacgtgcgtggtacttcattagttccatctttttgcttactactttattttgggtaatg

SEQ ID NO: 6909 - DNA, 3000 bp, Unknown
  misc_feature (1)..( 3000): cDNA_ID_3049253_gDNA_ID_1621115_Annot_ID_171854 3000 nt of promoter + ATG
ctgtgcttgagagtaacattcaccagcttagttaatttgatccacaataataaatatagaatcaacgatttcataacaaacataccgttttctctctgatttctttgtcgatttgaagcatttgttgttgcatctcttttaccatattctcgttctcttctattgacttcgcatagtggtattgattcctcttggatccaacaatatcatgatgtcctacatttcgactagttttctttcttccaatctttgcgacctccatagcctcggaaaattttagattgagaaatggaaaaaaggtttttcaatcaaggtttacaaaatggaagaaagttgcttgagtttaaaatgcagagggttgagacattgatataaacttagttgtctctctatacaattttaaaattaacttatttggaatttggtttgcactccaaggaagttggccattttgccacctttttatttgcttagtttaatccaaccacactataaagtagtactattttctaagttgagaaatacctacaagttttatatatttgcacatattggagtagattgtgtattcgaatgaataaattaacagtctcatcacaagtatattagtatatgaatgaattatttgtgtgtttaaaatgaaaaattaaagtcttaattaaattccaaacaaatatggagcaatcttcatgagaggctcgagggtgctcacatgaaacttcctcccgaaaagaaaacacacattcgtcacctcaccttcgtagctacaattcgaaccgaaccggatccgatccaagaacccgacccgaatatctttcctcacaaacctcgctggatgggacccacctcttgaccaatcaacccacgtcactgtccggttcgaattcatctccggacaaatcttgttaactaacgtcggaagataatgctcgtcgatataacacggcggtcggcagtgatccttaaagacggcgtagtaccggcgatcagagacgatctcggcggcgactctacgtgagatttcgaaccattggtttcctttccgccagtcagagagcgacacgtgtgggagcattttaggggtgtaacggcctcggcccatgggccttgggtcgtcgaatgagccgaggaaagagcgagtggagcgcgtgaggtaagtgtagattgtggtgaagttgaagagagggatacaagtctcggagaggaggacgaagcgtgcgttggaaggttctagtagggcatgagatataagacgcttctctgcatccatcatcgaacattttccccattcaacggcctacaatattttacaaatgtcaaagtatcgcaatgttatcttgtaaaatacaataatatgttaaccaacaaggcaacaaattaaacctaattaatgaatgtaaatatataatcatataccttgcttggtatccgtttcttgtaaaatactgaagattccggcggctcttgagtgaactccggcgaggtatgaacgtagatggaataaaacccttcatgacctttgaagaacatttcccaaagaggggacaacggcaaattccacctcgttagaaacatgaacgcaacctttggatgggtctcattcttcatggggctgcgtggggccatcgctgctcgccacatcagctcttcgtctgcaatattactaccagagctgcgaggagaaggagaaggaggaggagagagggaaggagaagtgagaggatttgaggagagagtgtgataatcttcgacgaggaagagtgatgtttggaggcgttggttaaggtaaaaagcaaggaggatgacgagagaggagacagaggagaagaagacaacggtgccaaggatgtgaatgtatcggagacttatcggttctttcttcgaattcatccgtaagttgagttctttaacaaaggttgtaatcttttgcttcttcattttcctttcttgtgtctattgattttagtctaggttctttggcttgcgtcgttgaagtcctattttgtgtgtgaataagtgtatgcatttatagtgcatattaagaacgcgtctccaaagtggtgctaaagtatattgtagaatgagattaccgttttggccacaaaataagcctataaaggaatcgaaagttcacaatcaattatgttgattctttaatatatacttataataattaatagaaaaataggatcatgtaattgatccatatactcaggattagtaaacctaggcatgatgtgtgaattgtgatgtgtatacatgatggacgtgcatggtgtgagaagaaatgtgcatgggaattgtgggtttagtgaaacgtgatttagtcaagtgaaaaagaagagaagaagagcatggaatttgcggctatgtaaaattatgggtatgctaaaaaggttaaaatgttaactgttttttctttaaccttaacaaaacttaaaaacttggaagggctcaaaacccatgtcgaatttaataagcccaaaaggcttcaatgtttaataagcccaaaaggctttcaatgttcataacgaacaagaccaattccaataatttacaaaagctggcttcatcttcttaaacgttgctctatgtatcccaaacccgacgaattttggttcgctgctgcataatttttacccatacatcttcctcatcttctctctccgtgttgactcttgaggcgatccaacaaacaacaacaacaacgccgcgattctcgagggtaagtagtcatacgatttcagctgattttccaggatggtttcaattttgggtttatgcagaagatatttaatagattgtgtgtccgcaatctgaaagttgctgctaggtttctgtttgttatacctatttagattctgataggctgtttcaattattaacatgagttgttgaatctggaatttgcaggaccaatccgttcagagagattaaagctgagctgagcttctccttataaaggaagatactgcttgttctacggaattttgagagatg

SEQ ID NO: 6910 - DNA, 3000 bp, Unknown; identical to SEQ ID NO: 6907
  misc_feature (1)..( 3000): cDNA_ID_2125136_gDNA_ID_1621115_Annot_ID_171853 3000 nt of promoter + ATG

SEQ ID NO: 6911 - DNA, 3000 bp, Unknown; identical to SEQ ID NO: 6906
  misc_feature (1)..( 3000): cDNA_ID_1816107_gDNA_ID_1621115_Annot_ID_171852 3000 nt of promoter + ATG

SEQ ID NO: 6912 - DNA, 3000 bp, Unknown; identical to SEQ ID NO: 6904
  misc_feature (1)..( 3000): cDNA_ID_3049184_gDNA_ID_1621115_Annot_ID_171851 3000 nt of promoter + ATG

SEQ ID NO: 6913 - DNA, 3000 bp, Unknown
  misc_feature (1)..( 3000): cDNA_ID_3049188_gDNA_ID_1621115_Annot_ID_171850 3000 nt of promoter + ATG
aaaacaattatttttgaattccgaacatttcaatttgattttttgttgacatttgtattttatagatttgcattttcaaaaaaatgataaggaacgaaaaaaaataaaaataagaaatccaaaaatcaaatacatgaatcttttcggaaaataaaatctaatttacaaaaatatttattggaggtcacaatgttcatagtaccatgcgtagcaaaggactcattctcatcatcaacctctctgtttgttcatcttatactgcaaattttacaaatctccaaaaccagaaccaaaaccttagccaaagcattgtaaaggcaaacacgagaacagagacttttcagtttcaacaaaccaacgacgacttctttcttacacagaccaaaaaccaaaatatcaacttattctcacttctccacttgcgtgtacttcctttacagtcttatcgtattcatcctcatcgtcttcctcttcttccacctcctcctcttcctcctccacgtcttctgcatcttcctcttttccatctgcatccccatttcctccccagccaaaacctccgatggatcgggaaacaggaggcggtgttttggcgtcagccactatcttcatgatctcttcaacggtctgaagggagaaggttgggttctctttcttgaaatatgcagcttgagctgtctctgtgagttcccttggcaaattctttaggaaccatgaatgtttcttgatttctgcaatggtgatcctctacgaaacaacaagtagctcaattgttcagaaaaatcaaaaggcatctttgaaaacatttagttcagttgattgatgtataccttgagtgaattggcgacaaatatacgggaaaggagatttttacaatcctgtgagatatggacgtagtccgggatcttgtactggacagccattattttctgtataacaagatcacacattgacgaataggatgtggcgaaagcgagatatgcagatacatggcttcaaaaaagaaacctacttgtattgttttcctgaagttcttggggtcttcctggtcttcaaatgggtatgctccaaccagcatgacataaagagtcacaccacaagaccatacatcagccatctgaaagaagaaaaaatgcttcaaatcttagcgacttccacaaagatgactttttaaattcaaaagtaaaaatgtaaagagcatgacaatatcataaatactcatgggtttatggaagttcattgcattgtgcatgatgcttgattaccttgccatcatattctcttcgagaaaggacctcaggtgcaatatatgctggagttccaactgttgatttgggcctagagtgcagcagagaggactaaaaaaaagagaataacaaatcacaaaagaggatctcgtcgacaaggggggaacttggatttttttttagtgtcagaccttggaataaccaaaatcacagattttcagacgtggagcaggacttccatccaagagcgtattctcgagcttcagatctctatggcatatttgctgcaacaaaatagtcaacacatgattaaaaaaaaacgacttcaaacagccaatggataagtaaattttgcttaagtcattgtctctacattaccatagcatggcaatagctaacacctgatataagctgctggaagaaatatctcgcctggaaaagagagaaaggattagaacgtagaccctaactgtttaatgcctgatactaaataaaaggaggttcacatgttttctcttgttcccttcctcctaatctttccaaagaccatgcagattatcctaaatactagtaatttcatattcgcaaaagcacagcacaatttttcaaatggcaagctcacctcatcctcactaaatcttccagcactgcatatacgctcgaatagttcaccaccagcagcatattccatggcaatggcaagatgggttggagtcaacaccacctataaaatccataaacccaacaaggaatgcaagatgaaagatataagagattatcaacaaactttttcatagcaagaacaccacccatgtcaagcaacaagaaattcactaacctccttgaaccggattatattcggatggcgaagtgatctgtgattaatgatctctcttgccacattctcatcaatctgtatcaaaaaaaacaaacaaagcaaatactcattgtacaaatcttttcaggaaaaatattacaactacaagataactaacgttacgttaaacacccaatcagctaacgataagaaatttacaaaaaaaaatcgactcttctgcttaatagcaattcattccaattatgcatatctgggtataggatcaccagctcatggagagcaatgaaaacacaaaaacagagaggaatataccttaggaccacgctcgatgtacttcatggcaacaagttccttagagtttttgaccttcatgagcctggcaactccaaaattcccagcacctatgtctttcaccagctcgtacttgtccattctcgctcgacaaccctaattccaaacacacaaaacagaaaggaaaaacccaaacaaaaaaaaaatctccaaaattctcgttgaaattcaagtccagttctagcagctaagaatttcacgtgaaaatgaaacaagattaaaaaaaaaaaaaacagtatcccaaaatcaaggatgcgattccgagatctcgcgattcgcaaagaaagtgggaaaaaaaaagggaaagagatgacgatggaaggttaatttgagatttggattggagagatttcaagcctaagcgaagaatcaactttctttttcttttttttttcttgttggaatttttcttttttcttttttggggtgaaattaatagagaaataatgatgagaatgaagaagaatctcccctgcctaaacaaactcccatcatgtttttttttccatttatttaattaatacgagattttttaaaagaaagagggacccacaagtttccatg

SEQ ID NO: 6914 - DNA, 3000 bp, Unknown; identical to SEQ ID NO: 6900
  misc_feature (1)..( 3000): cDNA_ID_3049192_gDNA_ID_1621115_Annot_ID_171848 3000 nt of promoter + ATG

SEQ ID NO: 6915 - DNA, 3000 bp, Unknown
  misc_feature (1)..( 3000): cDNA_ID_1816127_gDNA_ID_1621115_Annot_ID_171847 3000 nt of promoter + ATG
ctagtcttcttgactttgttcaacagcaaagaagaccaaggtgatgaagcgtcagtctacatttgttttccatcatgcctctcatccttggagtaacaatcgttttctcatttggatggtaactccccatgcttttaccttaagctgtaattttttaaaaatttcatatctctagttaagaacactgttatatttttctccagaagctatttttacggcatttgtccagcaataaaatatatgtttgcattgcagctttgtttcctgcggcaatttagaggctccatacgaaagtctgactacttcgcacttcggttaggtttcctcactgtgagtaacttttttatttcgtttctcagtctttccttcaaatttaaaatataactttctagtaatttctcaagaattctcatctaatctggtagctgacatgattagttttctgaatccggtcttcattactttaaaatttcagaaacataatttgccatttacatacaacttccatatgtatatggtacggacgatggaagatgagtttcatggcattgttggaattaggtatgcgtttctgagaattgagatcttatcaaagactctttattcaactgttttcagaagatttcgtaagggagttacagaatgggactgatgaatgtttcttgatgaatcaacagctggccactttgggtttacgctatagtatgcatctgcataaatgttcatggtaacttatcggttcaataaatacaaactacattccatttctatctccacattaaagctttgtctttactaattcagtgatttccttgcaggcctgaatatgtacttttggatatcattcgttcctgccattgtaagtaaaagcaagattaagtaaaaagcttgaaattcataaggcagtactaacactcagagcatgtgtttgtatctgttttgttgtctaagcttgtcatgttggttggaaccaaacttgagcatgttgtctccaagcttgctctcgaggttaaggagcagcagacaggcacatctaatggggctcaagtcaaaccacgtgatgggctcttctggtttgggaaaccagaaattctgctacggttgatacaatttatcatttttcaggtaagcaaaaagacttttcctttctcaattcttcaagccatgatattactctattcacacagatgatccttatatatttcctgctaatgcagaatgcatttgaaatggcaacattcatctggttcttggtaaggccaccttataaaatgcatcaatacttaaatcagctatgcaaagtttttcagtttttgagaagatcatcaatttcatgtatcagtggggaatcaaggaaagatcttgcttcatgaagaaccatgtgatgatatcaagccggctaatttctgggtgcgtttcaaatacacaacaattcgcagcaacacactgtctcttaagattttttttttctttctggtgaatgcagggttctcgttcagttctggtgtagttatggcactgtgcctctcaatgtaatcgttactcaggttcgtcaaaacctttcatatatctacaattccacaatcttaagcctatccaagtctgtgactaaacatcgttcataaaaactctatggtttcacctgaatctgaacagatgggatctcggcataagaaagctgtgatagcagagagcgtaagagactcacttcacagttggtgcaagagagtgaaagagaggtctaagcacacgagatcagtgtgttcccttgacacagcaacaatagacgagagagacgagatgacagtggggacattgtctaggagctcatcgatgacttcactgaatcagattaccataaactccatagaccaagcagagtctatattcggagcagcagcttcatccagcagtcctcaagatggatacacgtcgagggtggaagaatatctgtctgaaacatacaataacatcggttcgataccgcctttaaacgatgagattgagattgagattgaaggtgaagaagataatggagggagaggaagtgggagtgatgagaataacggtgatgctggagaaacacttcttgagttgtttaggaggacttgatcttgtttctgcttttagaagcttggttcagttgtaattacttgacatccatacaagaataacaattaacaaagtaaatcttttgttggtccagtaaaaaaaagtattcaatgatcaaagtacatcttttgttggttcagaggtaaatttaaaatataatagcatggattggaacgagatattatggcattaggaaactttttgattatggcagtataaacaaagaccacaaattatggcagctatacatatattgatttcaaaacagagataaagacttgtcacctgtcatttgattatttatgaatttacctctgcagcattttccttcttctgtgcagtcacgcctaccgatggatttgattaatttcctgtcgattattactaagttgtatttctagtaaatacaacttaaaagtagttttgtactcggtcttaaaactagttttgtacatagtttttgagtaagatactttgttttttttgggacaaagagtaagttagtaatatcaaattttatcatagtgattgttaatttatgtcaactacgaaattaagaagttatcaaatctgatttgagttatgataacaatgtcattgatagactcggtcaattatggcattaagaaaatctaaggatttaagtaaccaggtatcaattattaccgccgttggtattgacttttaaataagacttgccagttgtcacacacatgtcataaacaattgtttttttcttcttcttttcattcaaatgataaaattaaacttgcactatacagtttctatagaatcatccatcactagatctggtctggcgatccccaaaagatcaagtcaaaaatgaataacagagaaatgaaacatggtaaaaaaaaagacgagaag

SEQ ID NO: 6916 - DNA, 3000 bp, Unknown
  misc_feature (1)..( 3000): cDNA_ID_2125109_gDNA_ID_1621115_Annot_ID_171840 3000 nt of promoter + ATG
ctatatcgcgggtgaaagttatgcaggtaacaaaataaataaaatcatttggatttagtattgcacgcccttttatttacttcaagtgtggtaacgcattttcatcgattttcgtcgcgaatttatttttctgtgaatgtaaaataaatatacttgcaggaaaatacgtacctgagctagcagaggttgtatacgataacaataacaataacaagaagaatggttcatcgtttcacatcaatcttaagggtattttggtacgtgtactaaatcttaagggtgaaattctcatcattaacccaaaaatatcatacatactttatcatgcatctactataaactttgcatgttgcatgtcatgcatgtgatcataagtataaattccgcttagaagacccggtacatttttttttttttttttttttttgctacatagttggggaatcctgagacatcagatgcagaagattggagaggttgggtggattatgcatggagccatgcagtaatatcagatgagactcataggatcataaccaggacgtgcaatttcagcagcgataatacttggagcaacgatgagtgcaatgaggccgtagcagaagttctcaagcagtatcacgagatagatatctatagcatctatacctcagtttgcataggagattctgcgcgatcgtcttactttgattcagcgcaattcaaaacaaattctcgcattagctccaagagggtatgtgcatgtgtataacataaaagcctataatttactttgaaactaacaaatatcttttattttgttgggatgccttagatgccaccgaggctcatgggtggatatgatccatgcttagatgattacgcgagagtattttacaacagagcagatgttcagaagtctcttcatgcgagtgatggagttaatctcaagaactggagcatttgcaagtactctccccaatatcctttatggttttttttttgtgtaatatttgaaggaatttgtctgaatgttctttggtattctaacttcagcatggagatctttaataattggactggttcaaacccgtcggttttgcctatttacgagaaactcatcgccggaggattaagaatatgggtttacaggtaaattaaattacgttcacgaaaaccaactaaattcctaattaatttcactctgacgaaaagtagttgactacaacacaaattaaaaacttcgatcactgaaactaaaaaaacagagtatacaattaggtggcttcctacgcaagtaaccactacatactttagcttcttctactttggttggttaataacaatatgaaagaaagtttattctccaatttttctaagccgttggtttttggtttctttttgtgatggatccagtggtgacacagacggaagagttccagtacttgcgactcgttatagcttaaacgcactcgaattacccatcaagacagcttggaggccatggtaccatgaaaaacaggtacccgtggacctaattcaccagttatatgaaattcttgatttgagtattgttagaccggttaaattcttgatgatgctataacaggtaagtgggtggcttcaagaatacgaaggtttaacgtttgctacgttcagaggagctggacatgcggtgccttgcttcaaaccaagcagctctctcgcctttttctcggcgtttctcagcggagttcctcctccgccatcgcggtagagaagaaattcaatgattaaaaagatgatttagtacgtaatctaattatgagtatttttgaaagatttttgggttttgtttcgttaacttgtcagacacacgagataggggaaaacaaggattgtaacttgtaagagagaatatgtgatttatgttacgttttatgtcatgatcataatgatcaaaagaaaaccttcaccgctttgagattatgatcaaatgaaaaataaatagctttttggtgcaatgtcattataatgaaatccaaattggaaccccagactagtttggcgcacacatttttttggtggtttttgttaattctcccttttatataattcattagtaaccgtagatttttgctacttaaatcgatggtcaaatataataaagttatgtatacggtatatgataatctctcttttgggtaagaatggaacattcatgcattaatcatcagaaaatctcttcccaaataagatagtaggatttcattcttaccaaccatatttacttttgtattagcattatattattattattcccatttgttatcttagagataagtttgaaccattgacccatcaaattattattttttcattcagaaatataaatatattatcttctttcttttgccatctttcccattatggattaggaacattttacattgtgaaagaaagaaagcgttacactttttttttttttttgttacagtactctgatttcaagtaaaataataataataatactacacatacttattttttatacttggagcctaaaatttacggccgcacgaacggagtgcacgtttgcttctgtcacatgtttgtttgtccgagtttttgctcttgcatactgccgttgtaaaaagttggaaagaaaataatcttaacttttcaatttcaaattagaaatgaaatcaaagaaattggagcttgacttgtctttttatagatatcctccttttacctattttactatactcaattcttctatttttaggatccttctgaaaattaaattaatttttccatttatgtttgtagtttcttatttctgacaaaacaaatgttggaaaaaatctatccttagatgccacgtgtagctattcgataagtgataagattcagtattatctggagcgttagcgttaaataacactcttaagcttcacatgttttatcgcttacactcaaattaagtctatgtaattacaaaattacaacactctctccatctctttgttttctccgcag

SEQ ID NO: 6917 - DNA, 3000 bp, Unknown
  misc_feature (1)..( 3000): cDNA_ID_1816095_gDNA_ID_1621115_Annot_ID_56192 3000 nt of promoter + ATG
tcaagttgagccgcgacttcttcattaagtctctttcgcccttcctccaacagcgttagaatttccattttgattttctcagactgtaagctttcttcgaccttctttcgaatagcttcttcaacccgtttcacagtttcttcctctattagcttcagttctgcttcacgctgtcgcctggtagcaaatacagtgaaaaattagaggacatccacagcaggttcagaatattgaatatcacctgaactttctcatttcctgatgtcttcaatcttgaacagcaaaagaccaaaattttattgcaaatccgtaaaaaatgttgagatcgtttccattttcactcctcccaataccaatggtaaatttcgtgaagaaatttcttttttgtcaccataacacaagcaaaccttcaccaagattattcttgtgctttggacatatttacatctctaagtcaatcatgatccatgtaatgacaaacggtaactcatcaaatcgagatagtacgaacatttgtgccagaggatcaaatataaacaaatcgaaatatagcttatcttccataagcaaagcctgtgagagaataccataaaacctgtcgcacttttgagactaacaatcaaggacttccacactacactaaaataacatttgagaacaaaaaaccttaatttcaccataacatccatcttacttcaaaattttgtattgatttacctttttcgttcttcctcttctcttttaagtttttctccattcctatttttggctgactcaagggttgcggcgggagatctttttgcaggagatggagttgaactcctactcttttgtcttttgtaacgttttggggttggagaacgtctcttaggagtaacagatcgacttcgatggcgcctaggagaaatagaacgactttttcgcctgaacattacccaaaataaagtagtaagcaaaaagatggaactaatgaagtaccacgcacgtgaagactaggcatcaggtagcccacagttacacataaagaaaacaaaagtatgtgcagttacctcatacactgtaaagaattatcagctccaacttttatcacacgaagagaagctaacgagacaagggatcaatgaaagaacacctaagagcaatccatcagctgctcatttcccctcccgtgggaacgggaagaaactgagctattttataatggtaagcgcatgtatcattttcctagcttctcagccatgttctcaacaaattactatattatcttacctaaggaatagtggtggttttgtatcactattgctaacaaactccatttaaaagaacataatatagtcgctcttaaaactgattctaactaataatctacagatacaattaaaatataaactagatcagactatcagtagtgctattatcccagcttaacttatgtctttaccgaatatacaggtttcattctaaaaatcacaaagctcaggtcataaaacatattctcttgcaacaaatttaatcacaacagccaaataaacacgatatatttccaatacgcagcatcactcaaaaaaacgcttacgatacagagccagcagcatccagacattgcactctcttttagagaagggtagaaaatatatctataagtaggaactttactaaaagcaattcttgagtctgtaaactttacatgtctatctataaccgtgttccaccaatgtttcttacagttcgtataaacgaatgataactaaggcaaacgaatagcggaaaaaacaaacactaggggtatcacctgctatacgaatgagatgagtatggagaagggcttctgtctcttctactcctcctgctatgcctctgccttacgggagacctcgagtgctttctacgacgtgaaggtgatggagacggtgacctcgatcttgacaagtcccgaggcatctctcaaaattccgtagaacaagcagtatcttcctttataaggagaagctcagctcagctttaatctctctgaacggattggtcctgcaaattccagattcaacaactcatgttaataattgaaacagcctatcagaatctaaataggtataacaaacagaaacctagcagcaactttcagattgcggacacacaatctattaaatatcttctgcataaacccaaaattgaaaccatcctggaaaatcagctgaaatcgtatgactacttaccctcgagaatcgcggcgttgttgttgttgtttgttggatcgcctcaagagtcaacacggagagagaagatgaggaagatgtatgggtaaaaattatgcagcagcgaaccaaaattcgtcgggtttgggatacatagagcaacgtttaagaagatgaagccagcttttgtaaattattggaattggtcttgttcgttatgaacattgaaagccttttgggcttattaaacattgaagccttttgggcttattaaattcgacatgggttttgagcccttccaagtttttaagttttgttaaggttaaagaaaaaacagttaacattttaacctttttagcatacccataattttacatagccgcaaattccatgctcttcttctcttctttttcacttgactaaatcacgtttcactaaacccacaattcccatgcacatttcttctcacaccatgcacgtccatcatgtatacacatcacaattcacacatcatgcctaggtttactaatcctgagtatatggatcaattacatgatcctatttttctattaattattataagtatatattaaagaatcaacataattgattgtgaactttcgattcctttataggcttattttgtggccaaaacggtaatctcattctacaatatactttagcaccactttggagacgcgttcttaatatgcactataaatgcatacacttattcacacacaaaataggacttcaacgacgcaagccaaagaacctagactaaaatcaatagacacaagaaaggaaa

SEQ ID NO: 6918 - DNA, 3000 bp, Unknown
  misc_feature (1)..( 3000): cDNA_ID_1816091_gDNA_ID_1621115_Annot_ID_56193 3000 nt of promoter + ATG
ttctatataatggttgacttattgtgaataagtgtaaaaataatttcagaaagctcccaacaaattaagaaattgaaaatttatttcattactataagttaaattttctttttgtttttgagaattaatttgaatttttagaaaatatttgactcaaaactctttatttatttatttaagttaatgacacataaaaaaagatttgtttttaaaataaagatacgaagaagggtatattggaaaatatgaattagttgtggattctagtagctatgtccagagcaatcaatcactatcatattcatcaccaaccgaaaacgcctctggatctcgccagatccaattcggaccaaatcagaacccaaaattcgactcacttgtctcactcgactcgaatctccattctttgtctgaaagtttcttcctttttgtttaaccaatggcgacctttatcaatctggaggattccccaatgtttcagaaacaggtaaaattgaaaagctatggtgtgtaattaccttctgcggatttcagattcagggtttttgttataaattgtgagactttatcaccaaaattgttgtcttgtgcctgttctaattggtttgatcaggtttgttccttggaggggacagctgacgagcttaaagatcgttgtcagaagctatacaaaggtgttaagaagtttatgtatgtctacatctgcctttttctttctactgttttactctgatctttctgttgactgaagattcttagagtatcaattgtggaatgttttctgagagtgacatatattctgaaagtggaagttggaattaccaatttgtatcttcttttacttaattagcaaatgtggattgaccattaaagctttctcgattgttttaccattctcatgtaaatcttagattatgtgataagttaacatcgtaacattgttttgttgctactgcacttttgtcattgtatctatgtggccagacatgttattggttgctgatacgaatgaaatttactttgctttctagggggactttgggagaggcatctaaaggagaaagtgcttttgcagcttgtctggaagaatttgggggtggacctgatgatcctatcagtctttcaattggaggtctgtggtcttgctcatttgttgaattatgactctatttgctatgatttaacttatttgattcttattattttgagtgacaccagggcccgttatatccaaattcataaatgcacttcgagagcttgcctcttataaggagtttctttgctcacaggtatgctcatagtatcttgtgagctattataaatgccagtaaagattcaaagatccctatcatcattaagagcatagttttgtttggtaatttaaatgaagatctgattcagagtgtcccgttttgattattttctggaaatgtccgtttgagcttctaatcaactctgtgagcaatgaaagaaatataagatagttttgagtataaaatgccaaatatgcaatttattaaagtgcatatgccttaacaatgtctcactttatataacaattgtggtattttatgtgaaattttttctaggtggagcatgtgctacttgagaggttgatgaactttattagtgttgatctacaagaagctaaggtattcattttctctgctaaatttgatcaatttgtttttttttcccagtgtactgagtttctcaacttttatagattcgactttgatcaataaactggagatttgttttttttttttttttttttttttttttgcattccagactgtcgaaatactttactctttattattgtgtgaaaattctacagtcatttggaatttggatatgaatttcaaaaggatacggctttcaaggtctttagactgaccatatttaaaaaaaaaatgtttcatatgtcatgcactgcaattatatgatcgacaactcatgcttatcattccaaccaaccctatgctgtttctacttttgcaggagtctcgccatcgatttgataaagctgctcattcgtatgatcaggtacttgcttatggagtgtataacacctttaatatcttgtatatgcagttgtacacccttattcttcgcctaaaataagtatgttttataggctggtgttaccaccacaagaatgcacagcactgaaaactttgtctgatattcttcatctgaactggtttaatgagttttcttatctgcttgtagtcgcgcgaaaagtttgtgtctttaaagaagaatacaagaggagaaattgtggcagagttggaagaggtagaacatttattcttatgtatatctttttgtttgctttctcttcgtggctacaaaggaaagtgaagcaaaattacagcgaaggaatgtgccagcccgtatgcgcatatgaatatacacatatttctagactgtctagttcaatagatgtccgtacgtcctataggtgtatgtgtacatgatgcatataagaatgtttgcgcatatgtagtctaggaaactgtccagtaggaaaagtagtaaagcaaagctactctttaatttgacaagccaagatgtagatgttgtcgttacttaatactatttgacatgctctgtgcttgtttttcccagcatggtaactaacttgtgctgtcatattttaatgacaggatctggagaattcaaagtcaacatttgagaagagccgtttcaatctagtatgcacactctactaacataagcctttgctatttactttcaatatacctacttttaagtaaatttttgcattggttgaagagtgcaggtgaattcactgatgactattgaagcgaaaaagaagtatgagtttttagaatctattagcgcaattatggatgcccatctgagatatttcaaacttgtaagggctctaatttcacatttgaagtacttaccatgtaagaccaactaagtttgagatttgtgtcatgttgtgatccttaatttggcctcttt

SEQ ID NO: 6919 - DNA, 3000 bp, Unknown
  misc_feature (1)..( 3000): cDNA_ID_1816192_gDNA_ID_1621116_Annot_ID_56195 3000 nt of promoter + ATG
gatacgcagtctggtcatcaggtacttccagcgttctatagccaatgttctctactcccgagagataacagggactgttactaattctgatatggaaatgattgctatggctcccaaaggcactctccgccaaaccaagaatggtatgtctcttcaaggtgaaaccaatgacacacctctctttgtacttcttctgatccacctatgtggatacaagatttgggctgtcagcaataaccacaagagagcacaaggcgttctttgcataggcggtgttgtgacaccgattctgatcgcttgtggagtcccaatcacatctgatggacttgagccttgggcaatggatatcgagcatctatatcattgcgaattcctggagttcgcaatggttgtttctgtgttttgttttgtcctgagtactctcttccaagtttagtcacacaatggactgtgtgatttaagtttgggggagggctcaggaagtgtgtattacattgtatatactcttgagtctgcattcatctaatgcatagaaacaccaaacaaaatttgaaaaatttcagaaaataatttcacaaaaacagactgttcatgtagttgcattacattttaggatcgagtctagagtgtttcatttaggactgttgcatatgcataggggataatgatgagatagccttgtaagcattttggttcaacggataaacttagtgccctcgttgctaattgtctgttgtgtagttaatgaaattgaagtaaaactgaaccatgcctagattgctctactcgaccacactatcatgatctgatacaattctctatcaatttgaacctgattctgatttttaattttcatgtctacatcaaatttgaacccatggatgccctaaaatacttggatttttttactcattttaaccactcttgttaatccaagtagccgactctccttattagagcagttaactcgaacccaaacctaaattttctttcaagccctataccacttgtgagtgtttatgaggtcttattccgattaagcttggtagaaagtattaggttcgtgataacactgtattttactcattttaggtgtgtgtttatcatcatttagttttgcatttgctcattatatcatatcattttgcaccattttagcttattttgcatacttaggcatctaggatcatcttgcattcgcattgcatgttttggtgtgttttcaggtgcagaaggagctaaaaaggactctactcaattcattcactcgatccaggcagctacagaagaggcatcaattcactcgacctctgtactcgatcaaggatgctacagaggaggctgcagtttactcgaccctcttactcgatcaaggcaacctcagatggagcagcaaactgatctactcgcccctcctactcgatctactactcgatccatttactcgaccaagggtgaccatctctacaagacttgttgagctatcaaagcgtcttcggatcctcctcattccccactcaaccagacatttgagcatacggatatgagaggatgaagcatctactcgaccaattgatcactccgagcatagacacaaaggcacagattttgtagcaccctctttactcgatccccaagatcgagtattcgcccaaaccgcctcaaatctcttgtcttctagtgaatctagggtttcaacattttactataaatagatcactttggggtttgtccaaaggatctatgctttatctttcagtttttctttgtgtttatgaatcttaaaaccttaattactcttaatctatttcgtttttgcatttagttctttaagtaaagttgtatagctagtttagatctacattttggtatgatttcagtaatttatgggtttgtgttcttgagaatgttgcttgagtagtgattagggttcttgaggatggattagattagggtaatttctaggttagttaggtggttagtgtttagggtaatacccttctggattcgcttggcccctatgcgattttcgctggctaatgtggagattcgatcatagacgtccagcatccaaaagaggttcaaatggatatctgatttacgaattccagagatctgtagactcgaccaagagattggcttgtatgcttattggctttggtagattgtttcttaaactctgctctgttatgtttcatcaacgagtgttgagattaggaagtggtagagttagggggtctctgtcacgagagtggattgacccgatttttgtatctatcgtcaagggtatctacctttcaccttttagccatctgatgaaccctagagttgcctttatcaatgaatccatccttaggacttctattagatttatttgtattccctgttgattgcacttttatttacctgttatttatatcccctatttgtattccttgttgattgcattttagttcttaattttgtcacttgttagttctactcgacccaatgatcgagtagggctcttaaagttcttatttttgttgtttgaatcctgacctaggattgttaccaaaaacccaccatcattataatctggctagacttagttgtttctgtacacatcttgattgctagcaatacagtggactggattgacaccccctatagctgcatcgacatatttttgttttagggaaattgaactgaatcacacattcaacataagtaggcctaaaaacctgcttattaatttggcgatgttgccaattcattgttgcattgttacattcaagatatcagaaacttttaagatcaagttcttttccatttatcaagttactaactcatcttttcgtctgcttgtttttgtggtgtaggtactaatctttgtgcatgcaaactcgatccaaaggttctgcacacctactaccattcagagacagaattgacagaataactcgtgagttacaagaaaccaaagcaaaggcagcctgtgatcagaaaagaccagctgct

SEQ ID NO: 6920 - DNA, 3000 bp, Unknown
  misc_feature (1)..( 3000): cDNA_ID_1816188_gDNA_ID_1621116_Annot_ID_56196 3000 nt of promoter + ATG
gcccaacccaaacctctcttacagaagcactaatgtagccaaccctcaggataaagtgtatccaccacaacagaatcagtccaagccttttgttcagtacaaccaaggttatgtccctaaacaacagtttaatggaggctaccaacagcagaattcaccaccagggttcactcaacaaccacaaccagccctagcagctcaagatcctgacattaagcaactcattcaacaaatcattcaaggacaagctactcgcgctatggcttttgacaagaagatagctgaattacacaacaagatagctgaattacacaacaagatcgattggtcttacaacgatctaaatgtcaagttcgaagctcagaattcaaaaatcaagtatgtggagaatcaatttgcatcaacctctgctccgaagcatcctcaacaacttccagggaaagcagtccaaaatcctaaggactatgctactgccaatgctatcaccatccaccaagaagatgagtctccaccaagtcattagactctcaatactgaggacaatatgattcaagaaggggggggggggattcaattcaaattgcaacacctgccacccagaaattcatctggaccatagagcacacacctttgtcgaatacttaacattctggaaaaaagttcaaaattaaaaaactcaagaatgatcagaatcaagagatgattagcagtgcctccactcaagaagcatacaagaagaaattcatccaagaaaagcttgatgatcccggttcattcactctgccatgctctctaggaccattgacattcaataggtgcctttgtgatttgggagaatcagttagccttatgcctctctctacagctaaaaggctagggataatggaatacaagttctgcaacctagctttacttttcgctaatggttctgttgcacatcctcatggtctaatagagaatctgcctgtcaagattcaaaatgttgagatacctatagattttgtggtattagacgtagatgaggaaggcaaggatcccctgatcctaggcagaccattcttagcttcagctggagcagtcatagatgtcaggaatggaaaaattaatctgaaccttgaaaaaggcatcaagatgaagtttgacatcagagaagcttcaggagttcagaattttgggattcaaagcatggatgttgatgaagaaacagaagttgaaacctcaccaaaagtcaactatacttctcaaaggacttttgaccacaagaagaaacaacagaaaggctagctcagactaaagatcccaaagaagatgactggtatgagatgagaaaaaaatttaaatggcaaagcagagtcatagaaggattgtcttcaagggtgatgaagatgaaagaacaactatggatgtttgaaaaaagagttcaaaaattttcaaatggtattgatccagagaagatggaaactgcactagctatcaaggaggacgaaaatttcacaacagaatggtttgcacaagaagatcagaaaggagttcacttagaggaaagaaacctagagagcaagttgttgagtgaggaggaaatcactatttcgacttattctccaggagtgcctaaacagcccaccaacccctctgctgaaaaagaacacttgattcatgattctgttgctgaagaacttctggagctctgagttggatacaaagctcaagaggataccattggggagctaacttacaagatggacgaactgaaccatgcaatcttggaacttaaagaaatggttaaaggctaccccagttttgaatttgaggattggtcaaaagagcctggttcagaagaagaagactactttgcttgtcaaaaagaagcttattttgaagaaaaatcaaatgagtactcatcctaccatatctcaagaaaggatgcaaagtatgattcaaacactaaaaattcaaccactaaagatgaagacttctctgttcctctcttcaacctcttttctgactgtaagagtcaagcttagtgacttaaaacaagctcacttggaaggaaatcccatgtctatccatgtatataattttctatttttcttgttatttttgaagtttttgtttaagtgtttcaggtttgttttagtgaccctaagggagtcaacggtcgagtaaattcaaaccaagtcaagaaaaatctcaaccgttgatcgagtagaatgaggaggagcgttttgagccgttgatttgaatgaccaaatggaaaaagcatcaccaccgtttgatcgagtgaattcctgaagtttactttggtccaattgatcgagtagacaagaaaaaggagctctcctagccgttggatcgaattttgcgcaactcaagaagatgctcgattctttactcgagctctcattattttgaaacgaaagcataattccgtgacccccttgcccccccccccaaagctattacccatacccctcaccatttccaatcaacttttctatctcttccaaagcaaaccaaagaccaatctcctctacccattgatttcgacaaaccctcattgaaactctctctttcatcatctcgttttcgcaacccctcacattgaagtcttcattccaaacccttcccctaaaacgctccctatcactctttaagaatctgttccccttcaacaatacttcaccaaagttactcgaactctccaaagtccatcctcaagcattcaatcagtttcaaactcaaaatttcatcaccaaagaaaccgattcccttctcctttgatacctctttgggagttgtttttaattgctttgttgaaactcaccaccaatcttcatggattcaacaaggaagagtttatctcgggcaagaagatcctctgttgatcatgaagaagttgaggcgtttgacatgagtggcatgactgaacgccaaattcgccaagctcgccgtgctcaaagatcaagcttgattcaaggtggaagctcaagccgctcaacc

SEQ ID NO: 6921 - DNA, 3000 bp, Unknown
  misc_feature (1)..( 3000): cDNA_ID_3049283_gDNA_ID_1621116_Annot_ID_171878 3000 nt of promoter + ATG
ttttttactattccaataaaaaaagatacaatcaaagaaaaaacccgtcaatattaacggaaaactacgataaaaagacactaataaaataatcatcaatgttttaacggaaataaacgaagaaaatatacaaacaggaaaaataactgtcaataagtaaccaaaagtaacaataaaaatatatgaacgaaaaaggtaattaagtgacaatattttaatggaaaagtgcgatgaaaagactcaataatatatcgaaaagttgcaacaaaaagacataactgaagaaaaatacccgtccataattttacaaaacaattgcaataaaaaacaaaaacgaaaaaaataacagttaatgttaacggaaagttacgatgaaaaaatatgatcgaaaataataactgtcaatattttaacagaaagttgcgataaaatgaaataatcgaaaaaataaccgtcaatattttaacggaatgttgcaataaacagacacaaccaaggaaaaataactttcaatatttttatgaaaatttgctataaaaaatactaaaggaaaaataacagtcaatattaatgaaaagttatgatgaaaagtcactaacaaaaagttgcgattaagaaaacactaacgaaaaaatgaatcgtcaatattaatggaaagctacgatgaaaagatacgaataaaaaaataaccgtcaatatttaacggaaagttgcgataaaagagacacaacaaaaaaataaccgtcactattataacagagagttgcaataaagagacacaaccaagaaaaaataaccgtcaatagttttacaaagtgacgataaaaaaaaaaaggaaaaataaccgtcaataataacaaaaagttacgataaaaagaaacaaataaaaaggtgtgataagaagaaactaaaggaaaacataaccgtcaatataaatagaaagttacgatgaaaataaactaactaaaaaagtaattgtaaatattttaacgaaatattgcgattagaaaacacaacaaaaaataaccgtcaatattaaaatgacaaagatataaacaaaaagttgcgataaaactgtagtaacggaaaaaataaccgtcattgttagcggaaagttacgatgaaaagacatgaacaaaaaaataaccgtcaacattttaaccaaatgcaaattttatgaagaatcgtagaagaaaattgttccttcccaaattttatgaagaacaaacaagaaaacaaattgttccttctcaactttcattttgcttccagtgcaatttcagagatatgttactggtgtttgtgtaaacaataataaaaaagaatagccaataagatatttcagataaactagagaccaagccatactcctcagcatcccaattacacagaataatcgtccttcgaggcttccatcctcttttctgcagcttatctagtctttgtgcaatctacaattgtttcaaaaatctctcattgcaatgaaaacattgaaaactttcaccaaatacatgttgcagataacttttactcgcctccataagtaccgcagtgccactgttcggatcaacagctctgaaagtccaagtgtctctatggtttcgaagaatcacatatctaaccaatccattcatatacaatccctagttagttactacaatcagaagtctattgccactcactattgaacatgtacctatcaggctcttcttctccctcaatcactccaataacattctgaatcttggctataacagtttgataagaatgaaactatgaatctctctttcttatccttaaaatcccaattacaatgaaacaaactctaaatcggtaagcttggagttacagttctccaatcttatctcctaagaacaaagcacataagccctaattctactcacaacatcaatatgatcacgcaggatagttctctatgtttgctctctatctctatttatactctgaattcttctcatgcttctgtttggctcttcccaagtgcctattcatctcacacgtgctctcttatcacagtttccccctgaaacaaagacccaacaaaactcaaatctaagtaagtaacacatatcatctgaaacacaaactcactcactatgtagctcaggttcaagatcccaggtccaggccccacatctccaacaattgtcttcagaatcacttcagcatcagcagctgagacaggcaacgacggtataagcggaacatcaccgctcaattcaaccgcctcgtcggataatctctcacacccatcaacacttgcccatccaggagtcgttggatcacctaacccattataaacagtaccaacttgaaacccactcggtggcatccatttactcgccggaaaccactcatctccaccgtaatctctcttgtttgtatatatcacaacaccgacagctcctgcctcgtaagcgttgttcacaatgtctactttgtatatctgaccgtacctcgcgattacaacggctccagagacattcacacccatatctttcttgagtctcacgaaatcttccactcgtccatagtttgcataaaccactagacttacctgacttagggtatccatgaaaagtatgtaagtgcggatggcagctggagaatgtgtgttgattgcagagccatcaacaatataacggttaagtattaggatgagagagggagatgaatggaaaactgcatttaaaactaaacatgggttatatgagtggctagtcatgccatttggattaactaatgcacctagtacattcatgaggttgatgaatcatgttctaagagcattcattgggatatttgttgtagtttactttgatgacatcttagtttacagcaaaagcttgagagagcatatagagcatttagattctgttttgaatgtccttagaaaagaggaactctatgccaacctaaagaaatgcaccttttgcacggataatcttgtgttttttggctttgttgtgagtgcagatg

SEQ ID NO: 6922 - DNA, 3000 bp, Unknown
  misc_feature (1)..( 3000): cDNA_ID_2165328_gDNA_ID_1621116_Annot_ID_171889 3000 nt of promoter + ATG
atgttttacttttatcctaagacaagagtttgattccaaatgatctttaaataaatctaactctttctcaatgtttcctaaatatgataaactcatagtaacagttcttgaaacaggagaaacaaatcaagttaaagagttacgtacctgagtaaggttcacagtgtgttcggtgtttggtatcatcatgacaaatggaagtggcgttggatccgggggttctttttggatcaaggcattgttggtcaccaactcctcctctctagagctatctaacaactctccaggtcgccactgataggtatggaaagtactaaatgaagaaatatccatttcaggctcctctatgcattcttccatgtgttttagccgaagttgattttgataatcttcacgaggatctcttgattgactcatatgatgagtgcttatctcccgatcactagtcttcttgattggcctcaaaagtgtacaaccttcaccaagagaaagcaaattagctttcattcgattttgggagtttagataaatacctcgagttttaaatggtggtgtagcatttggtggtttatcctaaaaaatattgcattcagctctaggtgattgtttgtggaccatgacagcctcaacttgagtgaatctttctaattgacgtggttcttctttaggtaaatctcggtttagaactggttgggatacatatggcggtcctttctttatcaagatggtgatttttgaaacatagtcagctcgacaagcttgtgaagttgataaaaacacgggagtccacccaatgattttatcaacagaagcaaaggttcgaaactttgatggtctatgagtgatgacagagatggtagatggaggggttgttgaatgaatccacaatcaacacacaaattaaacaacttgaatccacaagttattcagcccgcaaatcacccaagagaagtgaatccacactcaacttgaaatgacaaaacacaaagacaattctttgtaaaacaaacttaaagtttattgagataatttctaaaataattggtgaatagaaatgaaatcgagagttatatagaagctctagtacaacggctatatgccaaaacaaaggaaacaaatcgcaaacaataaacgaatagagccgttagaggctttatggtgtaatcagccaaataaggcaagtagagccttaatttgtatctagataacttgggaagaaatgtgcggtttcttggaagctttaggatcacttggatgctcttaaacacgcaagcttttagaaaaggaaagagtcgttgaggtgtgaactcatgcgaatccaaaataggaaagaagtgactcaacgggtcttgggtgaggtgaggtgtagcataactcgggtggggaaccttatggaaagtttggagtttcttcttgattcccttagacggatcattaataagggtaatgtccctttccttatttggcatcgaataatcttgtacgaaaagtacttcagcaagtccttcagggagtccttcagcgaaaccttcagtaagtcctttagtgagtccatcagcaagtttgtcagttccagtaagatcaatgttggtattgattcttacatcatcccctccctcttctagaggttttgtcctcaaaacttgtttacctacacatagataagtcaagttagtccattgaagtgtataggggtttagaagcttacattgagtttggccgatgggttgaacagctggtggttcttctttgatctgaatagttgcattgacactctcatctttgttcacagcaacttcgcccagtgttggttctccttggctttgacttttatccgagaacactttctccattgttgaagcttcttcttggtttgatcctatctcccagctagcaaccagttctttaaagcatcaacaccatcttcagcaactttactaacgacgatctccatcaacggctgaggaatgtgtatatccatcgttggaatctcctacatattaaataaagaaatttactcacaatcattatataaattaacattattataaaccttgctttcccgtaaatcgcccaccttatcttcagttaaacgattcatctttttataagaatgtttaaaggttttgttctatttatagactttattataccaataacttagacatcgatgggtggtatagaaccggtttggtctatgtataatattggcaactctctcgttggttttgatttttttgtataaaatttatttaatttttttacatcagtgtagtaataaaaaaattacaatccgcgtggatatttgtttcccaaaaaaaaagttgatatttgttgtgttttggcggcaattttccctctcatccgaattagatttccccatcttcccggttcaaatatttttgatgtattattttactattttaatcatttctaaacatttgttgtaatccatgtggttattgaaatgtttgacatgtcatggatcctcaaaaatagtgaattattgtttgtcattatatcttgtatgtggatttgttactatggatacaagtataaatacgtatttatccaaggtaaaacaagatgatttttgaatgtgttttggcggcaaatttcactcgcttccgaatgagagctccccatcttcccggttcaaatatttcaatttaatattcgaaaatactaaacaagctaaataaatttgttgttatccacgtggatcttcagacgtttactgatggattcacatatatatttatgtaatacatggcaataacccaaattttgtggatttgttgctatggatacacgttttaaaaataatttttgagtccataatgtaatgatacctaaacgatatccagttaattcgaatagttattactaaccggtcggtattctaaacgattgagttattggttatgtgaaatgctatttaaggaagttgcttaacccattagttgaccataaaatcactgaaacgaatgaaaaaaaatg

SEQ ID NO: 6923 - DNA, 3000 bp, Unknown
  misc_feature (1)..( 3000): cDNA_ID_2165350_gDNA_ID_1621116_Annot_ID_171893 3000 nt of promoter + ATG
aaaaaactcgaattacaggttgcagaagcaaaatggcgcagccacagtaaaaacaaagaataaaactgaagtaaaaactcaatgttgactagatgtcctaggagaaaaccctcagacacctatttatacaaaacgaaataaaatgatagtagataggtcgggaacccaatcgaccggcctatagactgataatgggccgagatgggcttcgcgattagatgaagctctggaccgcttccaaacacttcttctactcctcttctcttccttgtgttcagcttgtctggttgagtgcagattcgagtaaactctgaagatgtggtcgagtgcttggtcgagtgatggtgttgggtggtgacagctttactcaaccagggggttgagtacggtggccgagtgaacggccaagtggtggtcagttggtatgacgaagtgttactcgaccaaatggtcgagtggtgtcatcaagtggcctggagtgtggttactcgaccagggggtcgaatgattggtaagaatggctccaatgttactcgaccagggggtcgagtgtgctgctggagttactcaaccaggtggtcgagtaactcttctggttccggcttgcttcatccaatttgcttgccaacagctccaaatcacctaaaacatctcagaaatgcaatatgtatgcaaacctatcctaatcatgcaaagtatgcaagaatgttgaggaatgatataaaacagtgatgaatgatatgaaactaaactcaaatcgatgatgaatgaacactgaaatcatgcaaattgtagacatttcaaaagtaaccatatctgggagctctcatgtcacctcatcacgctaaacagttctgaaacacaaacaagtcattatagaaaactttgactgaatttgatagaaactatatggtatgcaaataataatacaaaattaccatctcttctcttctccggacatatggcattgacccacatatgtgctttgctatccctaagccaccacgatcgctcttcttatttttggagttggttttgcttctcttgatgcttttctcgttttcccataaagcaataagaccaatccaaacagagttcatcatcttttgggacttccccttgtcaacacaatcctccgataatttatactctatttttatattcatcatccgtgttgcagcagataaatgagagtgaccctctttacaaccatcataaatcggtttcttcgctgcatctaacatatcaaaatactttttcgcttctaagtttggttcttcagttccacctttagtcgtttcgtgaaaagcatctgttaccatctatattacaccggcttgagctctagttatattctcttcctcttcattactattattatctccaagttccaacccatgattttcatcatctccactgttttgatcagtactactatttgctaaagtttcaaaatcattcacatgagaaaaccatatgtattatccaggcgtaaatcttctatataaatgcttccaaatagtatctactgagagaaatttctcattaccacaagaagaacaaggacaatatatcttaccacactccaatagaatctcttgatttgcagcaaaacacataaaatcaacaagaaattctttatattcgtttgttaattattcggtaccttcatctatataattatacatccacttacgatttttgttttttgttcttgtcattgacaacaattttcaattttttcagaagtaaagtttcacagaaaaaaaaaagagaaaaggggaagactatgaatcttatataacctagatttgtctccctcttttttttttggttttttcgtttctttttttcgattttcgtttttttttccacttttccaacaaatattttgtcatcaacttgttagaaataatttcccacaaacaaatttgtttctaacaaatattttgttaataatttccaataacttaaaatgttaatttgcaacgatatcatagttgttggcaaattacaaaaattttcctacgacatttatgataaatttaccataactaacattaattggaaatttgcattaaataaaatatttgatgcaattttatagtgatatatccctatttttacctgttttagctatgatttaagtattagttttagagtttatttgttatttccagagtcttttctagttcttttcaggtctttacatgtttgagattcatttggagataatggagcattctgaaggaaaaaagagaacttatgttgcagaagaaatctgaagactaaaaatcgcgtggtagacataattttttgatagatatatcaaatatagttatgtacatagatagacttattgaatagacatatttgtagttatggtaaagatacactaatctggtatagttagactttacgatagagttgttgggtatagttacattatgtgatggtagagttagtgtcgtgacagatttaatggatagagatgatgtatttgatatagttaaactatatgtggtgatagagattcttgacagagttagtttgttgaaagagttattagtaatggtagtagatttaagcgagtatgacagatatatctgttagagttatctctagttacgatagagatattcggactgacaggcttaaggtacttaaatgtatgagacagtggtgatagacatatttacttgacagtagagttaaagtcaaatttcatgtgacgaaagacatattgttgctatgtgatggtagagttatactgtatttaattactagaatagcactcaaatttctgacttatgaatggtgtggtaatagaattacgaatttaatgattttttagacatgtcatttttctaggttaagcatatgttctaagaatggaagatactatttttattcttatccgaataagaggatcttttgtggatcaggcaagtagaggtcgtaaactgcagaaaacaattgaatcatctgctctatttggcg

SEQ ID NO: 6924 - DNA, 3000 bp, Unknown
  misc_feature (1)..( 3000): cDNA_ID_2165361_gDNA_ID_1621116_Annot_ID_171895 3000 nt of promoter + ATG
tacttctataagacaggttcggatggttgtgcttgaagttgttgaaacccttattgtaacctccttggttctacacatagctcacttcttctgattgcagagtctccccatcctggacttggaacgtctcatcatcacccagaaaatgaacgtgcttctattgcacaaggagtaacttgtctagcttgtcattcatagctttcatttccctgcgatgcttctcatcagaatcagagctggtgcggatgcttctatcgtaatcttcattgtagttaccatccgattgagccaagttctctaccagctctcatctttcttcaatgtctttgttgaggaagttctcgttggaagcggtatcaagaagcatcctgatcttgggaaggacacctatgtatagagtgccgggaagtgaagcttttttaaacccgtgatgagggcatttcgtctgatagcctttgaagcgctttcatgcttcacagaaggtttaagcattcgtctgtgtgaatccggatatctcattccggagtctagcaattctagagttagagaaaaatttagccaggaaggttttcttgtagtcatcccaggttgtgactgatccctggggtagcgtcttttcccacagatgggctttgtctccaagtgagaagggaaacaagtgaagcttgaaaccatcttcaatgactccattgattttagttaggctataaaacctttcaaactcgtcaaggtgatctagaggatcctccattggaaggccatgaaacttgttcccctgaaccatagcaatgagacctctcttgatctcaaaattattgttttgaaacggcggaggaacaatgccatgacgctcgttgtggttattggaaagtgactagcaccaatgttgttaggttgctcttgttcatctacaacgttagccattgtttctgtttctgtctgttctctcaattggcgagcaatacggtagatgttatcgttgaataggacgttctgattcccttgtgaccgtgtatgcatgcaacaagtagcaacatggctataacagacgattaaacttgtttgctaggtacctgaaatacaaagtctgaaaagacacaatgttcgtatctcttataacaaaaacaaacttgatcttaacaattctgaaatctcaaatatagcaaacaaacacccaattggcaatgacgccaaattgatattaggattttagtcaattaatcctaaaacactaatcttgtcgttgtagtattttaggtgtcaatccaattagctgtgatgcaaacagataagatgtgatctgaagtcactaagtgaagccaagcaataacggttttgaggtttctaacaatcctaagcgaacatgtagaaaacagaaattttaacagaattactaaaatcagtcgaccacaactggttgatgccagaagtaggatgtggtcgagtaatagatcgagtaaaaggcaggaaatgaaacaactatacttgactgcacagtctgttgcaagacactgggtgtggtcgagtatgttggtcgagtaatagacaggaaatgagacaactatactcgtttgcatagtctgttgtcggacactgggtgtggtcgagtaagttggttgagtaattgcaaaaactaagaaacaggcaatgagaacgattaagcgttaacgataaaacagagaaatcagatagacgagaaattcttaaggatggggtaatcgaatggagtggtatcctagcctattcgaatggttaacaagcgcaattaagctatccctagacaatatgttcaacaacagatcaattcactcccgtgatagaaatcctcaaacaaagctagcctagatatggatgagtttattttacatggtacatgttgattctgtaaaccaaacaatgaatttatactaaggggttatataaattcacttctcttttagctctaagataatcggaaactgtaagaaaagaagaacaaggttgcttaatgatgaagttagggttttgctataggaaaagtagggttattgtattgagttcaagatggattgaatagaggacaaatccctctatttatacaatactttgaccgtctaagaatatgcaaaacttctaattatctaaggcttgaatcttcattccttctattcttcgcgagatactcctctctgaaaatggaagtctcctctttcttagatttaggaagtcggctgggcgatctccaattgttgaattagatcttctgacgacctcatgacttcggcccattaaccgggataccccggtttaatcgaattccctattttattcacaattcctccggtttaagccggtattgtcggaggtgctaattcctgcaccaacaatacacatgccaacgtagagtcgagttatagagtgttcttattaaagtgcatcgaggagcggaatatgatagcaagtgttggtgtcggatcccgcaccgtggggtcgggactggtcaaagatcgccacgtaagagggaagggtctaaaagaggaaaggcccatgggcttttctgagtaaaaaagtatacgtgaggtgattgatcagcgaggtggactggacatcgatgtcagaactgcccggattggagagtcgggtgggccagaggacgaagcccagaaagttcggaatcaattcaaatttgaacattcgaatagttaatatagaataattgtgtgtaaatgggaattaaatgtattctttgagtataaattgtgggtcaaaggccatgtagagacacacacatttttgtgcaaacttactatacacattttcttacaaaactcatagttttctctataagcatcaatctattttctagtacatttgtcctcaagaataatccttctcactaaataaataaatacttgagtgtgtgaatccgacatccacattttggcgccgtctgtggggacaaagaattcttgagtcatcagattttttctatacacgacatttccgaagtgagcgacaatg

SEQ ID NO: 6925 - DNA, 3000 bp, Unknown
  misc_feature (1)..( 3000): cDNA_ID_3049271_gDNA_ID_1621116_Annot_ID_171891 3000 nt of promoter + ATG
atccaaaaagaacccccggatccaacgccacttccatttgtcatgatgataccaaacaccgaacacactgtgaaccttactcaggtacgtaactctttaacttgatttgtttctcctgtttcaagaactgttactatgagtttatcatatttaggaaacattgagaaagagttagatttatttaaagatcatttggaatcaaactcttgtcttaggataaaagtaaaacatgaacatttcaagaatggtgcattgattaaagctgagccatgtttacttatttattgtgatttcatgactatgataacgcatttgctttttgccaaaggtgttgacaaaattgcatgtataaaagaggagccactagacttaaaatttctctcgtcaaatctctttaagaggactggaattggagttgttttgaagccaaagatcgattgtccattcaatcgaacaagaagaaaaagcgacaatgcttatgaacttgagctgcaaggtaagtataatgtgatttccaatttcaatgattcttacttggttattttcattgtaggtgaattggatttgaggtcaaatccttttcaagtgggagaggatgatgtgatcatggaaagcacaaaggacttggaatttgatcaagagcgtgtagccgaggaagagcttgaagcaaatgagcagcttgaacctgaggagcatttcgaagcagaaaatgaacttataacggagaaagagtatgagaaagatgttatcttaacctcattggttttgatacatgatcatcaaatggacatgtgtctcatttgtacttggaaagaaatagaggttgcttttctcaacaacttttataatgatgcaaggtctgaggagctgagaatgaagatctctaccttctctcaagaagcagttgaagcatttaaagccgcttggatcagatttagaggatattagagagattgtccgcatcatagtttcagtgaggttcaactgttaggtatcttcttcagaggagttgattggcattatcagatggctttggatgcagctagtgataagtaggtcttttaggcctacttatgctaaatgtgtgaggttcagttcaattcccgtaaaacacaaacatgtcgatgcagctatagggggtgtcaatcaagtccactgttattgctagcaatcaagacgtgtacagaagcaattaagtcaagccagattataatgatggtgggtttctagtaacaatcataggtcaggattcaaacaagtaaaaatgagaacttaagagccctactcgatcattgggtcgagtagaaccaacaggtgtcgaaattaagtaactaaaatgcaatcaacaggggatacaaataacaggtaaataaaagtgcaatcaacaggggatacaaatatatctaataggagtcctaaggatggattcattgataagggcaactctagggttcatcagatagctaataggtgaaaggtagatacccttgacgataaattcaaaaactgggtgaatccactgtcgtgatagagacccccagaactctaccacttcctaatctcaactgtcattgatgaaacatagcagagcagggtttaagaaacaatctaccaaatccaataagcagacaagccaatgtcttggtcgagtctacaaatctctggaattcgtagatcagacatccatttgaacgtcttttggacgttggacggcaatgatcgaatctccacattagccagcgaaaaccacataggggtcaagcgaagtcagaagggttctaacctaatctttaccacttggctaacctagagattaccctaatctaatccatcctcaagaaccctaatcactactcaagcaacattctcaagaacacaaacccagaaattactgaaatcataccaaaatgtagatctaaacaagctaaacaactttacttaaacaactaaatgcaaaacaaaatagattaagagtaattaagttttgaagattcataaacacaaagaaaaactaaaggataaaagctcgatcctttggacaaactccaaagtgatctatttatagtaaaacgttaaaaccctagattcactagaagacaagagacttgaggcggtttgggtgaatgctcgatcttggggatcaagtaaggagggtgctgcaaagtctgcgcctttgtgtctatgctccgagtgatcaattggtcgagtagatgcttcttcctctcctatctgtatgctcagatgtctgtttgagtggggaatgaagaggatccgaagacgctttgatagctcaacaagtcttgtaaagttggtcacccttggtcgagtaaatgggtcgagtagaggatcgagtaggaggggcgagtagatcaatctgctgcttcatcagaggctgccttgatcgagtaagagggtcgagtgaattgcagcctcctctgtagctgcctggattgagtaaagaggtcgagtgaaatgatgcctcttctgtagctgcctggatcgagtgaatggatcgagtagagtcctttttagctccttccgcacctgaaaacacactgaaacatgcaatgcaaatgcaagatgatcctagagcctaagtatgcaaaataagctaaaatggtgcaaaatgatacgatacaatgagcatatgcacagctaaatgatgataaacatacacctaaaatgagtaaaatacaatgttatcagctagtaatgggaatttcatgtcaagatatccagaaaatgcaacaatgttgattgacagctagcttccagcattagtaccaaaagcgttgacattgcaaggaaaacgcaagttcagtatgttgcacaggttgacagtttagccacttcagagaagatgaatcaatagagatacatgagcttcaatcaacaatctacacatcagaaatttgttcagcaaactaaaagcttcattcaagattatgcttcttcaacccaagcccaccctccacccgacaccactaagacgatgaatca

SEQ ID NO: 6926 - DNA, 3000 bp, Unknown
  misc_feature (1)..( 3000): cDNA_ID_1816177_gDNA_ID_1621116_Annot_ID_171879 3000 nt of promoter + ATG
cctttggatatgcgcaccaaaagagactaaggattttgctggatatacacaccaacaagatgatcttcttaaaaaaggtttttgattaaaagaaagataagttctcaaaagagaatacaagagtatataaagagaaggagaagagaagctgaagaggcaagtcttagaacatacttcaaggctgcctagaacacaacagtaattaaaaacaaagtttgaaattcaaaataaacccttcaactactaaggccacgaaattgtctctttattttagtgggtttgggccttgaatcatcaaaattgattatatgaagtgaaaacataagcctcattaaaaaccttcctttggaaaacccagtgggacaaaaccaaaggcagggaaaaagagcactcatgaatcacttatccatcttgatgaggtccttgagcttagatcaaaacaaagaggtagtgatttggctcaagtcatttggtcggtcccaaatgtggttaagcatcccgccaatggcatggttgaataccttagctctagaacgagtcattgggacggtcgatgtgacaagaacatcctccgctacaagcttctcctcagctacaagctcatcctcagctacaagcttacctccttcctcagctacaagctcacgttcaagctccggttcatgctccatatccttaatgttgtccatgatcatatcatcccctccctcttgaaaaggatttgacctcaaatccggttcatctgcaataaaaggtaccaagtcagaaacattaaagctagaactcacattatacttaccttgcaaatcgagttgataggcattgtcgttgatccgtttgattatcttgaatggaccgtctattcttggcatgagtttggacttcctttgagctcgaaacctctcctttcttaaatgaatccacaccatatctccaacttcgaagatttgttctcgtctccctttattagcttgcttagcatagagtttggtcttttcttctatgtttctcctcgcattctcatggatatgttgcactagctcagccttctttttaccatcaatacttactctttcactcaaaggcaaagggattagatccaaaggtgagatggggttgaaccaataaacaatttgaaaaggagaatacttagaagcagaatgcacgacatgattatatgcaaattcaatatgtggtaagcattcttcccaagttttaatgttctttttaatcaatgcacgcaagagagtacctaaggttctattaaccacttcagtttgaccatcagtttgcggatgacatgtagtagagaataacagcttagttcctaacttagaccacaatgttctccaaaagtaactaagaaacttagtatctctatccgaaactatggacctaggcatcccatgcaaacgaactatctctttaaagaatagattagctacatgcaatgcatcatcagttttatgacaagcaatgaaatgagccatcttagaaaatctatcaaccacaacaaagatagaatcatttcctgttctagtcctaggcaatcccatcacaaaatccattgaaatatcattccagggatgagtaggaataggtaaaggagtatacaaaccgatgggctgaaccttagatttggcttgcttacaagtattacatctcccacaaattctttcaacatcacgtttcatgtgcggccaatggaaatgttctttcatgacttccaacgtcttagcaatgccaaagtgtcccattagtccacctccatgaacttccctgacaaatagatctcgtagagagcagttaggaacacacaaacggttctcatagaagagaaacacgtcttgtctaaaatagtgaccgaaagcaaacttttcacaagctttataaacctcgtgaaaatcatggtcagtttcataaagttcttttatttgttcaaaacccataagcttaacattaagagtagagagtagggtgtacctccgggataatgcatcagcgactacattatccttatcttttttgtacttgatgacgtagggaaatgtctcaataaactcaaaccacctcgcatgtctcttgttaagtttctgttgtcccttcaagtgttttagcgattcatgatcagtgtgaatgacgaactccttagaccataggtagtgttgccacgtttggagagctcggaccaaggcgtacagctccttgtcataggttgggtattttagcgtagctcctccaagtttctcactgaaaaaggcaataggcttttgatcttgcattagaacagctccaatacctatacctgatgcatcacactcaatctcaaacgttttaagaaagtcaggcaatatcaaaacaggtgcattggttagtttatccttgagagactgaaatgcttcttcttgtgcttcctcctatttgaatcctacatcctttttgataacctcggtgagtggtgcggcaatggtactaaagtccttgacaaatctcctataaaatccagcaaggccatgaaaactccttacttctcccacagtctttggactcggccaatctttaataaccttaactttctcttcgtcaaccttaactccatctgcactcacaacaaagccaaaaaacacaagattatccgtgcaaaaggtgcatttctttaggttggcatagagttcctcttttctaaggacattcaaaacagaatctaaatgctctatatgctctctcaagcttttgctgtaaactaagatgtcatcaaagtaaactacaacaaatatcccaatgaatgctcttagaacatgattcatcaacctcatgaatgtactaggtgcattagttaatccaaatggcatgactagccactcatataacccatgtttagttttaaatgcagttttccattcatctccctctctcatcctaatacttaaccgttatattgttgatggctctgcaatcaacacacattctccagctgccatccgcacttacatacttttc

SEQ ID NO: 6927 - DNA, 3000 bp, Unknown
  misc_feature (1)..( 3000): cDNA_ID_1816181_gDNA_ID_1621116_Annot_ID_171872 3000 nt of promoter + ATG
aagactttaggatgacctttgatgtcaaagacgcgatgaagaagcctaccatagaagggcaactcttttggatcaaagaaatggatcagttagccgatgaattactggaagagctggcggaagaagatcatcttaacagtgctttaaccaaaagtggtgaagatgggtttctgcatttggaaacatttggataccaaaagctgttagactccaataaagcgatggaagaatcagaaccctttgaggaattgaatgaaccagcaacagaggtaatggtaatgagcgaagaagggtcaactcgagttcaacctgcactctcgaggacatactcgaccagccactcgaccttgtctgccaacgaatctggggagccgatcattccaacttcagatgactggtctgaacttaaggcaccgaaggttgatctcaaaccacttcctaaaggtctaaggtacgcattccttggtccaaactctacttaccctgtgatcattaatgccgagttaaatagtgatgaagtgaacctactattatctgagcttagaaagtataggagagcgattggttattcattatccgacattaagggaatttcacctagtttatgcaaccaaaggatctctttacatgtttaggataggagcttcaagatctcaactgatcactcgaccccctggtcgagtggaggacatcactactttaccacatcactcgaccccgaggtcgagcgtcttcatcccatcacctgaccaccactcgatcgcatcactcgaccccgaggtcgagtgtcttcacattcattgccagaccactactcgacctcgtcactctacctggaagtcgagtatcaccatcaccaccactcgactgcatactcgatggcaagcttcagggccttcttcattccgcactcaaccagacactcgagcacaaggaagaaaagaagactccagctattcactcgacctcccactcgaccacatgggtcgagtacagttcttaatccgtcccaatacttcgtcgttttaagtattagggtttcgtaatatttggctataagtagcatgtacttcacattttcgcagagaagttttttatctagttttatttccgcagaccttgtgttctagaccttttgtaatccagatttctctttatctattcagtattcagtattcagcttttgttcttgatttcggttactgttgttcattctgttatcatcctgtacactgttgttatcatgttttcaacttgttcaacgtttatgctttcgtttatgatgtctgagtagtgaatagatttctgaggatgggttagagtagtgtagaattctcagtatgctaggtgattgagtattgattgatagatcccttctggattagttgttcttaatgcctattgctttctgatcaactggaatttgagcccagacatttctgcgcccaaaaagtgttcgatgaaatgtctgaaccactaattccagagattcgtgaccgtgtactaaggtattggttgcagggagcgttttggctttaacttgttgattcgtaatgcctgttaggttagctctcgtcaatggtgattgagtctaggactaggttaacttgagagtctctgttgcggtgacacttagatttggttaatgaacttgttgtctagggttaatttattgagcatgtcaatcacctgtaaactgagaaaacgaaactactcaattaccccatcctcgggaattctttatctgattgaattctttgtttactctactgttgtttactgcatcttgttatctgtcgcttaatttctacaattctttcttgttactcgacctcatactcgaccacccagttgtctggcaacagactgtgcagtcgagtatctgtgttttattttctgtgtgttactcgacctgtcactcgatcacacccagtgctctacaaagagctgtgttggtctgtgttggtcgagtgttttactatttctgtttgattttctgttttctgcatgttcacttaggactgctagaacacaccaaaacatgttattacttggcttgacttagtgacttctgatcacatcttgattgttagcatcacacccatttggattgacaacctaaaatactacaacgacatgattggtgttttgggataattgactaaaaacctattatcatatttttagagcagtttcccatacccttagcctagccttatttcaagccaaagatcatttgtgtgattgtgaggtctttttcgattgagcttggtataacttgttaggtatgagccgacaagagcagtctttcatgtagacctagcccacgctctttgggttagctaggactaggtggagacttgtatttgggattgggattgtgtatggattgaatgagaatgagaatgagaatgaaaagaaaaggaaaaaaaagagtaagagtttagagttctaagggggatacaaaagtgttaagtctagtaaagggtttggaattcaaagaagttaggcatagtgattcaaagaaaagggtaaatcgccctatgtgctaagattagaagaaaagccttaagtttgtcaaagtataaaaccaaacccgctagactcttaaattgattcaaagagaaccccttagaacttgaaccaaaaagagagaagaatgagaaaaagggtagagttaggacatctatgggactgggatcattttctgagctatcatactatatcattgggtagatgggagtctgttcttgtatgtatccattggcttttacctttagcattctactgaagctcaatcttttctctgagagtcccctgttactcgactaaaccattagagggaccatttttgtctcttagcctaagccgaaaccaagtgagttcataaccattgcattgcttgatccactattcgtgcttaatgaatgttaaagggaattggttgatgtgaatgcttgaatagattaaggcaagttgttaggttgcattgtgacgagt

SEQ ID NO: 6928 - DNA, 3000 bp, Unknown; identical to SEQ ID NO: 6927
  misc_feature (1)..( 3000): cDNA_ID_1816181_gDNA_ID_1621116_Annot_ID_56198 3000 nt of promoter + ATG

SEQ ID NO: 6929 - DNA, 3000 bp, Unknown; identical to SEQ ID NO: 6926
  misc_feature (1)..( 3000): cDNA_ID_1816177_gDNA_ID_1621116_Annot_ID_56200 3000 nt of promoter + ATG

SEQ ID NO: 6930 - DNA, 3000 bp, Unknown
  misc_feature (1)..( 3000): cDNA_ID_1816153_gDNA_ID_1621116_Annot_ID_56207 3000 nt of promoter + ATG
gatgttttgaaaatttccaaatatggcccagaactttcccttattttcaaagaaggctcaaacatttttaggacttatatattgatttttatggtcattgtttagaccaaactcttcttatctcttttattcttgggagcaaaaccatgtggagactccgtttagagaagattcttctaaactcttttctcttcttaatttcatcattgatttcttattcaatcatgttttgttcttctatgatcatgcttgagtagttctcttgttaggtttaggaattctcattagggatttggataaattagtagatcgaaaaccatattaggatattataattagaattcttcatcttagattgttcttaatgctagttttagagtaactaactagaacttgattttaggttattcggtatgcccaccataggtatctattactggaactatcttagatgagcctagtatttagatgcgtgctagcgtccattacttaggtgaacttatcaaacctgattataatgcttgcttagttttagggatttacaagagagttgggatcaatactattaagcatagtgagtttcgcgaaacaccaccggttactttatattagtgattggtgttctagaatggttcaataataatcctaatttactgctagatctactattccgatacttcctgagaatttctctaaacccgacatcttaatcatctgaatctacaaccaatctctttattgctttcttgtcttttactcttataatattttatgtttagctttattcaaaactgttaatctactgtgtgatccgagaactttgtggaattcgatccttaagtgctataacaacctctttatttgagagagtagtcattagggtaatttgactcatatcagtgattactcagacatgataatagaaacacaaatcataatctgaatagtttccattgatgaattaagaataatagcaaaggagttcagaatcctctctcaaaggattggattcttctctcaaaatgtataacaaactataaaaacaaaacttaggtctaacaatgaccaaataattaggtatattcgtgactaaaaacgtgcaaggactactttgcaaataaggaagacttcagggcttctcaaagacttggtagaaaacgagaattcccttggcagcaataagggtgtcgatcgatataggtgtggtgtcgatcgacaccagcttctgaaaaacgttattcaagatcttcattgctgaaaagcttccaaaattccttattgtgctccatagttcccagaagtgtaagtgtacctgaaatgactcaaaacatacgaaaaagagtagaaagattctaaaaaccattctgaaactatgttagaaatcagtaaaaaccaggacatatcatgcttttccatggaaattcaagaaagcatggatagaaagatacaattctcttgcagagaagcagcttgatgagatggaagcggtgatgcctctgatagaagttctcaaacttatcatggatcctcacaaagatgtgagaaattcattctggaaaggatcaagttgtatcaagattcagatgatgaatgtgatgctaatccgtctagagctactgttaagaggagcgttcaagaaaagctggaagatcccggatctttcactctaccattttccattgggcaattggctttcatcaattgtctatgtgatttaggagcttcagtaagcttaatgccactctctgtggcaaggaagctagaattcactcagtacaagccttgcgacctggcttcgatccttgctgataggtcttcaagaaaacccttcggcctgctaaaatatctgccggtaatgattaatggagtggaaatgcctacggatttcgttgtgcttgagatggaagcagaacctaaggatcctctaatcctgggaagacctttcttagcctaagtgggagcgatgatagatgtcaaagatgggagaataaatctcaaccttgggaagcacatcaagctgcagtgtgacatcaacgaaacttcgtaaaggtcaactgtagaagaaaagatcatagctcaacctcagccttcgaatttgatcacccgatcaagcaaaacctctgcacctaacttgtgagaactcagaaagaaatctgatgagcaagaagaaaccatagagaagctagcccacacggttgaagaacttaagagtaaactgaatcagatgcaagaagaagctcaaccaaacgcgggattgatactatcccaagaaaaaagtttacttcacgatggtctgaggagatagattatccaccagaagataaagaggcctatttcgaggaaagaagaattgagtattctgctgcacaactctcaagagaggatgctgaatatgatgatgagatcagagaggactacgcagatcctctctattactcattttcttcctaatgagtgtgaggagtcaagatagagattttaaacaagctcacttgggaggaagtcccatgtttatctttgtacatatttttaatattccttgttgtttttgatgcattttgttagtgttttcaggagataagtatgaagagctgagggaaatggatttaggctttgacggaacagcaatacacttgaccaccaagcaatcaaagacactcaaccttgttttggctactccatgccaggaaattactcgaccgccttgctggccgcaatagaagaagagagcagtatattcgaccacaccctacagggatcgaaaaaaatgtgatcgagtacagttgatgcaatcatgacttccacatgtcaggaattcactcgagggcggtgctggctgccacgaaggagaagagatcgagcctcctctggacatgccctcgaggagatatgacgagcctgagccaagtcagcacaggcctaagcctagtgagcaatgagtctcacaagtccctgcgaggcattcatcattcgagcctcgggagcacgggagaaagaaga

SEQ ID NO: 6931 - DNA, 3000 bp, Unknown
  misc_feature (1)..( 3000): cDNA_ID_1816248_gDNA_ID_1621117_Annot_ID_56208 3000 nt of promoter + ATG
aggtaatatattaggattatgaaattgattagaagcctcataatgttgatgacattgtaggaaaaaaagaagaagttgtaaatgggacatgcacacattttacatatttccatttattagtgtcaaatctccttcataggcttcttcttgatggccattttgatgaaacaaaccgtttctcctttttctggcagcttggatacataatttataggcgggttttacgctattattcaggagaggaagatggattaggtgaggctttgattaacttctttttatctatgattcgcgcttaactttttcttttgtttaaatcttaaatcgtttgatctaaaaaaacagatatgaggaaggcattatcaagagatgtagagaaaaagtctgtgattcctctcaagagacctatcacacctgatgaattagagtatgattaagaccctaacttggttcacaattgttatctgcattaaaaatttctccaagagcctttagatgatgttactattcctgttgtttcgtatttgaactattatgtttcgttttcttccacacaaatttataattagttttgattaaactttaatctatatatacatttttggaggagatttttgaagataatgttgaagatttgagccataattcaacaattaattcaaatggttgggttttacccggtttaactctgttcggatcctggataacatgtttaattctgttctgatattggataacattaatttttggaaaagttacctaaaaactaataattaaaaacgaaaattaatgatttaatataaacaatatctctaaactaaccatatttcttatttaccttaaccaatttcctaaaatatttctacctaatttaaacataaatatataattcttctttcatttttatttgatcttatactttatttattttgaatttatataaaatatatatagttaataaaatattatatttttttctgaatatgatgtaattcaaagttttttaaacggacatatattattcaacctatgaagaaataatatgtgtacaatgtcccacatcgcttagaaaaattggacaatggttcagacccatattataaaaggaccaaaatgattctgattacgaatgagcaggaagcttgatttatcaagcgtccaaaattaaaatagttatctgattttactcggatttattattttaaagaattgaaactttaaaatgtttcaagaaattataaatattataactttatcaaaagttaaatattataattttaaaaactttttataaagtttatctttaaattaaaatggtttgtttcctagggttatttattttaaaaaattgaaactttaaaaagtttaaaaaattataaattaaattttacaagaaatttaaacaatataaaagatattaatacgggacgatatattgcgagagaaatcttagatataacactcaaaattcaatgatgaagtttgggtcaatattaatcttttttgaagtttctaattttataaatatttgaaatttataataaaatgacaaatttgtgtttaatttcacgggacggggttatatggtgtgacaggtttgagtggataataacatgggatagtatgctatggagaaaaacatataatgacaatcataatgtaattatataatcttaaacactaaacaaaattaacaatattaaaaaaaaaaaacttaaaactttaatttttttaaaacacattttgattcttttataagaaatttaaatattataaatatttaaactttatactacgggtgaaattttagaattgactgtttgggttgataagaatttgcgatagaactaggagttaaaatgacaattaaaatataattatacaattaaatactaccacgagcgaaatcctagaattgacgagtttgaatcgatattaatatgggatggtgtactacgggtgatattttagaattgactggtttgggttgataataatttgcgatagaattaggagtgaaatcctagaatgacaattaaaatataattatacaattaaatactaccacgggtgaaatcctagaattgacgggcttgattcgatattaatatgggatggtgtactacgggtgatattttagaattgactggtttgggttgataataatttgcgatagaattaggagtgaaatcttagaatgacaattaaaatataattatacaattaaatactaccacgggtgaaattttagaattgacgggtttgattcgatattaatatgggatgatgtactacgggtgaaatccgagaaacaacaatcaaaatacaattatacaatattaaacatttaacaaaataaacaaatacaacttaaaactttaaaatttgagttataaaatttcttctcgcggtgaattatacatttaaatcaaacaatagcattaaatttattaaatcattctaaaaaatattcaattattttttatttaataaaaatatagaacccttagttgacatagttgataagtcaagtgttttactcttctaatcttaagcacttaccttaatgagacacacatattaggattggttgcacaaggccgattcttatacactgtatacccattacaacgaagcccattatcaaccctatatagcaatctgcaagacaaagatccaaacatattgaataacaagtaacttttttttttctcggtccaacttcatctggaataacaagcaacttttatctgatgtatatactttcagtgaccatctaccttagttggtttgaaaagaaaatagttgtttattcgttcatgttcttagaagttctaaattttgatcatctcttatttgaaagctcaactaaaatagctatgatatcattccctgatgctacgtactaggtttttaaattcatacacacacaaatctataattaaaacttgttaaattcatacacacaaaggacaaatcttcttcgtattaaaaaagatg

SEQ ID NO: 6932 - DNA, 3000 bp, Unknown; identical to SEQ ID NO: 6931
  misc_feature (1)..( 3000): cDNA_ID_3049347_gDNA_ID_1621117_Annot_ID_171906 3000 nt of promoter + ATG

SEQ ID NO: 6933 - DNA, 3000 bp, Unknown
  misc_feature (1)..( 3000): cDNA_ID_2992669_gDNA_ID_1621117_Annot_ID_56210 3000 nt of promoter + ATG
aaagtttcaattctttaaaataataaatccgagtaaaatcagataactattttaattttggacgcttgataaatcaagcttcctgctcattcgtaatcagaatcattttggtccttttataatatgggtctgaaccattgtccaatttttctaagcgatgtgggacattgtacacatattatttcttcataggttgaataatatatgtccgtttaaaaaactttgaattacatcatattcagaaaaaaatataatattttattaactatatatattttatataaattcaaaataaataaagtataagatcaaataaaaatgaaagaagaattatatatttatgtttaaattaggtagaaatattttaggaaattggttaaggtaaataagaaatatggttagtttagagatattgtttatattaaatcattaattttcgtttttaattattagtttttaggtaacttttccaaaaattaatgttatccaatatcagaacagaattaaacatgttatccaggatccgaacagagttaaaccgggtaaaacccaaccatttgaattaattgttgaattatggctcaaatcttcaacattatcttcaaaaatctcctccaaaaatgtatatatagattaaagtttaatcaaaactaattataaatttgtgtggaagaaaacgaaacataatagttcaaatacgaaacaacaggaatagtaacatcatctaaaggctcttggagaaatttttaatgcagataacaattgtgaaccaagttagggtcttaatcatactctaattcatcaggtgtgataggtctcttgagaggaatcacagactttttctctacatctcttgataatgccttcctcatatctgtttttttagatcaaacgatttaagatttaaacaaaagaaaaagttaagcgcgaatcatagataaaaagaagttaatcaaagcctcacctaatccatcttcctctcctgaataatagcgtaaaacccgcctataaattatgtatccaagctgccagaaaaaggagaaacggtttgtttcatcaaaatggccatcaagaagaagcctatgaaggagatttgacactaataaatggaaatatgtaaaatgtgtgcatgtcccatttacaacttcttctttttttcctacaatgtcatcaacattatgaggcttctaatcaatttcataatcctaatatattaccttttcatacatcttgatggctggtgtgttggaagctcttacaaaaagatccacaaagtaggctttatcactgcaatcaataaccacaagtataataatcattagaagaccagaaattaccagataatatataaaatcaatgaggagaaattcaagattttcttcctttgaaacaatctaaatatatcggttttcaaataaataaatggtccactcgaaagccaatatcaatatattaaggctttcatattttatatcataacgatccatatcaaagagaacactaaaacttgagatgctttgtaattgttaagtcttacatcttatcacttatatcttccagaaggttcatcagtttctttgcaagttgctgcctgcggtattctggagagacagtgacggctgtcacatgaccatgccaagattcaccctgtccttcaactttacccataactgaaaccatgtagaatcttagttagacacatgcttttaaaattatatttataagaacaagttttacatatgtcacttacgttggattctcaagaatatcaaccataacatttcaactatacaaaagaacatttcagtgacactgcttaattttcaaatgtgttaatatccaaaagcttagttttactctcagttctttcaatggtttcactatacttccaaggtctctttccaaactataccacgaaaagggagaaaaacaggtatagtaatagggcaccacgagaacagaacgtcaataatgaagcatatatcgtacttgaagaaaataaagaaagataaagccttgtataaatcacatttcgaaccaatccaataaggtatagcatcattatactacaaacactgaaagacagaaaaatttgagccttgatataactcataactcattctctggacatttagaagttagcacaaacaatcttaagccatgcttcctatgcatcttctaccccatatcaagatttctaaaaccgctaactacagagactaggactaatacaagcagaatttgtttaaacacttatacatcctggtttgtgttaatcagttttcaaacagagtcactcttcctggttttaacaacattcaagctatctccatctgataaccaaaaaaaatcaatagtggcttttacactaacagtttatcatctaagtttcaaccctaaaagtaaacataatctccacgaatttcaaattcctaaaccaacgaagacataaagaaatcaaaacgaagagaacaagaggattacttactataacccatgacacgattgccgggaccttcagcaacatgaaaatagtcaggccatctcgctaaataggtcatgtagaaggacatattgaactgtttcacgaaacaaaattcgaacaaaaatcaacaaaatcgccatagcaaaacaaagcaataatcagacgaaaccagataataagaagaagaaacacgagattactgtttcagtgaggtggtccagattcacggaagtgaatcggagaaggtcattgcagctgaatctacgtatcgtcgtcatctcttctttttctcaaatcccttcgagcttcgtcagattctctggaaaaagaaagaggagacaacaacaaagcaatatacatggcccagttagaaaattaataaagcccatttatatttgggcctataacactgatgacgtcatgtaaaagatgatcaaatttcattatctcccgtcgtcgcgaccttctcagacaacagaaccaaatcctcggcggcgattgaagaaacctttccg

SEQ ID NO: 6934 - DNA, 3000 bp, Unknown
  misc_feature (1)..( 3000): cDNA_ID_1816228_gDNA_ID_1621117_Annot_ID_56216 3000 nt of promoter + ATG
tgagaggaagaaatcccaaaagcaccttttcgtaaatcatctgggtaaacaggagctcggataggtggataactgtcaggcgtttgtggatcaaaaccatcggtggaagaaccgagaggtgactcctcaccaaacatcatagggtcttggtttgggaaggcttcagccatagtctgctgagcatgacgaataacaccggtggcatgatcgtatctttcagccaaagcacgatatgctcgataaaactcctcaaccagtttcataagctcaggccgcttcttgtaatacatttccgctcgcctagcaaaagagtcagcatcttcttcaataaccttgatcatttgcttgactttactatccatatctgtcaacaaaaatagaaacatgtaagcagatcgcatacaaagtatcttgcatgacacaaaactgaactaaaagtaaaagaaatttgtcacgatggaaatgacctttcccgtgggaaatacaagggacgttaaaacaagaaaatcacatacctgtaagattctcctgaagccatttcgagttcttggggcttatgtgactatcccaccaccaagaatagcgtttagagttaccattcacaacagcagtcatttttcccggcaaaatcacacaaaaattatgaggatattagaacactccggaaccaagtctctctcaaagccaagtacaccaaattcctctgtaaaaaaatcctaacttaagaagacgaagaagaagaagaaaatagcaagggttaagctttgataataatgaacaagttcaacagtcatataaaagacaaatacagaagaaaacaaaagaaaaaatagaaacgaattaccactaagtcaatgaaggccaaattcgagacaaaaataattaactagccaaatccagtagtaacctggtcagaaaacatatcaaacaattcattacagatgaaaaattggatcagcataaatcaattcgtctttggaaattagacgagaatcctagggaagaatagcaagtgaaaccacatgatcttacaggaattagaggttatagtaacgcacttagtcggaaactgaaattagctacacaggttaaatctacaaagcgaatctaacactagtgaaatcaggtccaaaagcaagaattctgtgaggcttaccggaaataatacttgtactacaaaaatcagaaatcttcggatcagctttcgctttcacttcttcttcttcttcttcttctcatctcattttcttcatctagatctctctctctttctctctccaggcgtttttcagctctggttcctactttttacgttgtgaagaagaagaattgtttaggtaagcttttaaatgacgatattaccctccagtacagttctcacagatgttctgtttcattattttaattcacttgttgcgtgactttgcctccttgggatcgccttcgctgccaacttaaaaaaaaacacgactttcatgtccgaaagaaaatattcttttatcgaactacaactaaatacagtatgacattttatttgatttctttatttttcaatctgatacttcccatttacccctgatttatatcaagtctgcagttcactttttctttttctatacctgtctgctcaagaactaaaatgattttgtaattttaatacattttattatccggaataacaaagtattaaatcacgaaagatgatttaaaaaaaaaaaaaaagtattaaatactagtaatgataaggaggctgacaagagataagtgacaaagacagggaggtcttggacggtgagctctcggtccactttcgtcaccctttgtttttttctccacgttcgcttttagattcgacttattgcgatcttgcgtgtcaaactttttccaatcatctaaaagttgagtcggagttagagttacgttgttcataacttttatttaaactttgcaagaaaaaagtatatacgatatatggtggcttatcgttatgtatcatttcattcagctttctaaaatttataatttaaaaaataatattataattaagattaaaaacgataaattcaaatttaattgactgagaatgtttttggtgtttggtatgcattacttgtttgacacaacttatatatcatcctttatttgttactcaaacgaagattcacgaaacggacaaataaactatccacctattgggaacaaataggttgtctgacttttaagcatcacaaacggttatatactattttacataaacgtttcgagtgtgttaagattcatttaattgtaaactaaataatcaacagcgtgacttcaaatcaaattgtcttcttataagtttattactaacatatattcttgttcagtttgttgccaatattgaattaattaaaaggattgtgtatattttccttaattgtattgttttttttgtcggttatagaaatgcaaaacaaaaagaaatgaatagaggagtcaacactcaacagccactacctaacaaacacttttaatagttccagctcgtatcgtttttcatgcctccaaagattaattatgattttcaaaatcatttataactatccctccacatgtctttaatagtcaaattgatcttatattaaaaactctatatagtaagaccaagtgaattttaaaattacatcaatgcgatttatatggatgattcaaaagtatttatatttcaaaactgaaacaaggccttgcagcctttcttaatgcttcgtgcagataggcccattaataaaacaataaagcccatacttgtaaaatcaggtaaagacgcaacgcaagcggcacatcagacacatatccattccgaccaaaccatgataaagtatatgccacgtcactattcatcgtcgattagtttttacgaaattgaccaacataccctcgttgtttggttttatctacaacgcagttgctgagtcacacttgttttcttcactcggaaaattcgaaaatcgagatcaaatg

SEQ ID NO: 6935 - DNA, 3000 bp, Unknown
  misc_feature (1)..( 3000): cDNA_ID_2026922_gDNA_ID_1621117_Annot_ID_56217 3000 nt of promoter + ATG
catgtcctcagaaactattcaagagagaataaaataacaacttgtgcaaagaagaagcaagtcgtaataggaggcctgtaatggtaccttttatcacccatgtctctaatagcagatgctggaggtccaatgaatgttagacccgaatcctcacagagttgggcaaagtcagaactttctgacaagaacccatagccagggtgtattgcctagttatataattcaaagaagacatcagctacaagaacacgattattctttttcggggatcaaaactcatacctgtgcaccagtccgagccgctgcctccatgatagtcacaccgctgaggtaactaagtctagccgagggcgggccaatccgtaccgcttcgtctgcagatttcacatggagcgaatctctatcagcgtcactgtaaaccgcaacggtctgaatccctaaacgcttcgccgttctcatgatccggcaagcaatctcgcctctgttcgccaccaaaatcttctcaatacattgctccttaggcttcatcgatgcggagccggaaatatatctcacgagcatcgagtgatttttccgacgaacattccgtcgaagtgcccacaccgtcatcatcgacatttgatctcgattttcgaattttccgagtgaagaaaacaagtgtgactcagcaactgcgttgtagataaaaccaaacaacgagggtatgttggtcaatttcgtaaaaactaatcgacgatgaatagtgacgtggcatatactttatcatggtttggtcggaatggatatgtgtctgatgtgccgcttgcgttgcgtctttacctgattttacaagtatgggctttattgttttattaatgggcctatctgcacgaagcattaagaaaggctgcaaggccttgtttcagttttgaaatataaatacttttgaatcatccatataaatcgcattgatgtaattttaaaattcacttggtcttactatatagagtttttaatataagatcaatttgactattaaagacatgtggagggatagttataaatgattttgaaaatcataattaatctttggaggcatgaaaaacgatacgagctggaactattaaaagtgtttgttaggtagtggctgttgagtgttgactcctctattcatttctttttgttttgcatttctataaccgacaaaaaaaacaatacaattaaggaaaatatacacaatccttttaattaattcaatattggcaacaaactgaacaagaatatatgttagtaataaacttataagaagacaatttgatttgaagtcacgctgttgattatttagtttacaattaaatgaatcttaacacactcgaaacgtttatgtaaaatagtatataaccgtttgtgatgcttaaaagtcagacaacctatttgttcccaataggtggatagtttatttgtccgtttcgtgaatcttcgtttgagtaacaaataaaggatgatatataagttgtgtcaaacaagtaatgcataccaaacaccaaaaacattctcagtcaattaaatttgaatttatcgtttttaatcttaattataatattattttttaaattataaattttagaaagctgaatgaaatgatacataacgataagccaccatatatcgtatatacttttttcttgcaaagtttaaataaaagttatgaacaacgtaactctaactccgactcaacttttagatgattggaaaaagtttgacacgcaagatcgcaataagtcgaatctaaaagcgaacgtggagaaaaaaacaaagggtgacgaaagtggaccgagagctcaccgtccaagacctccctgtctttgtcacttatctcttgtcagcctccttatcattactagtatttaatactttttttttttttttaaatcatctttcgtgatttaatactttgttattccggataataaaatgtattaaaattacaaaatcattttagttcttgagcagacaggtatagaaaaagaaaaagtgaactgcagacttgatataaatcaggggtaaatgggaagtatcagattgaaaaataaagaaatcaaataaaatgtcatactgtatttagttgtagttcgataaaagaatattttctttcggacatgaaagtcgtgtttttttttaagttggcagcgaaggcgatcccaaggaggcaaagtcacgcaacaagtgaattaaaataatgaaacagaacatctgtgagaactgtactggagggtaatatcgtcatttaaaagcttacctaaacaattcttcttcttcacaacgtaaaaagtaggaaccagagctgaaaaacgcctggagagagaaagagagagagatctagatgaagaaaatgagatgagaagaagaagaagaagaagaagtgaaagcgaaagctgatccgaagatttctgatttttgtagtacaagtattatttccggtaagcctcacagaattcttgcttttggacctgatttcactagtgttagattcgctttgtagatttaacctgtgtagctaatttcagtttccgactaagtgcgttactataacctctaattcctgtaagatcatgtggtttcacttgctattcttccctaggattctcgtctaatttccaaagacgaattgatttatgctgatccaatttttcatctgtaatgaattgtttgatatgttttctgaccaggttactactggatttggctagttaattatttttgtctcgaatttggccttcattgacttagtggtaattcgtttctattttttcttttgttttcttctgtatttgtcttttatatgactgttgaacttgttcattattatcaaagcttaacccttgctattttcttcttcttcttcgtcttcttaagttaggatttttttacagaggaatttggtgtacttggctttgagagagacttggttccggagtgttctaatatcctcataatttttgtgtgattttgccgggaaaa

SEQ ID NO: 6936 - DNA, 3000 bp, Unknown
  misc_feature (1)..( 3000): cDNA_ID_1816224_gDNA_ID_1621117_Annot_ID_56218 3000 nt of promoter + ATG
agtcttttttttttaagatcaaattgagctgatacaatgtgacgaattagggtttcgtagcaagaagaaagatctaagatccaaaattttcaatttgtgaacccctaaacacttgaaaaaatccccttttttccttccacgagaatgagcaaaaacccaaattttgacaaaaagggaagaaaaagagcttagcggaaaaacgcgattttgtttttgttttttttttccttaaagaaaatttaaattaaatcaaatctccttctctctcttttttcttccttctttctttgttttttttttctgttctggtgttgttgacggcgtcgtctctctccgcgccttgtttctcgctcaagtcgtctcactttctctctctaaaacacgatactgtttgtttctccttcgtaaattatttccaattttattactttattagcccttgaaattttgttttatactattttataaccactacaatatttcattaccattttgacccccaaattagtcttgcatcgcaaaccccacagctaaattttgtagaccaaaacaatggcgcatataaaattatcaactagggacacttgaatacctttgacatttcgttcgtgaaagtaacaaaggttgactctatcttctctatcattttatataattgtttgagttagtttatatacaaatggtcaaataaggatgttttagagatacacattaggatattattttgttttattatatttttaataaaataaattccatatggatagggaaaaaaaaacattgctacttttgaatttttacaatagacttaactcatacttaaaattaaagttaatttttacctttcttagtttttacttttaagcctatacatagtatatatatttacctcatgccaaaataataaataaatttatttagcatacagtttaggttctttttgtaatacgagagccaacacaacataaaaagaatttgtaaaccatatttgtgaaaagttattatctagtgagcacaatatcaacagaaattagaaaaattaacggcaatatggatctggatgaaggttttgaaacaaacgagacctaaattataattattaagaaaaacaagggccaatgtagtttctaggttcacgtctacaatcgcaagtagagcccacgggacgagaatgccacgtgttcgtataggtttgctgaacgattgcgaaacgtgatcccctctttgcaaaatttaaacactttttggaccaaaacttttatgtctttttaataataatacgaaacatatttaaattcatatttaatttatatatgaatttcttaaaaatataactatgtcattgtgagaaaattctaacatatatttatctatctatcaaaatgcagaggtcgcgtatgttaaacaaacaataaaccttatagtactggtggtaaatagtcatcaaccaaaagtagaacatctgatgataaagagacgatatattttcagaaaaaaattaaagatagaacttggtccgaattctgcttctaaaacaattttccaacaattattatagtatttcatttgtctgattcatgtcatatctaaacaccaatatttgtatgtgacgactataatcatttaggactaagttctaatataggagttgccaacaaaaaaattccaatggacctttaaaggttaaaagtctaaaaacatgtcctatgtttttgtgaaagcccacttttaagtaattcttttacaaatgaggcccacataaaccttatatatgacgacgagacagtaacacaaattttgattaactagaaatgtcatcaacacctcaaacatatggttttgtatatattaagataatttattatcacacctcaaacattattactatttaataattatcataaataaagaaatatatatatgttactttgttagtagttatgcatatttcatttaagttattatatttcttttatactgctaatacaatatatcacatatattatttcttattatcttaaaaattgtttgataatttcaaacatgtgtcacactaatgtaaaatgctaacatatattaaatttttgttacatactatatgttaagatatttaatttcaaacacctcaaaccacacattattacgctaacagttaatccataagtaacaaaaaaaaaaatgaaaggagaaaaaaagtataaatacggatagaggagctaaatttgtatgctcagaacttagaatatttaggggaaaagttgtcgcaacaaattccacaacaacataaaagcaatgatggaagtttatattattgtcgtcgtacgtgtaagcaaccgttagtttggttgttatcgttggtactgtattttgttgtagcatctgttatcgttgtctcgtgacggagaataattaaactcgaacagtcactaccggcgatgacacatggaaatagataaagactgttgctttcgtgatcatcacggtgggggttgtgatgaacatggcggaggatgcggaggatataacgattctgcttacattatgaatttatgatgctatagtttatgtccttcgttaaaaaataataatgtagtggaagctttggtatattcttataagagaatacttgaaacctttggagtcatctagagacttccggtctttacggttaacaacaaacttaacgtttcatcttcacacgcggccacgtggtgccttcaagaacgttctactttactctctccgcaactgcttttataacttgaaaaatcctaattttctctcaaccttcaaatctcaaatttctcgcattttctcgggaaaatcgtaacgaaacaaacaaaataacttctcctccggcgaaacaaattccggtacttgttaattctcgatcgtctccttctctggttcgtagtacaacctaggaatagaattttcccgcgtttttttccccattcgtctgatcagaatccattgcttcgatttacagtttttagaatg

SEQ ID NO: 6937 - DNA, 3000 bp, Unknown
  misc_feature (1)..( 3000): cDNA_ID_1816220_gDNA_ID_1621117_Annot_ID_56219 3000 nt of promoter + ATG
gagagtaaagtagaacgttcttgaaggcaccacgtggccgcgtgtgaagatgaaacgttaagtttgttgttaaccgtaaagaccggaagtctctagatgactccaaaggtttcaagtattctcttataagaatataccaaagcttccactacattattattttttaacgaaggacataaactatagcatcataaattcataatgtaagcagaatcgttatatcctccgcatcctccgccatgttcatcacaacccccaccgtgatgatcacgaaagcaacagtctttatctatttccatgtgtcatcgccggtagtgactgttcgagtttaattattctccgtcacgagacaacgataacagatgctacaacaaaatacagtaccaacgataacaaccaaactaacggttgcttacacgtacgacgacaataatataaacttccatcattgcttttatgttgttgtggaatttgttgcgacaacttttcccctaaatattctaagttctgagcatacaaatttagctcctctatccgtatttatactttttttctcctttcatttttttttttgttacttatggattaactgttagcgtaataatgtgtggtttgaggtgtttgaaattaaatatcttaacatatagtatgtaacaaaaatttaatatatgttagcattttacattagtgtgacacatgtttgaaattatcaaacaatttttaagataataagaaataatatatgtgatatattgtattagcagtataaaagaaatataataacttaaatgaaatatgcataactactaacaaagtaacatatatatatttctttatttatgataattattaaatagtaataatgtttgaggtgtgataataaattatcttaatatatacaaaaccatatgtttgaggtgttgatgacatttctagttaatcaaaatttgtgttactgtctcgtcgtcatatataaggtttatgtgggcctcatttgtaaaagaattacttaaaagtgggctttcacaaaaacataggacatgtttttagacttttaacctttaaaggtccattggaatttttttgttggcaactcctatattagaacttagtcctaaatgattatagtcgtcacatacaaatattggtgtttagatatgacatgaatcagacaaatgaaatactataataattgttggaaaattgttttagaagcagaattcggaccaagttctatctttaatttttttctgaaaatatatcgtctctttatcatcagatgttctacttttggttgatgactatttaccaccagtactataaggtttattgtttgtttaacatacgcgacctctgcattttgatagatagataaatatatgttagaattttctcacaatgacatagttatatttttaagaaattcatatataaattaaatatgaatttaaatatgtttcgtattattattaaaaagacataaaagttttggtccaaaaagtgtttaaattttgcaaagaggggatcacgtttcgcaatcgttcagcaaacctatacgaacacgtggcattctcgtcccgtgggctctacttgcgattgtagacgtgaacctagaaactacattggcccttgtttttcttaataattataatttaggtctcgtttgtttcaaaaccttcatccagatccatattgccgttaatttttctaatttctgttgatattgtgctcactagataataacttttcacaaatatggtttacaaattctttttatgttgtgttggctctcgtattacaaaaagaacctaaactgtatgctaaataaatttatttattattttggcatgaggtaaatatatatactatgtataggcttaaaagtaaaaactaagaaaggtaaaaattaactttaattttaagtatgagttaagtctattgtaaaaattcaaaagtagcaatgtttttttttccctatccatatggaatttattttattaaaaatataataaaacaaaataatatcctaatgtgtatctctaaaacatccttatttgaccatttgtatataaactaactcaaacaattatataaaatgatagagaagatagagtcaacctttgttactttcacgaacgaaatgtcaaaggtattcaagtgtccctagttgataattttatatgcgccattgttttggtctacaaaatttagctgtggggtttgcgatgcaagactaatttgggggtcaaaatggtaatgaaatattgtagtggttataaaatagtataaaacaaaatttcaagggctaataaagtaataaaattggaaataatttacgaaggagaaacaaacagtatcgtgttttagagagagaaagtgagacgacttgagcgagaaacaaggcgcggagagagacgacgccgtcaacaacaccagaacagaaaaaaaaaacaaagaaagaaggaagaaaaaagagagagaaggagatttgatttaatttaaattttctttaaggaaaaaaaaaacaaaaacaaaatcgcgtttttccgctaagctctttttcttccctttttgtcaaaatttgggtttttgctcattctcgtggaaggaaaaaaggggattttttcaagtgtttaggggttcacaaattgaaaattttggatcttagatctttcttcttgctacgaaaccctaattcgtcacattgtatcagctcaatttgatcttaaaaaaaaaagactatttttttcctttttgggtctccttcttctttctttctttaatttgaattcctcaatttaaggattgtgtgttttgtttccttcttgtgaacgaatgagagttttgggttgatcgcatttttagggttgattttatttatctgatcgacgactcggatctgaggtgggtcgtgtttggagaccgagtcagggtctggtctggtctggtgaggtcgtcgtcttcatcggatgaaagtttctgggatcgaaaagcacaacg

SEQ ID NO: 6938 - DNA, 3000 bp, Unknown
  misc_feature (1)..( 3000): cDNA_ID_1816216_gDNA_ID_1621117_Annot_ID_56220 3000 nt of promoter + ATG
gcataaaatattcttcaatgttctcattagctttattacaatagtcctcaattgtgatgattctccatgggagggaagcaagcaaaaagtgaaagacactaatgccaaaaaacacacaatcatgtactctttgattactctttattgccagattaaacaattataatcttttattaagattggaagtttggtttaagagagtaggtggtggtggggaccaaggatttacaccactaaatccttctggctgttttaaataatctttctacaaacttttaatgatagcattttcaaaaaccagagaatagaaaactgaaaatgacttgggtgtttaccttaacttggagcctgagaaactttacataatcgacaatctcgtcgatcatagcagccctatctgtctgcaaaaggaaagcaaaagaaacagatgtgaataccgcagtttctatatgccaatcacaaaacttttctctcattgacaactctagttttctccctacttttaaaatctctttcaagctctcttcgcgacatgaaaacagtagctgaagctctagagaaaaagataccaaccttgttaacggtaggtacaagttcctgcaacgacctgatccgttctgctattctttcccttcggagctgttgcaaagcaaatacattcaggttaggtcttaccgttcttagtaagtaagaactaatcgaactttctcaaccaaaagctataattaaagctttgatcaaacattatcacataaaaatcgaaaaaagagaccagaagataaaaaaagtgtatcaaacatcttaccctctcagcgatgctatgtggatcggtagcttgacctcgcctagccctaactctaggccgaatagtagactgttgatgcggcattggtggagctggctgtgacattggctgcccatggaaaatcttcaacaaaacacaaaacaatgccgtaataacattaagaaaagcttaaaaaccgcttctcacaagaacggtcgccactagagtagttatagcaacaattcaaactatgacggaattatccacatgagaaaagaaactaaagagcaaattttcttacaatataatttggacataaaagaacactcttttatactaaagtttcttgcaaaactaattttagtgttatgactttaaaacacatcaaaatcttcaacttgggtttcttcaaaaacatcaaatctcaccaatctgagccaaaaactctcggtaactatcaaatttagacctaagctgggttttctcaaaaacgacaccattttgaaaccctaaagatttgaatttcactttattttctcgagaacacaaaagaaaaagacaaagtgaagattctgaagagaaacttacaggtttcatagaggaacatcgattatcaagaacatcgtcttggaaacgtttaccagtttcatcaggtttaagaaagccatgtcctttcccttgatcgagacttaatcccaacggaaacatctgattatgaaaccctacaggtccacctcctccaatggcacccatatgattatgattcccttcgttgcctgaaccaagctgaagcatcatcggaggtggacccacgccgccgattccagagagaccagaacctgaagaaccggagaagttggaaagcccgaggatctgctcgaagaaatcgtcggtaggagatggatcggagatgctatcatgtgggatgttgttgttattagccatgaaggaaacgagtaaaggtttgaaattttcgactcagtggagctgggtgagttaaaagatagcgagttagagaagagaagtcgaagaacaactttccatgcgaagaatcttgtgtggagttgttaggtgagagaatgatgatgcttaagctaatgaggacgaagagacacagacgagaaaggatatgacaaaaagactcactttatgctctctttcattttatttttgttaaaaggaccttactttgtggtttattttcggttttgcccttgttcttatataccttccagaaacttgaagtgggctttatttgttttgaagtgggctttttgttttgactttcttcaatttattcatatcaaattaagaaaaaggtcttttaccaaactctttttagtagaatgttaaaaaccaatataactttctttttttaaaatatataaatgatatgggaaaaattctacgcattgtcggggtcgtcgtcatctcgttagtggtagaaaataagatttttttaaaaaaatctgtctttgtcgttttttccgaaatttagcactcatggagtaaagtttctaatatccaatataaaaatgacacgtttcattttgccatatggtattacaacttgcttctccttagtgctgaaccgttgtccgactcgttttccattttgagagacaagggtttttctatttttcacaaaacaaaattgtggcatttctgaatataatacgagtaaaaaatatgtcagcagaaatgggcttggatcgattttgatttgttggattccataattcaatcttgggcttccaatccataagaaaaaagcttggtgtatttttttttacaaattagaagaaagttttttcctctttaatcagtactcttctccttacccattaatggcaaatgcaaactaaatttcagttgacccgtcaaacaataagttaattttttgccacgtggccatatttctcaccggacaaagcctccaataacctcggcgactttagatggtgaataatcgacgaacaacaaagaaactacattgacgaaacaaacaaacaaaaacatagaagaagaagaagaagaaacaaaacaaaactaaacaagaaacagaggagaaaaaaggaaacgacgaggaaaaacaaaaacaaaataaaaacaagcctcgttcttcccttttctctcttcaaatcttttcttttacatattttcttttcttttttttgtctttaatacaaatttactaactaatcagaataaaaatg

SEQ ID NO: 6939 - DNA, 3000 bp, Unknown
  misc_feature (1)..( 3000): cDNA_ID_1816212_gDNA_ID_1621117_Annot_ID_56221 3000 nt of promoter + ATG
tcctgcagaaccaaatgccatactgctcgcgcttccgctggctccataagccgtcgatgttttcacggcagcgtttacagcgccgtgctgatacattccgttaagcaacaacatatcaaagcctcctccgagttctgacttttgtcctgacaagtttgtagctgtttgcaccaaagctgtttcccaatccgcagaatcatccttaaacgcttcccatcctggaccagactctgaaccagaaccgcttgcgtatggcccgtcaaataaagccaacgctaagctatctccagcttgtcctgcttcaccgccgtttgtattcccaagatcaagtaaatcacccatttcttcttgtttcttctctatgatcacttcttcctttgcttcttcctcaggttttacgtcatcttcttcttttggtggaggttcaggtaaggcctttattgcgttcatatcttcttgctcttcatttacttcctctgttctcgcttcatcatcatcttcatcggcttcagatttaacagattttgattgcttggtgtgttctaaagcagatttgtctcttataaactcatccatgagatcaagcttcttctgtgtgatcttctctatctctggatactcagaagaccgtgcgatccccatgttcttacaccaagagtagaactgatcgagctcttcgaattgtttcgagacccggcagaaaatgtcatagaccttgatcgaatcaggaatatctaactccatgaatcgttcaatcaaaatccccattatctctgttacatcgtaatatatctgaaaactctccttcactatcggatacagagccacaatcacaactctgttgttcctcgcattacctgttaacaaaataacattggtccttatataaatttttatccaagaaacaaacacacacagagaaagaaatcttgagacgcaagttattacctgttgggcgacaagccaagaaacggtcaagaagttgctgcaaatgttggattctgatgaaaatctgctctgttttcatctcggcgatcggttgtgacctgaccacgatagccgtggagagatctgccgcagcttgatcctgttcttcttcgtcagcttctcctccaacgcagtaaactccacgtttcccgtgtctcgcttgcatcctcaaaaattgcaatgaaaaaaaaaaaaaaaccgcatatcttagatatcattcaaattacataaataacttgaaatcccgaatcggaacctggatcaagcacaagaactcttacctgaaatcaagcctttcgtcaaggtacaatgcgtaagtcctgacaaacgcagagtagtcccaagaattagacctcgaaacatccctaaaatcagacatattgagaagccttgttccacggcgagtggcgaagaagatctcttgctcgtaggcttgatctccttctcctaagagcctttggatcaaaatcaaggttttgagggcaacggtccagcatttggttttattaaggcgtctcgaaagcgtgctaacgcaagcgttgatgtaactgcgtgagtaagaagttaggctaagaatctctctaatgtatttctcttctgctggaaactcttcgtgacgagtggctttgacgatggctacgtcaagttcagataaagaagcgcttcgaccattgactttggctagaccgacgctggtttggtcctttacggctcctatggctcgtttaaacttactcgaacccatttttattctgattagttagtaaatttgtattaaagacaaaaaaaagaaaagaaaatatgtaaaagaaaagatttgaagagagaaaagggaagaacgaggcttgtttttattttgtttttgtttttcctcgtcgtttccttttttctcctctgtttcttgtttagttttgttttgtttcttcttcttcttcttctatgtttttgtttgtttgtttcgtcaatgtagtttctttgttgttcgtcgattattcaccatctaaagtcgccgaggttattggaggctttgtccggtgagaaatatggccacgtggcaaaaaattaacttattgtttgacgggtcaactgaaatttagtttgcatttgccattaatgggtaaggagaagagtactgattaaagaggaaaaaactttcttctaatttgtaaaaaaaaatacaccaagcttttttcttatggattggaagcccaagattgaattatggaatccaacaaatcaaaatcgatccaagcccatttctgctgacatattttttactcgtattatattcagaaatgccacaattttgttttgtgaaaaatagaaaaacccttgtctctcaaaatggaaaacgagtcggacaacggttcagcactaaggagaagcaagttgtaataccatatggcaaaatgaaacgtgtcatttttatattggatattagaaactttactccatgagtgctaaatttcggaaaaaacgacaaagacagatttttttaaaaaaatcttattttctaccactaacgagatgacgacgaccccgacaatgcgtagaatttttcccatatcatttatatattttaaaaaaagaaagttatattggtttttaacattctactaaaaagagtttggtaaaagacctttttcttaatttgatatgaataaattgaagaaagtcaaaacaaaaagcccacttcaaaacaaataaagcccacttcaagtttctggaaggtatataagaacaagggcaaaaccgaaaataaaccacaaagtaaggtccttttaacaaaaataaaatgaaagagagcataaagtgagtctttttgtcatatcctttctcgtctgtgtctcttcgtcctcattagcttaagcatcatcattctctcacctaacaactccacacaagattcttcgcatggaaagttgttcttcgacttctcttctctaactcgctatcttttaactcacccagctccactgagtcgaaaatttcaaacctttactcgtttccttc

SEQ ID NO: 6940 - DNA, 3000 bp, Unknown
  misc_feature (1)..( 3000): cDNA_ID_1816200_gDNA_ID_1621117_Annot_ID_171929 3000 nt of promoter + ATG
aaaggacacaccaactcggtcacccagtgaaccatcctgagagcccagatttttaaaaacatcgaaatggcgaagcaaaagtatcgttggtgaatacctgtgacaatgaaaacaaggcattcaccaagttgtggataaaaatactattccagaaagaagagctcaatatttacaaaaatgtaagtaattttgcacttcattaaaacacggccatttactgaatgcagttcataatgaatacatgaaagaaaagaaaaaaagtataccattttaccttcgtgccatattaaaagtctgggccaaagcagtagatgttttcctctcagatgatgctaataaactgtggcagctaaattcaactacatgcagccccaacctcctagcaacatatttaacaacagttctcttcccacacccttaaacaagcaatagatacaaaaagctattagcacgtgattcagttatatgcatagagcataaaggtcgaattatgacttctcccaaattaccataatctgtaaacacagaaacatagtctcttactagtctttccttaacattgtttccagaaatagtttaacccttaagaacatatatgaaagtgaagtattttcttgatgaaaccgaagcaaatgtacctggtataccatgcagtaaaacagcaaccctgagttttgaggcgagtgctgatgggcagagaggtggtgaaagcaccgatgccaaaatatttactgtctcctcctgcaatggcataggaacctttgatctatacaccagtaaatctggtggaagaccagaagatacagttcctccaaggacaagggcggtttgggagtgattcactcgaagaaacctctcattagaaggttccatcgcaataacctgagcagatgaactaagttttcagtaagctctggccaaaatgagcatttttctggcaaaaatgaaaaccaatattaccttaaaatatatatagtcgtcgctttcggagcacaacctttgactacatggattacaaatgcttgaaccacaattccagtcaatgtaaatgcgaaatatatcgcctcttgatagctgtctatcagttccaaaatacttctgtaatgcagaatctattaacccttgtcgctcttcagcttcaaatgacgaattgactttcagggatgggatggtaccacactctgggattttaacaaaagaaactctcagatgtgatgcatagcctggaacttgggacacgggttccaaatccaaaccaatcttcgacccatcttctgcagattttccgataaactcctcatcacacttagcttcaaaatacttctctaagaccccgttccctcgatgtacgagggatttcaggcaagatatgtgcaagctaagattaaaagctaacattggggacaagtaagcaacctcttgatctaataactgctggcccatcaaatcataagtgggaaagacaagcatcgtatgaagagagtccgaaacaggtacttgagtgagagatgcatcttccagcgtcgtcttgggaggatcaagtacaacaacttgcgcaaccctttgaatgcctatctcaatgttcttgacaacaaccttgcattttaaaaactcaattgttaacatcaaaagcaacaaaattatccagaaaagatccagctttgttgactgaacaagatgagaaggacataccaaagaaccagagttgatagatagtctcttaagcaattgagtggagagtccaaccaatgcagagtcatctaaagaatccaattttgcatcggaaacattttctccgtccttccgccaccggagaatgcccgcagacaacctagcgttccctcgtaacaagtcaccgtctttattcagaactcggtcgccgtcggcagagctgggttgtgacgaattgagcactgaacggagagtacttcttgtggatgatagaaccagaggattccgtctctccaccattgcaacggaatcaaatcgaattcccaattactcaaaactcaaaagagtcagaaaaaaagtataaaaacaaaaaccctaattttccatcagaagattcaagttccgttgaagaaaattcacagtacgcgaaccgatgaagactgaagaggatcagatggtactggccccacttaaggattttttcgtatttatattattatattttctgattattgtttttttgtactatttgttcctcctaatcaaagttttactataatctgtttagtaaaattaacctggaatcataattagcataaatattttaaaaaaacaaattataggtttcgaggggctcgagaattttcgatcagcctaacatcattacataaacagccttaaagctaaaatataaatctcaatcggtgtaatcactactgcttttctatttttctaaccaaagcaagtaaaggccctaattttgtttggaccactaacaaatatacattttcaaaaactaaaagcatggagtgatcttaaagcttggtctcaccaaaattattcacttgacacttaatatattctttatgtatcgttatatttagaaaactttgcattagatatatattccatataaattttagtggacaaagcagtatgtagaaaaattaaatgattgatcatcttaaacttttgttaaattgaaacgaaaattgaaaaacaagagagtagacataatgatgatagaagaaacctcacttatcccataataatggatggaaatgcctcaaaggatactagctagcaacttaatgtaggtacattgcatgtattgtttgttattccttaagttaattttatctgtgataataatgatctcagctttacacgtacttagcagattaattttaaccaaatcttttttctctacctttttacatccattaactacgtacattcactgccattacaaccgcaagagctcttcttcttcttcttcttcttcttcttcttctccttcttcttctgctacgagaatagagagagatg

SEQ ID NO: 6941 - DNA, 3000 bp, Unknown
  misc_feature (1)..( 3000): cDNA_ID_2990433_gDNA_ID_1621117_Annot_ID_171926 3000 nt of promoter + ATG
taatttatatagaaatttttgtttgggaaaaattattgataggccctcttattttacatgatttgcttgttaaacccaatattattttaaattaatgctttatacttttgattttgttcagattggtacataatctaacctccatatgagatcaaattaataagacaaccctttgttaataacaaattgcaattcttgagttgattaatttggagaatttggatttttaacaagcatgtgctttatttctaagttcaataaaaaaatattcggtgtaatattctcataaaaaccattgggggttttaatatttatttttcgggttcttgggactagtttgcaaaatagattattgaaatgacagaacgagagaaaagtagaggaacattggagcctatcagaaagagaaccagaatcaacaaagattctatctcgttttcgattttgaagaaattcattttaattattataagaaaagcttctcaaaatacattagaatgacggtatataactatatatataccacgaaagagccgccattgtcgtttaagccgtacaagctggagaagatcacgaggaagatgctcccctttgtacgttcggattattcgaccgacaaataaaagagaaccaatctatatactctcccaacaatcgcaatctataatattagggtttatcttacgcacgttaatatatgctattagcatgtaattatgcgacttaactgataatggaaacttaattttgattgattctgtactcagatttgagtcgtgtatatatttccctcaatatgtactctattaaacgtaactacacataatttagttatattgacgctttcaatacgagtttgaaagattaggctctagctaattaataaagaatttcatgtgaatttcatttttaatttttcaaatatatatatgagaagtagtcaattccgacattctgtattcgttcacgtgatttttttgttcagcgctctacgtaattaactaattcacaacttcatcggtccagtttgatatcaatcacaacatatattctttagagtattacaaaaggataatgattcatacatgtacttgctgcttcaagttgatgtattttaaagattctatctttcacatatagctcccatatgaactttgccctgaaaatggtttggttcataacttcatatatctgtactttgccctaaaactggtttgatacataaccttcatatatgtacttctcaagtttttagactttatttcgcacgatcatctaacgtacgatgatttaggacttcgaatctagagattttattattagttacgagatttttatttttattttccttattaggagagttacgaaataactaaataactcgagtgtgtttcgtacacaccaatttgtagtttttttttttttcgtacacacatttgttcatagtgttcttgaaacacaatatatatattttccaacaagagacgattttggaaaccaacaatatcagcgtaactaacagatctttcattggctgaattgatacctagaagattcttttctttttttcggttaataaaaaggtaaattgcattttcattgaacaaaggtgtagaaatgcgaatgcactatgtttttcacgagacaaattatgaacaaaatatatgaacaaaaagtccaaaccagatagtgaggaacgtgtcgtcggtagaagaaggtctcgttcgatccaacacttacgagaacatattcgatatgaagaagagattacaattggacccaacttgcttttgtttttcggaaatttatttctatttttatttatctcaagtctcatgtaatgtatcaaataatatccaaagaaattatgcgtatatgaggagaaaatgaaaaagcactggtaagctgtttaatattccaataaggcaagaacatgataggccacgtatctctctctcatataaatgagtttacacatttattcatatttgaattcgatgcttttgtatggatgaataataatcttcttttttcccctagttcattcgtatatatttcaagatccttgtggtatataaagtaaattggctccatcaaaactcgaaaggccgcttatttacacgaggtcacacatgaattttgatctaattagccaattatgtttttgtgtgggtgaatgagttttatgatgaagctctatcttaatccataaatagaatcaatacatcaattctattttgtaacacaatttttatataaatcagtaagtcttttgcaggtaaattactattaaaaatcggaagacaaaaattacttaaacaatgcagttttgtagaaacacatgtatggggaaaaaaacaattcatgtcaactcgcagaaatatataagccatattgtttcgattaacaaattcacttttagatttttctcacatatatatgatttgattctgttaaattattattattcaaacattatactagcaaagcggtttggcgaatgatgttaacatctgatgcacatccatagaactagaagtgctgattatgttagaagattctactagtcagttcctattttgccttttgtcgcgtctataattgtgatggattatatatgatagtaaagtgtcgtcatgtaaagcatttggcaattgcatcaataatttattgtatacacatgcacacgggaattatatatgtagagagttaaatcaatcgagctggccagatcctggcccagtgggccgctagtaagtttttggactcattgcaggtgaaaaattcaacgcctagaagcggtagtcaacggccttttaaagcgaaggagcatgacacgtgtctttcgtcattatccggcgatgccaaactcttcttcctcgatcgagagaacacagcaccgcttcgcttaaatcggacatttgagtcggaactgttgtgatttcaaattttcatttcttgagtgataatttcagttattgatctgtgcgttcatcaatg

SEQ ID NO: 6942 - DNA, 3000 bp, Unknown; identical to SEQ ID NO: 6938
  misc_feature (1)..( 3000): cDNA_ID_1816216_gDNA_ID_1621117_Annot_ID_171924 3000 nt of promoter + ATG

SEQ ID NO: 6943 - DNA, 3000 bp, Unknown; identical to SEQ ID NO: 6937
  misc_feature (1)..( 3000): cDNA_ID_3049323_gDNA_ID_1621117_Annot_ID_171921 3000 nt of promoter + ATG

SEQ ID NO: 6944 - DNA, 3000 bp, Unknown; identical to SEQ ID NO: 6936
  misc_feature (1)..( 3000): cDNA_ID_3049328_gDNA_ID_1621117_Annot_ID_171918 3000 nt of promoter + ATG

SEQ ID NO: 6945 - DNA, 3000 bp, Unknown; identical to SEQ ID NO: 6935
  misc_feature (1)..( 3000): cDNA_ID_2026922_gDNA_ID_1621117_Annot_ID_171917 3000 nt of promoter + ATG

SEQ ID NO: 6946 - DNA, 3000 bp, Unknown; identical to SEQ ID NO: 6934
  misc_feature (1)..( 3000): cDNA_ID_3049332_gDNA_ID_1621117_Annot_ID_171916 3000 nt of promoter + ATG

SEQ ID NO: 6947 - DNA, 3000 bp, Unknown
  misc_feature (1)..( 3000): cDNA_ID_1019105_gDNA_ID_1621117_Annot_ID_171912 3000 nt of promoter + ATG
ggtggagtgaaacaggctgaagcttagttttcctcaatgaaaacattgaaagatcttatttttcttcgtcaattcgttaagaccaatttgaagctcctcggctggtatgaggatttgatgaaaactgtttcccagtttcatttagacatttcgtcgaacacttggtgcgtgaactgaaccagcaagctttgagcactaacgtgagattaggagaaaaagacaaaagctttcttgagaagacgatgggtctttgaccgttgatgatggcaggtgcgaagaaccactaaaccctaatcactattcactaatcactatagccagaagaaacttgtaaattttgcttaaccgaaaaatatcaagtgttgacaaaaagagaaaagaaaaataagtaaagtaataatattctaaggaatttgtcaaattgagtatcactatatcatatactgtcatagtaaatggtccttatctagcaaaaaatttattgttagttagaaccaaaccatgcttatttataacatttcataagattaagctttttactaatcttgggttggtttcattaaattctatgatagcatttttggtttaacaatacgcataaacataagttaatccaaaatgcaatgcatagtttcagatttatcaatagggttggtttcattaaattctatatagtaacatttttggtaacaaatacgaataaacacacaatttcatccaaaacctaatgcaaaaattcaggtttatccataatccttcttaacaaattagccccctcaaacctttctataagtatatcaccacatgactactaataatatcccatacaaaatcccaaagcttaaagataaccccaaatgattcttgcaatattagcccttgtaatagccacctttctatacggtggagccaccacggtccaagctggatgcagagacactctgaccagcctttccccttgtctttattacctcaacggtggctcatcgtcaccttcttggagttgttgtcgtcaattttccacggtggttcaatcttcaccggaatgtttgtgctcagtggttaatagcaacgaaagctcattttatgggttcaaatttaaccggactttggctctcaatctccctaccgcttgcaatgttcaaactccatcacctagcctgtgtaacagtaagaaacttaattattctaacaatatacacttcaaaaatatatgtttgttgatccaaattttttgtggtttataatataatggtatagccggtggtaacgtaccaaccacgttgccggcgaatactcctgtaggttcacctcgaagtgctccttcaccgtcaggtaccacgtctccggcgaatacaccatcaggttcaccacaaatacctcaatacacacttcataatatatttatcttcttaagaattgtgcttttggaaaatagactgttagaaaacaataaaattcatattttgtgtttaatcgatgaaacttgtaaacaggatcgaagaagtttccattgagtaatgaaagctcgtccaagagcaatgtgatcatcttgtctttcgtatccatagctctggtcctcgctataatatgaatctcagatcttctttttattttacttttttttaaccaatttatgtctccatgtaatatttgtagtgcttcctcaatgtatttgaaattcataaaattcatattgtacgttgaaagtctttcatacttgtttttttttttttttttcctctgaaactgcagttttattgaaataataatacataacatcacacccaattacataaacatcaaagacaactttcaacgaagcccaaacaagaggcccaagaaaggataaactcaagaacgtgtctcatcgatggggataagttgaggatacgtgtttatttcacatccttcaccgcatgcagagattccaaatccagtgaatcagaatacgttgccggaactacaaccgattacgaattcttctttttttctcactgataatgataataatggattacagaacaaatcaatctactaatctcaaatgattgatagattcataagaaaaccatcgtaatcatgaaataagatgtagagattgaagtaatccacccttgataatataagtgaatctctgaatatttttataagcagcaaaagggaatcgaaatttaagatggaaatgagtttttaaccaaaccttagacgcaggtaacataagctgtcgtaaatccgatggatccaacgtttttgtgtggaagtgaaaaccacacatcgttagaaaaccatcagatccaaaagcaaaatctcaatggatgaagtatattatggcaaaagagaatagatttggcgcatacgaaactctcccgattcaacaatcctagaagccatagtcttcaacatcaagcttttgtatgagcaaaaggacatggcaatagaaagccatgttaacggtaagaacacagcaacgaaaaagctgtgttgacggcaagaacacgacaacggagaagtcgtgttgacggctaactaacagcagaaccggacttcatccgagtataaactccggtaaaaacaaaccggacggagataacatataagaacctctctctctgaaaaatattagggagagaagagagagaagtcaaccaaccaatcgagtttcgaatttcctacttggttataaagattaaaacatacgaaaacagaatctttattggaataaatcgaaagcaggaaatatagtccaatgggcccataaggtttcgacttccggcccaactatggttgaaacccagtcttacgagtagtaccaaacaaacactaacacgctcaatttcttaactctaatgagaaaacgattagactaacatccaaacaatccaaatacataaaatcgattttgttgtttgtgcttttgtggcggctttttttcacgaactgctttaaaccctaaaaactccaacctttgttctctgtgtaacaacaacaacaacaatg

SEQ ID NO: 6948 - DNA, 3000 bp, Unknown; identical to SEQ ID NO: 6940
  misc_feature (1)..( 3000): cDNA_ID_1816200_gDNA_ID_1621117_Annot_ID_56224 3000 nt of promoter + ATG

SEQ ID NO: 6949 - DNA, 3000 bp, Unknown
  misc_feature (1)..( 3000): cDNA_ID_1816196_gDNA_ID_1621117_Annot_ID_56225 3000 nt of promoter + ATG
gatagagtccatcactgatgatacgagcatgatctggtaagagttctgctaaagctatgaactttgaggttgtgagattcggatccatagctatctcagctagatagttatccattagcttcgatactttcaagatagagctctgttttggagacccggggctgtcaaaatcgtagatcatctctgtttcatctctaaattgaagatgatgatgttcttcttcttcgtcgtcttcatcgaggttcaagaatatagagaagattctcaagattgaatcgatgtcgtacatggtgttgtttgttccattgagatttatcggaatcaagacatcttcgaggatggcttggtctaattgcagaccgattcttcgttctagatctgatctacatgatcctgtagaagcagatgacgatgttgcgatgaccattttgagaagacttgaaagaaacgccattggaacagagcttcttcttccttgtgtaggaagtaacctcacaattgtttccacaatcaatcgctgtttcttcttaccttctgaatcaagaaccctttctttctccagtttcggatcgcgaacaatgagcccttgaagagacttattcgtgtagcttatcagaatcttgctgatcacgtcttgtattaaccctttagacttaaccgcagagataaccctctgaaagaaatcgaggttcagaacagctagtgacttcccccaccagtctaatggagtttgtggttcgatatttgtacccgagaacgaataatcgagctttaaaagacccgatgttagctgttctttgcaggcattgttggcaacagctatgattaaccgattaaccaagttgagatcttcagagactgggattaaggtttcgcaatgatgtagaacgatgatggaattcaaaatactggggaagattgtctctttcaagaaatgttctgttttggaagcgagattctcctctgagaaatcctctgtcatctctagataatgagatgcacaacggagcttagctatattaagaaggttgatttcaatgttgattccataacagaacttagctgcgagctcaaaagcctctgatcctccaggagcatttgagagacaaacattcgatatttttggatccgcgagaagctttcggatttttccactccgagacacaagaggaaactgagaaatcaaaacaacaagtaacagttgaaaactttcaatacaactcaagaacagaggatactctgttttaatgttcttaaatttgctttttaccttatgaagacagaaactcgaagatccaacttgaactgtcagatcactagagacatcggatatcggcctgcgaaaacagataaaaaaaccatcaagattaagcgaaaggatttctgaattatgaatcaaaagatcttttgtgtacttgaattccatgactccgacgctaagattctaggataacgaaacagtgaatttatcgccaaaaatagtgttatttattcctggttttagagacatttaaagattcacaggggacatgtaaaagattatgtctacatcaagctttttcaaatgaagacagaactagaaccagatgaagtgttaatgtacggatatgttccacatatatacaaaataagatggagaaattattggtttcgatgaacagtaagactttaacaagaaatgacttttggctacagattcacatcacatacaagattgctataattcttcagaaagaacaaattttttagtctttttctgacagttttatcaaaaacaaagatgtgaatgcaaaaaaaaaaacaagaatcgttgttactaaatttggatttcatttggtgataatagttacaaaactggtttttgaaacagagtatatattaccattcagaggcatgtctgatggttgaattcagacgaaaccctctctttcctgtgaaagctggcttcaattctccgactgtaacaagtcccatctctctctattctcgtagcagaagaagaaggagaagaagaagaagaagaagaagaagaagaagagctcttgcggttgtaatggcagtgaatgtacgtagttaatggatgtaaaaaggtagagaaaaaagatttggttaaaattaatctgctaagtacgtgtaaagctgagatcattattatcacagataaaattaacttaaggaataacaaacaatacatgcaatgtacctacattaagttgctagctagtatcctttgaggcatttccatccattattatgggataagtgaggtttcttctatcatcattatgtctactctcttgtttttcaattttcgtttcaatttaacaaaagtttaagatgatcaatcatttaatttttctacatactgctttgtccactaaaatttatatggaatatatatctaatgcaaagttttctaaatataacgatacataaagaatatattaagtgtcaagtgaataattttggtgagaccaagctttaagatcactccatgcttttagtttttgaaaatgtatatttgttagtggtccaaacaaaattagggcctttacttgctttggttagaaaaatagaaaagcagtagtgattacaccgattgagatttatattttagctttaaggctgtttatgtaatgatgttaggctgatcgaaaattctcgagcccctcgaaacctataatttgtttttttaaaatatttatgctaattatgattccaggttaattttactaaacagattatagtaaaactttgattaggaggaacaaatagtacaaaaaaacaataatcagaaaatataataatataaatacgaaaaaatccttaagtggggccagtaccatctgatcctcttcagtcttcatcggttcgcgtactgtgaattttcttcaacggaacttgaatcttctgatggaaaattagggtttttgtttttatactttttttctgactcttttgagttttgagtaattgggaattcgatttgattccgttgca

SEQ ID NO: 6950 - DNA, 3000 bp, Unknown
  misc_feature (1)..( 3000): cDNA_ID_2993716_gDNA_ID_1621118_Annot_ID_56226 3000 nt of promoter + ATG
caaaaaaatattttaattgtgtatgaagtaacacgtggcagtaagaaaaattgtttgaacttcgaaccgaagtttcagtttttttttttcctttccgaaggatctttctggaatattatagccgacataattgacaacatagtaacatacatatacgtaattacgttctatactacacctaaataatcgtaattaatttttagatttgtttttgtcaatcctattacattatcattagagatgttcaggatttgaatgcttacggcggtaaaaacggtctataattgatccgcgacgattttcttttatttttcttaatctataatcttacatactctaatttataaatggtaaatcaaaaacggtctaattcgcaaacggatttatccgtctcaaccaccgtaaccattcacatcctcaaatctaatcctattattatggtgatgaactgatgatcgtaaaactattaattatgcaacataaaggtccacttaactactaaacaaaatccaatattactgctgtagattcaaatgctcgatgtcgatatataccaaaccaaacaatcataagtttaaccaactatatatagcttagtaaaaaacgagggcctatattgttgaaacaagtactcttacgattgtttcgatggctcatggctatattgaaaaaagaaatgagaagttttaaagacatacaattttggacggaggtagggaaaattcgaaaatgcaaaataaacacaaaacttggtgaaactcggaagacagcagaatttataagaagaaccttctcctgctcgtgtccatttcaggctgtaatgaaatacaaaaaaaaaacacatcagaaaataaaattaaaaatcatcaaaaactctaaagaacagcaatgaagctgctcgtgtccatttctggtgattttaccttatgaacccattcaaattctccacctttggtgtcaaaagttccatgctgtagagtaactagcttaagcgtgaatcgaggaccgcattcctaaaaatccaaagtttaatgatacaaacattgataatgttgattactttttgattcaacatggtcaaaactgacctgaagacgaggttttattgtctcttcttttcctttatcactcttgctttcctttgtctcaaatatgtaactggatagtgttgaaatttgttcaataaaaagttttattggagaatggagcaaaagcaactcgaagaagaaaaggtgaagttatgtaccggtgatgtctgaaaaatataaagtcacgctggttgtggaatgttacaactctcctaccacggaaattaggatccggagggaagagtgattgaaaaaatctgaaaaaaggaaaaatctaacatcagcaagaaattcaaagagaccataaaaccaagtcaacaacactatgaaaactatacctcccaacacgattccctaaacgcgttgtaaagttattcaaaaccagttctggttgatggcttgtaggatttccgtgattctgcagttacatttaacatccaattcagtgatcactaatctacactcgatgtagagaagagtaatggttagcttacataccttaatatccttccttagaacaagatttgacaatttgaaatgagcagtaggaccatttggcaaaccgatgataagaagcgcatctacatatgaaatagcaaaagcttgaaacaaagcatatacagtagagagcacaaaacttgaaactcagtgaaaactaaccaggttctctacgatttgtatgaacaacaataagagatgtaaaatctttcttcgttgcgtattctacaatctgcagaaccatatctaacaaggttatatagttgcaaaaagactaactttatagagaaacaaggaagctatgaaacttataacaacaccttcttcaaatcataggttcctctcttttgataatgagagtttggtatcaccgaaagcaactcagatattaaagcaggtcctctctgcaatccaacaacattacttgaatcagaaaaccacaaacaaatctgtagaatctcttatgaaacaatggtaccaaaaaaaaaagacttacagtggaattgaaacgacatgttgtgagcaagaccttaggtgcaatctcacgtctcagaactggattaaactcatcagcatcaatatccgcaaacaactacaaactcaattacactaaattagcaacacgacaatgaattgaattcaaaaattgagatgaatcaaactttaaatctaaacatacttcttcatcgtcaggtctgcaaacagtttcatcagattctcttgtattctcaatcgtcttcggaatcatcttttgtggaggctacaaacgaataacacacaccaaacttaatatctcaaattcataaacacctttaaaaaatccctaaaaaagcttctccagatcgttacctcttctccaagctctaaagctcgtttctcagcagcatcacgagctctaatcttcttctgcttctccaatttcttctcatgcttctgcttcgcatacacttttgatctcttatctttgttcttaatcatcgaaggaagtatcacattcctcttctcacccccactgaaagtagactttccacgaacatcagattccatttcctcaccatcaccatcatctttcttcctcttgaaccccatttttacgacggacggcgaacgaagcctctctctctttaatcgatgaaaacggcaaagctgagaatgaagacgacggagactaacttagggtttatcgactcaaaattgaaaaacctatacaaatgggcctatgcttgggcccatctttaagcataggcctatctatctttataatattcgttaaaccgtcgccgtatcagtctattaacgggcttaattctgggccttgaagaaacattatactatggcgtttcattataacgatattaaacgacgccgtgtatgttagctatcaatttcgtttctcagtggtcactatgcgatg

SEQ ID NO: 6951 - DNA, 3000 bp, Unknown
  misc_feature (1)..( 3000): cDNA_ID_1816288_gDNA_ID_1621118_Annot_ID_56228 3000 nt of promoter + ATG
tcagctttgccgttttcatcgattaaagagagagaggcttcgttcgccgtccgtcgtaaaaatggggttcaagaggaagaaagatgatggtgatggtgaggaaatggaatctgatgttcgtggaaagtctactttcagtgggggtgagaagaggaatgtgatacttccttcgatgattaagaacaaagataagagatcaaaagtgtatgcgaagcagaagcatgagaagaaattggagaagcagaagaagattagagctcgtgatgctgctgagaaacgagctttagagcttggagaagaggtaacgatctggagaagcttttttagggattttttaaaggtgtttatgaatttgagatattaagtttggtgtgtgttattcgtttgtagcctccacaaaagatgattccgaagacgattgagaatacaagagaatctgatgaaactgtttgcagacctgacgatgaagaagtatgtttagatttaaagtttgattcatctcaatttttgaattcaattcattgtcgtgttgctaatttagtgtaattgagtttgtagttgtttgcggatattgatgctgatgagtttaatccagttctgagacgtgagattgcacctaaggtcttgctcacaacatgtcgtttcaattccactgtaagtcttttttttttggtaccattgtttcataagagattctacagatttgtttgtggttttctgattcaagtaatgttgttggattgcagagaggacctgctttaatatctgagttgctttcggtgataccaaactctcattatcaaaagagaggaacctatgatttgaagaaggtgttgttataagtttcatagcttccttgtttctctataaagttagtctttttgcaactatataaccttgttagatatggttctgcagattgtagaatacgcaacgaagaaagattttacatctcttattgttgttcatacaaatcgtagagaacctggttagttttcactgagtttcaagttttgtgctctctactgtatatgctttgtttcaagcttttgctatttcatatgtagatgcgcttcttatcatcggtttgccaaatggtcctactgctcatttcaaattgtcaaatcttgttctaaggaaggatattaaggtatgtaagctaaccattactcttctctacatcgagtgtagattagtgatcactgaattggatgttaaatgtaactgcagaatcacggaaatcctacaagccatcaaccagaactggttttgaataactttacaacgcgtttagggaatcgtgttgggaggtatagttttcatagtgttgttgacttggttttatggtctctttgaatttcttgctgatgttagatttttccttttttcagattttttcaatcactcttccctccggatcctaatttccgtggtaggagagttgtaacattccacaaccagcgtgactttatatttttcagacatcaccggtacataacttcaccttttcttcttcgagttgcttttgctccattctccaataaaactttttattgaacaaatttcaacactatccagttacatatttgagacaaaggaaagcaagagtgataaaggaaaagaagagacaataaaacctcgtcttcaggtcagttttgaccatgttgaatcaaaaagtaatcaacattatcaatgtttgtatcattaaactttggatttttaggaatgcggtcctcgattcacgcttaagctagttactctacagcatggaacttttgacaccaaaggtggagaatttgaatgggttcataaggtaaaatcaccagaaatggacacgagcagcttcattgctgttctttagagtttttgatgatttttaattttattttctgatgtgttttttttttgtatttcattacagcctgaaatggacacgagcaggagaaggttcttcttataaattctgctgtcttccgagtttcaccaagttttgtgtttattttgcattttcgaattttccctacctccgtccaaaattgtatgtctttaaaacttctcatttcttttttcaatatagccatgagccatcgaaacaatcgtaagagtacttgtttcaacaatataggccctcgttttttactaagctatatatagttggttaaacttatgattgtttggtttggtatatatcgacatcgagcatttgaatctacagcagtaatattggattttgtttagtagttaagtggacctttatgttgcataattaatagttttacgatcatcagttcatcaccataataataggattagatttgaggatgtgaatggttacggtggttgagacggataaatccgtttgcgaattagaccgtttttgatttaccatttataaattagagtatgtaagattatagattaagaaaaataaaagaaaatcgtcgcggatcaattatagaccgtttttaccgccgtaagcattcaaatcctgaacatctctaatgataatgtaataggattgacaaaaacaaatctaaaaattaattacgattatttaggtgtagtatagaacgtaattacgtatatgtatgttactatgttgtcaattatgtcggctataatattccagaaagatccttcggaaaggaaaaaaaaaaactgaaacttcggttcgaagttcaaacaatttttcttactgccacgtgttacttcatacacaattaaaatatttttttgtccctctcatttgtcaacgtttaggggaaaaacattaatatacttttactgcattccgccacaaatatctttctttctttttttatggttcttcttcaccccaactgtattagtactgttcgtctttcagaaaaaacaataatagatagaggaaaaaagaaagaaacagagaagtgagaaaaagcccttaaaactcaaacactaaaaaattttcagtgtcgattcaaaaagttttgttatttgatctgtttctgtgtaaaaaaa

SEQ ID NO: 6952 - DNA, 3000 bp, Unknown
  misc_feature (1)..( 3000): cDNA_ID_3090164_gDNA_ID_1621118_Annot_ID_171953 3000 nt of promoter + ATG
ataacgttttgatctgttttcatttgacatttgtaattggctttttgtaatgtggctttcattacgaaagcggctttctcgatcgttgaccgttgactgattgagaggattaaaaaaacaacgaccaattggtagaatccacgcgctcgtgaggctgataaaataatgatcatatcataataattaataaatcatcatcatcagtatcatgatgaacatcattatcatatcatgccttattgttatcatcatatctctgcttcttcgcttggggtcctacgtatctcaaaaacaatgcagctttaatattatatcattaaagcgaagtaatgtttttttttgtcggcttaatattagtactcttaaagcatgatattgatttgtatataaaaccatataatagtactttgagaactgctacattcagttaatgatatttgggagtttattgcatctgacatccttgaggtaatagaacttcatgcaaataattattttccaacttatgaattttagtattaaatctatataatgttaaaatatttctaatatattttcacatttttaaattgtaggaaaagacttttgtgtgtaaaacaactattactgataatgtgtcacgtaatggttggaattatatatcattttcaacttgctcaacaaaattaagaaatacaggaccatctctcaaatgccaaaaatgtggtaaatcatcaaaatctgtaggagttctaaagtactattggttatcttttaatatatactgcctaaatatagtaagtattattaagtttaaaccattatattttgttcaatttcaaaattgaagtaattgtagatgatggagatgattctgccactttggttatatttgatcaagatggctcacaatcattggaacaactgctgaagatataagatataagtattatataattttatgtacatattatttaggtggacataaattccaatgaacaattaaatgaatgttgatcaaaataaatttgggggaagaaggcattcccaaaagttacattcaattataggagagatttatttgttcgagataaaagttaaagaaaaggattttcaaggatcttatcaaagtttcgtgctatgcttaggtcgtcccattgtactattttaacataacacatgaattttagatgtctttctatgtttaaccattttaggatgtcaagatgtgcaataagagtagtgaaggcaaacacggagaaaacgaagatcatgacgaaccacttactagtctaaagaaaaaaaacaaagattgaagtctaaactgaaacttttattatgatatgaagtttatgaaacaaaagaaaaagtttatgaaacaattttaggtttttaattttccttttaccacttaatagtctaaagaaaaaagcaaggattgaagtctggactgaaattattattatgatatgaagtttatgaaacaattttagtttttttcttttttagttttctttttgttcttcccttttcctagattttgtttcttcactattctaagtttcagatgattttttatgaatagttttcttaaaattaaaaaaaacactaaattaatgtcttctaaaataaggcacatatatatatatatatatatatatatatatatattacgagattggtcgataaatattttaattatgttatattttacgttctctttaaactattatcaacgtatttttaaccaatcaaaaaattagtcacctaccatatacaatagttttcttttacccgtactacgtacgggttgacattctagtattatcataacaattgtttttgtgaattatcatttaactcataccacatatttcaactctgttacactaatgttgtatcaggttcatgtgccgtaatttaatgacccactaagccagtgatagatacaacttttaattaattttctgagaaaactaccatttttatatgtgagaaagcgtaagaaattaaaacataagccaggaagagaagtatcaaaacttggaaatggaaaaacagtggcgttaaaacggtaatcagatcagagtagaaacaagattggagaagtcagggtcttctggttcgatgaccttgatgctcctaaagccaagggtgagagtagtcgttgggttatgcacgagtataagatcacttccttgcctcatcttaatctggtactggtactttcattcttttcttacataagtttatccgatagagttatggtctagttacaagggcccatccggcgtacaaagaattataccttaatggggtcatattttattaaatatataataatattatttgttaaactaaaataaaatttaaagtaattttatgaattaaattttataaatagagaaagagaagaagaaaaaattatacctaagtaaagaagaaaagttgaaaacctatataaaatatgatcaaaagttaaatagtatgtattataacaagaaaagattagtcaaaaaaattgattagggggtgcaaatgaaaaatatgaactaggaacatagggtcatattacatatttaagccaaataattcaaatttctaactaaataagcttgaattataaaagttatggggtcctttgaccaccttgccctccatttagctccgcccccgcccatccttgtgtctttccgaaacgtaggttatgaggagaggaacccatgaacacttatataccaacattctcttctctatcttaacgatatgcgatacctatcattatttcttgttcattatgagatttttcggtgttagatgcaaaacagttatagaaaaatattgacttttgatagagaatttgtaaaagaccgtctattgatagagaatttgttattggcaacagagctagtgaaagattaccacaaggagtcaatctcaagtcgatatgctataaaaattgatatttctaaagctttcgactcggttcaatggtcttttctcagaaacgtccttttggct

SEQ ID NO: 6953 - DNA, 3000 bp, Unknown
  misc_feature (1)..( 3000): cDNA_ID_1976558_gDNA_ID_1621118_Annot_ID_171958 3000 nt of promoter + ATG
tcataagcaaaacaaatccgatcaatatgtttaaattctgtaatacaagaacaatataaacaaaaacatattattcagaaagcaatgatacattatttgaatattgtgtgtaagagtgaacgacaagatcatacgtcagagataatcgactggtaacaactctgatcttttccaacttttggtcaaagtcaaaccatttggtcatttttacagtaaattattgagtaatatgtcatttactcatttcttttgaggaaaactctttttttatcagaaaacaaaaacaaattactcattttcgttttgggctcaagacaaaagtccttcttttaaaaatattagcccagttaatctatacaggcccattaaagcccatactaaaagagccgagcgttccaccgcgtgagattgacgtgcgtgtatttacgcgttaatgtttcgcgtggtatttgtttatttgaataaagattccttagctttattcttagtaggtcctcatgagtcatattcgtgaaattgaggtttttgaacgaactcggggctttgattcgaagtcgaaagttttgattttatattgtgatttctaagtcgaaggatgtgttactttggtgttttttttatttgattttttaaaaagaatatttgatagttgtaaagagtttttgtatatgtttaatttttaaatagagaaatggtcaacgtagcacaattaacttgtaatagagaattgctcaacgtagcacaattagtgtagatctttaaaattaaatcatcgagcgaattttagaattctcccaaatagttgttatctgcaaatgtcatgttatttacaattcttgatacataaaatagttagttttccatgtggtaaaaacaataaaacatacgaccaatcgaccattgacataactcttctaaatccacgatgagttatatatataaacttataatactaatcacaattattgttattgaggaatatacatcgtgagtatcatcaaatctcgtcatcgcactttgcttgaacgtgcaagaaacttggaaacgcgtttagagcaaacaccgggacaccgaagtaccgtttattgaattcctttttttgtgtgtgttgttcaatacttaaatcgactaaaaaatcattagcctaagattcacatatcagaacgtgcttgggccaaaaataaaataaagaacgtgcatggaccaaccaaccatatatatatcttcatagtattattgataatggcgggtcccattatgtttgatatattttcagttttcaccatggaagcataatctcaagaatatgcctccaataaaattcgtttgtacatgaattccttaagtatggcagaatactacgtataccccacataatagtttaatctaatttaaattagtgtaaattttccaccaatcaatttattaattacttaaaacaacaaaagtagtgaaaaacaattaaaaacacatatctccctcaaaatacccatagtaggctacaactgtagatttcttgtttcacaagacacaagaaaaaaaaacctaacttagaaatcattagaaggaagtggttcatgtccattactaccgataaagatagtatcataaacaatagctgcaatggctgcaccgataaaaggaccaacccaatagacccaatgattcgtccaaatccagctaaccacggccggaccaaatgaaaccgcggggttcatcgatgcaccgtcgaaagcaccaccaaccagaatgttagctccaacgattaacccaatcgccaaaggcgcaatgattccaatatcacctttcttgggatccacggcagtagcgtaaaccgtgtaaactaacccaaacgtcatcacaatctcgaaaacgactgcgttccagggcgtcactccatatgatagcgaaaacgcagccgtttccatcccgccagtgcttaccttgagcaacaagcaagctacgactgctccgagtaattgagcgatccaataaagaatagctctcaacaacgttatgtttccaccaataaaagccccaaatgtaaccgccgggttcacatgaccacctgaaacgttagctccaacggaaaccgcaacgaacaacgcaaacgcatgagacaaagacgcggccacaagaccggcaggtgtggctggaccatctccagttagttttccataagccattccagagccttgacccgcgaaaacgaatataaccatcgagaaaaactccgcgaaagctgctctaatcgcatcgggacgactagcttcccccggcgttccaatcgcaattctgttgataggcatcgttacaaaaaaatttgctttcttgcttcctcttcattttgtttttcatcagtaaaagtttaaatagttaaagcgttagtgccaagtgtgtgtatgagaatcgttcaagagactgagattagtgttttacggtgggccctaggttataagaaatcgaacggtgattataaattcatatttaattaataacttacttaccaattaattaaatcttaatccgtttttctcgctttctataaatactattatgggtagcaattgaagaacacgcgctttactgttttctcatcatcgtcacttttctttctccacactttccgcaagattgttctgttcttcaaacgattctaaggtacgacttttttttttgaaggttcttgatctcaacttttgttgcgtattgatgtttgatcctctggattttgtatccaacggaagatctatcgagaaatgaacaaattcgatacaaattgttagtgtttagctgaattatgtagattttgttaacttcgatcttgaagatgattgatgtttatcgtactagtagaatctgatgttaaatctttgagtgatggatcgtgttatcagcatcaatagtgaaaagattctatattgatttagacgtgaagtcatgaaaattgactaacaagattctaacgtttggttctgttttgctctgttttattagatg

SEQ ID NO: 6954 - DNA, 3000 bp, Unknown
  misc_feature (1)..( 3000): cDNA_ID_3049361_gDNA_ID_1621118_Annot_ID_171956 3000 nt of promoter + ATG
cagaatcagaatgagaaaatgtcaggtggtggagaacttctttttctttcttttgtcagatagttggatctgctgctcaccccaaaatgggcctggcccagtatatatcaataccagtaaattggcgcgtgtatatcaatctccttttcactaaaaaaacacttaataccagaatatattttaccaaaaatcttattagttctctagttttttttttttaaatctaaatataagcgtaatacttcatccttttttaataagtgatatttaaaaaatttatacatgtatattatctattttacacctacattctattaattttcaaaacaaaagtaataggactaagcatttattgtaaggttgattttgaaaatagttaatagttttacatgaaaaaatattgaatattatttaaagtgaagcaaaataatttggctacatgtcacttattataaataaaaaaatacacataacattagagaatcaatcttactgaaacaaaaaaaattgtgaaagagtagatggaaataacatagtatactaaatactaatgcttatttttcttcatatatccactctattacacctacatgctaccgttgcagcgaattaaatggatcaaaccaactgcatgatagatcaaacgtaatttcaatgtttttgatcaaaagatcaaatgtaattatgatgactcttttgtcaacaatctcccctggaatgcatcatgcatgatggtttgcacgagaagatcaaagtataaatttaagttcgggacacgcagaaaaaagacctacttgtaatattcttgaaagtgagttcaagctctcatcatttctatgcaaagttgatggcgtaaaggatacacaaaggtatactgagcaaaattttttaccacttttgattttctacatgacacttcttactaacaaatttcgttgaaaaacggtaaaacaacaattatttcctacgattttcctacatttttgacagtaggaaaatgaggtttttctaagataacatttgctttgctatgtaaaactaaaaacagagtgaaacggatattacagatattttgcagaaccctatattctatgcaactggactatatttgctccgccgatgataagacccattcttcatacattaagactatatattatgcacacccatacgcacacatttcaagtttaatctatcattgactatgcttacattgattattaatgtttcagttatttcttggttcctagaatgaactggaccggctactttcgtatcatagaatagctattttttcggaagtgtctgcatcttaataaatatatattatgactatatacacaatgatgtcgacaagagtgaatatacacaacataattatcgcattttcttattagacgtactacgaaatttcataaaccattgattcattgcttgtttcctaacggggaccaaattaatccctaactttttccgatgggtatagaaaaggtcgaaaaatcccccaaggaccaaaaatataccttcaagttgaagaaagtaaatagataatatattttaaaaggaaaatgtgtgaaggaaaggaggcgtgggaggttcttttgcgacaaactctacatggacgcggtgtggtccctctggtccttaccctaatcgtttgatgatatatttttaccatgttatcatttcgaaaacgttttatagtatatatatttttattttatttttgttaaagaacgttttatagtatattacataagatgtgttgacgatgattagtttataatttctaggacaattagaaaaattcaaaggtaagctagatatataatttcatagtaggggaggtgctactttaggtacttgttaacatggaaattatataatagaaaagttaaaatctaaatcatattcccgtacttattaatttctaggacatttttttagtataactcgagtaattcttgttgctagactaatttcagggcatgcaagttagtttgggtacaaagataccatgtaaagtatccggaccaaaacttataaaaacgagaatatgagtatataaaacaaataaagaaactaatttcttgttgctagactaatttcaacagttatataaaaactagattttcaatttttgaatattcttatttaactatatcatactaaaaaaaaaaatgtaaacaaagaaaacaaaattatatctgtctatttcctcgcaaaagaaaaataacatgtaaacaaatagtagtaatagtaataataacgtgtaagaagcccctcttaaggtgtacggacgtatgttttttttctttcccaggcactcttccctatgtcctaaaagaagctaaggttttttaaaaaaccagatctcagctactttctattaccaaaaacagaaagtttcccaccatttctcaaatagacggcatctccctccggccaaatccccggcgatgactgcccttaccgaccaatggtgttgacggccccttagaagtcatgtcacaaggtgtgggacaacagaggacttcgagctttcaccaacttctcctccaaaccctcctttctccccttggcttcatagtgctttaagagctcaactaccagatcccttgattgtttgaggtacaaaaagtcttgagcatttactcttgcatttatgtctaaccttgtggttctatctcttgaactttctcactatatgtgaagaaccttttcaaacttatgtcatgctcagtttctcaacaaccatgatgacaaactctctcacctagtgtgaagaaccttttcaaattgtatcgacaagactctgccctagacgccttcgttagaataaccattggattacgtgtgatcttgctgagttcccaggacctaagtatagaccaaagaatcccttactctgcaaaaggaaaagacatagctcacagtcaaaaatcttactcaaattatgccagtcaaaaccgctcaagggactctggggaaagagctatg

SEQ ID NO: 6955 - DNA, 3000 bp, Unknown
  misc_feature (1)..( 3000): cDNA_ID_1816284_gDNA_ID_1621118_Annot_ID_171943 3000 nt of promoter + ATG
tttgggtttgattcatctgtccctgtgttggttgctatctttatcccaatttgaggttaaagtcatgttcttgtaagaatagatttgggtttgacttatcttttccctatgatgcttagtacatcaagtttaggttctgtgtatcagagtttgaagtgttatatatagaagttgtggcctagaaggctagtgtatttgcttccctgtgttgaatatattactgtaatctcccctgtgttggttgctatcattagtacgttctgtgttgtcacagagttttaagcgctatgtatagaagttgtaacctagtgttcttacttctgccaaagcttgtgattgtttgagttatgtgtgtttgattttttgttttgttggcaaagaacttatgtgtgtgtgtacttttggaatttgttcagaggaactatgttatctgccaagtgatgtataagggtgaagatggagacgtcccatctggtggtaacaactcgagtgagccgagtcaatctttggtctctgattcgaatactgtcagagctacgagtcccacagcgcttgaggtgactccagtttctttatttgataatctcatgtacttgattcgtttactcaaaactctcttttacattttcagtttgagaagccaggtcaagaaaatttctttggtatgtctgtggatgatttggggactccaaagaatgaacaagaagatttctctttgtgggatgtactggatccagacatgttattcagtgacaataacaatcctactgtgcatccacaagctcctcacttaaccccgaatgatgatgagtttctcggtggattgaggcatgttaaccgagagcaggttgaatatttgtttgccaatgaagatttcatatccagaccaaccttatctatgaccgagaaccgcaacgatcacaggccaaagaaggctttgtcagggattattgttgattatagcagtgatagtaatagtgatgctgaatcgatatctgcaacggtaaagcaaatcacccgttttctttatcgttacttctgtgctgtaatctccattctcacattttgattatattatgtcagagttaccaaggaacatcaagtccaggtgatgatagtgttggtagttcgaatagacaatttctccagactggtggagatgagattctatcgtcttgcaatgatctacaaacctatggagaaccttccatcagtagtagcacccggcaatctcaactcacacgaagcatcatacgaccaaaacaagaggttttgcgttgctcttatgttgattctatatgatttcaacatatgttggatatataaagataatgattatgtaactttccttcacaggtgaaacaagatacatcaagagcggttgatagtgatacatccatagacaaggagtcatctatggtgaagacagagaagaagagctggtttattacagaggaagcaatggagagaaaccgcaacaatccacggtatatctatctcatgagaatgatcataggcttcattctcttgctggctctcattagcaacatcatatcggtgttacaaaacttgaacccggcgatgaagtttgatcgcgagagatagacaaaagctagcagattgatcaaagcactcgtttttactttgcttttatttatttctattttcttccgaaattttgatgtatatatgtgtgtgtatgtatgaccaagaggtatgtcttgtacctaaagttaaataaaatttagggtttgaaaattttataacatttagagcgggtccatagttcagtgccgtggtggagcattagactgctgataaagaaaacattcgacagagaccagtgaatggtttgaaaggtttctcaaagatttggtttgttgataattaagagaatgattacataccggacaagggactggtctaatgtgattgatacttcgatgatcaatcaatcaaatattacttcgatgatcaatcaatcaatcaatcatattacttacaactatgtaatatgattctatgaacctttttcttgttttttgtaaactttaatcccttatcttgcaagccaaatccatagacatatattttacaaaattagtagtagtactatattgaagtagagaaagtaataacgccatgtcgtcgtcgtcgatggtggcggctataatttccgaaagatccttcgactcaaaatacacaaaaaaaacaaggaaaagagaaaggttcatactttcgttcgaagctccgacaatgaaccgtcaataatttgccacgtcttcattctcattcacaataaaaataaattttgttcctctcatttgtcaaccttttttgtttttgtttaaagaatttgtcaacctattggaaaacattttgcattcaattaaaatcttatcgctaacagttttttgttttttgtttttttttcaactatcttatttattaacagtagtaaatttgttataaaatacataatattacatttcttccaatacataattgatatctaaatatccgatcgttgtaaatttggagtttcattcatcttaaaatgtgtgaaaaattacggctgatgtgtgacaaacacaaaagataaaaagttactaaacacaatttttttacaaaattaaattgaaacgaaaaaaaaaaatttaacaaaaaactaaaaagaaaaaacattttagaaatagacacaagtcatcaacacggtttcggcgcgagtagacttcacggcttttgttctttacttactgagaaattactaaaatttggtttttttttttttttcaaatagaaaaaaactataaataccatcactcgctatctcttcaccaatcacttcctacttgtatttgaaaaagaaagaaaaacagagagagagagggagaagccaaaaaaaaaaacagagaagcagaaaaaaataaattccttcacccaaaccctagaattttttttagaaagttttgttttttcgatctgtttctgtgtgaaaag

SEQ ID NO: 6956 - DNA, 3000 bp, Unknown; identical to SEQ ID NO: 6955
  misc_feature (1)..( 3000): cDNA_ID_1816284_gDNA_ID_1621118_Annot_ID_56229 3000 nt of promoter + ATG

SEQ ID NO: 6957 - DNA, 3000 bp, Unknown; identical to SEQ ID NO: 6953
  misc_feature (1)..( 3000): cDNA_ID_1976558_gDNA_ID_1621118_Annot_ID_56235 3000 nt of promoter + ATG

SEQ ID NO: 6958 - DNA, 446 bp, Unknown
  misc_feature (1)..( 446): cDNA_ID_1816252_gDNA_ID_1621118_Annot_ID_56238 3000 nt of promoter + ATG
catcacagttacatataaatatatatatatatatatatattactaatcccttccaccgagaaaaacagtatattctatacctacaatttcaaaaaacaaatgtttcatataactttacttaatagttttttttttttttctgttaaagaactttacttagtagttctataatttgtttcatagttaaaaaagaattcaatacctactcgttctttaaatattttcattgttttttgttgttttagaaagaaatgggctccaactcaacatccatgttatttataaatatatccacctctagtcttaatatttcactactcaaacaagtttctgaagaagagacagagagagaaggatagagtaaaagctaagagagagagcgagactgagagagaaagaaagagatatcattttggttattaagtaattaacttatactaatcatg

SEQ ID NO: 6959 - DNA, 3000 bp, Unknown
  misc_feature (1)..( 3000): cDNA_ID_1816383_gDNA_ID_1621119_Annot_ID_56239 3000 nt of promoter + ATG
cattttcttaatgcttagtttaattttctaaaagggaaaaactatgatttatacgcggatacgagggagtgggatgcattaaacaaaattcaaatttgacgtcaattaagcaaattaaaacaataatctgtttcacctttttgtgacaagtggacgtcttctttctcatccaagttagccatctatttctcctaaacacattgttaattagtttcattattagtgacgaaatcaagacgccgtaaccgataattctaacataatcccttttataataagaaggatacaatttcaaagaacatactaatatttacaatattatttaagattgtattattgaacaagttgtcattcctgtgtttggtcaactatggcctttgggatactcagaaggattccatacccaattatttaattcgatacccttcttctacatgattcaatcaatccttttaaaaaattgaatctgtattttttttcttccttcgtcacctgctggaatattaatatcatataattagtaataaatcattaagttttgtcaatgttacacatttagaccctacaactttatttaattttatctatcaagctaacaaaataaggtactaaccagttaatgaaattaaaattgaggatatacatatagtttagtaaaaaactttgatcgataccttatctgaattgaaactattctgatctatcctaacaatattaaaaatggtttacatgcgctatcatcattttttctactaaaggatttaacgcttattgtaaaggccttttttttttttttactctgatggtttgtcagaagattattcgttaatgaattatacgtttgttataaactgtaaatcttcattttgaatgtaaaactcaaaaattaaaattgaagcaaaaggtagtttccttgttcgtgctaactgctaatgtcgattaagattcatcctcttgaaatgaccgagtcaacgctgagggagaatctcacgtggtcctaccaactatcacgtgccaaaaatctgggccctgagatatacctataagcaaaagccagctccgcccaaaacatttgatccatccattttcatttttattttccaattttgaagttagggtttatttttataagtttccattaatttattttcttattccttttcggaggatgtgtttattaatttaatttcaatagaagataatatatttgggttcaccactcgttctctttttctttttggatgggactcttcattgtgacttttttgttctcgctcttccacaatctttggatgtgtacaaaataatcgattgttggggatattatagtaaatttagcaatatgaaactagcaacgaagaaagtgtttattgatgggttcaaaatttcatcgatctgcatatcaataactcggaaagagatggatcatgacacatagtatacaataaattttataaatttcgaaaattaactaattgaggatagaaattcatcaattacttaataaataaataaaaaactgattcaaatgtatgttttacttctgtaacatacaatttcttgcttttcttgaaaattgactcgttttttatattggatattttacatagactttgagacttattaataaaactaactaaccatctcttacaaattgttggaataaattatttttatttttctgttggctctataaaatgaaaatgacctttgttcttcttctttatactcctatatatgttttctccagagagaaagagaaccattgaagttgcgagacttccaattatatatatagttcatgaaagtcctgtgaccatgctctttatttattttatttcactatacgttaaataaatggaaagtagggtaataatcatattgcagcatgattcattttagtggcgtctaagaagcattcattttgagccattaaatctcaaggtagactttcccattaacacaaaagaagaaaaaattggtacgtaatcataccaacatctacaaatctttggtttcaattttgtaacaaagacctagattgttgacaaacaaaaagcaaatacctaaaaggacttttattgacttctataaagatgttttgattgaaatttcatataatttaatagtttcctcaaactatatgcaataaaattataatttgataattacatgtgaaagaaaacatgactctcaaattaatatgagtcgattatcaataaatttttgtgatatggctgtgctgcagaacaactgaatgggcctagaagtaaagttgatattgagcaaacaaaaaacgaaatagattttttttttcttttgggcaaactcaaaaaacgaaatagatatgcctcgacaatactacaaaatctcaaatgaacaatattgatgaaaatgcgtttgtaacacagaaatcaattattttgaattattttccatatatagtacagacgtaaaaaacatactgtattatctttcatggaagtaaaataattttccaagaaatagaacaaatgtaaaacaggtggtggctaaaactggtgcttttaatggctaatgccattgaatcactgacaaaatgaccgatgacttcaacttaaaagttcaagcccacagttccaaaggtagaggaagtggtaaaatttaggtatggtctctttctctctctctcaattttctctttctacaaatatatactacagttacagtagtagttattattattaattattctctccccaatcaaacaacactcatcagagtcacacatgtgtcacttttttcttcaatattttagttttatgaataaaaaatcaaaataaaacaataaaaacttttttaacttggctagtttcccagtataaatagatgtatcaacgaacacatttaagaccacaaaagaaaccaagagctctcaaacaaaacagccttttacataagaacaaacacccccaaaaactgcaaaaaaaagagagagatcattaatccatcttcaagatg

SEQ ID NO: 6960 - DNA, 3000 bp, Unknown; identical to SEQ ID NO: 6959
  misc_feature (1)..( 3000): cDNA_ID_1816383_gDNA_ID_1621119_Annot_ID_171971 3000 nt of promoter + ATG

SEQ ID NO: 6961 - DNA, 3000 bp, Unknown
  misc_feature (1)..( 3000): cDNA_ID_3409141_gDNA_ID_1621119_Annot_ID_56242 3000 nt of promoter + ATG
cttacgatatgaatcctctaccatgagattcaaatctttcttctaaatcaacggtgtagaaccactcgtagagaaaatataatttagagacatatccatcagtttgtccgcgctttagcgttacacatgttgaagacatggggcgtttttcataattgggacacgaaaagtgaattatttacaactttttttcagatctacctcataaattaattaaagttatatcgaggagtaaaggatatactgtatgtgtctccctcatttttttatttcccccacttttttctttataatatatctagtttttgatgaaatgtatgtttttgataaactattttcaagtatagtaacggttttttatcattattattattattattattattattattattattattattattattattattattattattattattattacgatattgaccgacgacgtcattaagctgcaatttatttatctgcgaccaaacaaaatttctggaacttggaaatagagtgatgaatgcattatgtgttagattaatattgtattgtattaacagatcaaaatgaccctctgtgttgacttatacctaagatatatctacttttttgttcccctctacctaaagtttccagttttgtaacgtttatcccttacgcattattggtgttttagttcattttcggacaaaactatatgataaataggaccaactgaatggggtcatcttagccgtccaactctttttaccggcttttctgctggccattctttacagattgtgacgagtacgtgtcttgtggcctgtatcttcttctctttttgtcgaaaaagaaatcaaccttatgcacaatttgctctacttatttcatcaactaaaagtaaagcctaaatatagattgtttataaggttataaaacctgtttaatcgaaaaaaaaaaagttttagagcctaaacattagagattggcttaaaatctaattagagaaaacatcaatcacacaattttgatttacaaaattaaaaaaccaacatcaatatgtttagataaacttaataatctatctaactaaaatatagatagtaaaaagacaataatgtcaaaattaatcgtatcatgtattttcaatgtaaagtatactaaatgtagaaatataatgtcaaatttagttttctaaataaattgggaaaaataaatattactagtgaagatagtaattttttcaattttcatattaaaatggtcattttgttaggcttaagatttccttaaatggcgttattgaccaaaaacggaaactgatgtactttagggtccacattcacgaggaatcctacctggcttatagtcacatgagcccgcaacttgtagccacgtcatcttaagtcaaatatggtacaaatttaaaatagagtagtactaatttttttcttttggacaataatatttgatgtcatggaagatacttttgatttgtatttttaagaaaattattgactacaatagtaaagattgcattctctttctcagacaataatcaatctcacatcgtttaacaggattaaaatggtgaaaagatagtcatttacacagtttcatcatgttctttagtctgttcttttcatgacatgtaatttccaatgctaattaacagatgatagtaaaataaattacaatacaaatatgttaaaatttgacaaaatggtaaatcatttgtttatatttttataaatccaataccaaaatgatttgaagttgaaacgttttgagtgtgaccctttaaattttattcaagggttcttattctccaaattaccattttcaccagaatccaggctctgtcattattattttagttgagaaaacgacttttatcctatttactcgtcactgaccggtggtgtaatttactcctttttgtaataaaaataaataaatcatctttctgatatgaaaaaccaatatttcaagtatattttttagtatataatcaagttttacaaataaatcataaaaatacgcattcaaagctacaaattctcgttctatctactttttcatagatcacttttcctagcccattatcttttgttagatatcttcacgtcaatttaaaaatcctaaaatatctatttttgttttaaatgatcataggttaacaaaaaagttcgtcaatataacatgcactaaaacgaaccactaaggtatataagtcatagttgaaaatagttaagttttaatggacaatctattccagtactgaatataaaacatgatagagcttttaaaatgttaacatccttcatttttattgtgcgaaaacatccataatctaaaatataaatcgtatattgtagaattcaaatgtcacacctagtgataagaacattgatcttttggcgcggatcaatatatagaataaagaatttaagatgtttccgcaggcatcaacgcaagtttaactgctggaatttctaaaagagttcaacgttcaaatgagaagttgtaacgttcaatttaagagtttcaacgttaattacatgaaaggtttgttgtaacgttcaatgaagtcacagaagaaggaagcaaaaagcttctcaaaaaacttctattgcatttcatttttttatttatatgtaaaatataatttaatttcctagttgaaaattgataaatctattttttacaagtaatggttaagtggtgatgttctaaatctatgtggcatgaggtgtaaaattgtacattatttttttatataagcaaaaaaggttctttcatgtgcaatactcatcatcatggttctttatagaaattaattttttttttaatttatatttagtaaaacaatttttttattgtaaaccatttgcttctactataaatacccctcctcttgatcaaatctcttcactcatcaaaacatcacatacactatttttctcctctccttattgtctatatatttttcctctttagctttttcatttcgaaatg

SEQ ID NO: 6962 - DNA, 3000 bp, Unknown
  misc_feature (1)..( 3000): cDNA_ID_1816377_gDNA_ID_1621119_Annot_ID_56243 3000 nt of promoter + ATG
tttggagaataagaacccttgaataaaatttaaagggtcacactcaaaacgtttcaacttcaaatcattttggtattggatttataaaaatataaacaaatgatttaccattttgtcaaattttaacatatttgtattgtaatttattttactatcatctgttaattagcattggaaattacatgtcatgaaaagaacagactaaagaacatgatgaaactgtgtaaatgactatcttttcaccattttaatcctgttaaacgatgtgagattgattattgtctgagaaagagaatgcaatctttactattgtagtcaataattttcttaaaaatacaaatcaaaagtatcttccatgacatcaaatattattgtccaaaagaaaaaaattagtactactctattttaaatttgtaccatatttgacttaagatgacgtggctacaagttgcgggctcatgtgactataagccaggtaggattcctcgtgaatgtggaccctaaagtacatcagtttccgtttttggtcaataacgccatttaaggaaatcttaagcctaacaaaatgaccattttaatatgaaaattgaaaaaattactatcttcactagtaatatttatttttcccaatttatttagaaaactaaatttgacattatatttctacatttagtatactttacattgaaaatacatgatacgattaattttgacattattgtctttttactatctatattttagttagatagattattaagtttatctaaacatattgatgttggttttttaattttgtaaatcaaaattgtgtgattgatgttttctctaattagattttaagccaatctctaatgtttaggctctaaaactttttttttttcgattaaacaggttttataaccttataaacaatctatatttaggctttacttttagttgatgaaataagtagagcaaattgtgcataaggttgatttctttttcgacaaaaagagaagaagatacaggccacaagacacgtactcgtcacaatctgtaaagaatggccagcagaaaagccggtaaaaagagttggacggctaagatgaccccattcagttggtcctatttatcatatagttttgtccgaaaatgaactaaaacaccaataatgcgtaagggataaacgttacaaaactggaaactttaggtagaggggaacaaaaaagtagatatatcttaggtataagtcaacacagagggtcattttgatctgttaatacaatacaatattaatctaacacataatgcattcatcactctatttccaagttccagaaattttgtttggtcgcagataaataaattgcagcttaatgacgtcgtcggtcaatatcgtaataataataataataataataataataataataataataataataataataataataataataataataatgataaaaaaccgttactatacttgaaaatagtttatcaaaaacatacatttcatcaaaaactagatatattataaagaaaaaagtgggggaaataaaaaaatgagggagacacatacagtatatcctttactcctcgatataactttaattaatttatgaggtagatctgaaaaaaagttgtaaataattcacttttcgtgtcccaattatgaaaaacgccccatgtcttcaacatgtgtaacgctaaagcgcggacaaactgatggatatgtctctaaattatattttctctacgagtggttctacaccgttgatttagaagaaagatttgaatctcatggtagaggattcatatcgtaaggttagtaattgggaattgtggtttgctatatatcgatctagaccatatccaaaataattaatattggttcgaatttggatatgaagatcatacattatgattaaataatgttttaaaaaatgagagaaaattttgatgaagagaaaaaatatttttggtttggtgatcattacaaaatctgggttgggtctgatcccaaaaatatcagagaatacaaaacaaaatggctctaatcctgtatttttttctggatggtgtatacttggacatgagaagactctagttaacaatcgctatatagttcaatcatagaaattttcgaaaaaattgtacgtgaaactctattgaattagcaaaatttcttatatttttggtaaacaaaaacttcttagattataatgattgcattggtctttacgaatagtatgtattagttgttaaaatttatttattcgattttaacgatcagatagtggaggaggtcaaatttcaaagaccactgttggacttgggactagaggcctaattcaatagcccaataaaattttcaatttgactttctttaaaacctatgaaatttctcttcctttatatattaccactgctgactcagaccaatttttctccatcgccacgacgacattcgctggtcatggtagataacggaagtaacaattttgtaaccagggctttatgcacacaattttttcggaccagacttaagaggtgaatgcgtctatttcgatttacgtgcatgcatgcatatatagctaattatattgtaccaattatttttagaaaaagaaaaaaaaacctgtgaacgggaagactacaagtcttaattaattaaggatcaccacatatgaccttttcttcgaactccatatttaaacattcctcaaacatttctctctcattatcttttatttctcttcttgttactttcttctcattcttttgacgaaaaacaaaccctttaattagactctcttttattctcccatactctttttttgctgtcttatttttgaagttttttttttttttttttttttgctgtctcctcgttgaactcagttgcataaccatctccagtaaatcatgtcgaatcaaatccaacggtagagattttctacgacaaatctgaattaaatcagagaacgaatagagatcaggaaagcaaag

SEQ ID NO: 6963 - DNA, 3000 bp, Unknown
  misc_feature (1)..( 3000): cDNA_ID_1816366_gDNA_ID_1621119_Annot_ID_56246 3000 nt of promoter + ATG
tccaagtttgaggaattcagtgacgatggttttatctccccgcaaaggtcagctctttttgtcttctctacgttatttcatcaacgtgtaaacatgtcactaattgaaaatttccgtaaaaaaaaagaaggccaaattggagagagagaaagagatacgactttggaatttctaaactgttttataaagatggagcacatagagatattagatgttcataattagtaaaattgggtttcttgacccataagcaatgttgttccctcctcttcgttccctctttctcttcaccctcttgctctcctccgtttgtttcttacaaatcaaagcagaccacgacgatgaaagcgacttgggcagtgatatcaaagtagacaaacgtctcaagttcgagaacccgaagctacgtcaagcctacattgctcttcaatcatggaaaaaagcaatcttttctgatcctttcaacttcacagctaattggaatggttcagatgtttgctcctacaatggaatctattgtgctccttctccttcatacccgaaaacccgagtcgttgctggcattgacctcaaccacgctgacatggccggttacttggcttccgagctaggtctcctctctgatctcgctctgttccacattaactcaaaccgtttctgcggtgaagtccctctcacgtttaaccgcatgaagcttctctacgagcttgatcttagcaacaaccgattcgtcggtaagttccctaaggttgtcctctctttgccttcccttaaattcttggatctccgctacaacgagtttgaaggcaagatcccatcaaagctcttcgatagagagcttgacgctatattcttgaaccataaccggttccggttcgggattcccaaaaacatgggaaattcccctgtttctgctctggttcttgcggacaacaatctcggaggatgcataccgggaagtatcggtcaaatggggaaaacactcaacgagcttatcctctccaacgacaacttaaccggttgtttacctcctcagatcggaaacctcaagaaagtgacggttttcgacatcacttcaaaccgtctacaaggtccgttaccatctagcgttggtaacatgaagagcctagaagagcttcacgtggctaacaatgccttcacaggagttattcctccaagtatctgccagctttctaaccttgagaactttacttactcttccaactacttctccggtcgtcctcctatatgcgcagctagtttgttagccgacattgtggtgaacggtaccatgaactgcatcaccggtttggctcgtcaaagatcggataaacagtgctcatctttgcttgctcgccctgtggattgcagtaagtttggatgttacaacatcttctctccaccaccaccgacgtttaagatgtcacctgaagtccggacacttcctccaccgatttacgtgtactcatcgcctcctccaccaccgtcgtcaaagatgtcccctaccgtcagagcatactctcccccaccaccaccttcgtccaagatgtcaccctctgtcagagcatattcaccaccaccgcctccttattccaagatgtcacctagcgttcgagcttaccctcctccaccaccaccatcaccatctcccccaccgccttacgtatactcatctcctccaccgccctatgtgtactcatctcctcctccaccgccgtatgtgtattcatcccctcctccaccgccttacgtatactcatctcctccaccgccttacgtgtactcatctccacccccgccttacgtatactcatctccacctccgcctcctccaagtccaccaccaccgtgtcctgaatcatctccaccaccgcctgttgtatactacgcacccgtgacacaaagccctccaccaccatcaccggtatactatccaccagtaacacaaagccctccaccaccatcgccagtatactacccaccggtgacaaacagtccaccaccaccatcaccggtatactatcccccagtaacatacagtccaccaccaccatcaccagtttactatccccaagtaacaccaagtcctccaccaccatcgccgctatactatcccccagtaacaccaagtccaccaccaccatcaccagtttactatcccccagtaacaccaagtcctccaccaccatcaccagtttactatcccccagtaacaccaagtcctccaccaccatcaccagtttactatccatcggaaacacaaagtcctccaccacctactgagtactactattcaccaagccagtctccgccaccaacaaaagcatgtaaagaaggccatccaccacaagcaacaccaagttacgaaccacctccagaatattcatactcatcatcaccaccaccaccatctcctacgtcctactttccaccgatgccaagcgtctcatatgatgcatctcctcctcctcctccgtcttactactagtttcaaccattgagtaaaaaaatgcattgccttatgattaacgagactactcacaattatattcttttggctgcgagactttaatttgtgtgttttgttgatttaaagaaaaaaagacattccagttactttttcttgtaatatttttttttcttttggatattatgttcttttttccctaacacagagctgctcattagcagcaatggagtatatagtttcagtttatttaatttgatactaaaatgttctgtataaataataaagaaaataataaatcctttcacaaaatccatttttatctcaaattaaaattgaatatttaattgaaaactgtaaagatgacgtcaacttctcagtcatcatctcaaaaacggaagcttaagaaaaatctatacctaccacttcgaactaactctcctctctcgcttactggaatttggggattagcttgggaaacttcgccggagattcatacgtcgtcgtcgtctttagtatctgtatcgtcaatg

SEQ ID NO: 6964 - DNA, 3000 bp, Unknown
  misc_feature (1)..( 3000): cDNA_ID_1816358_gDNA_ID_1621119_Annot_ID_56248 3000 nt of promoter + ATG
gcgtagatccacataaaaatgacctaaatacctcacttttaagctatgttgccgggtagttaaataagcaaagctcatgttcaagtaattttcgttttctggagattgatccaaggggatgtatatataggccctataacagagcaagaaatgtccaatattacatgttcaattgcaaagcatgttaaaacaagagagggataggccatccaattttcccgatgagaaaacctctagcgcgaagtaatagtatgaaaatcccggctcacaaacataagcataccatcatcagtgtgtcattaccacagtcatgctcgtttttggtcaattggctaagaaacgatccgtggtggaatgggtgaagcagtgccttgtcgttggtgttggcgatcttaagaggggagaacaccagtatacttgtcaacaaacaccgtgtatatcgctagcacgacttagttccatcccgctgtccttcttcatccatgtggttgccttccttcttatgtatttacataggtccaaccaagtttcttatcgaaattaccatgtgaaatatttttaaaaaatcttaaattattttttataatgaatttaataaataaaatacattttactacaacactatcgattaatacattagacaaattggaatcgttgtaaaatttaaaatataagaaaaaaggcaaaaaaatgagcaaaatataagacgaaacaagaagcaaaacataagaagaaaagcttggaatggtaagttcatatttgatacattaacatcaagaattatgagttttaattaccaactatacaaaaaaagaacaacacaacaatatgaagacctatactttaaaaaatcgaacttatcaacttatcatttcaaactttatagctaatcatattatatcagttttaaactatcctctaaacttaccatacattttggctatcataaaaatgaaaaagataaatctacattttaatatgccgatcttaaaatatgaggaaataacaatttgttttgaaagcatgcgtcaaaaaaatctctacactccgattcacgaatgtggatctacaaataagctacttaagcgtaaagttataaaaatggcagaagatggtcaatccaaccgtaacgcccagcagtattaatctgctgagaacaaaagaatgattgagaaagtgttagccagggtcgcacaataataattaagatatagcaagaaaccatttaactgaatcaacaactacaaattaccaacgaaaattaattagttggaaagactaaaattcattaacttggtgtttttatttcattttcggttcaagtattttgcctattctcgagattgatccaaggcgatgcatccctaacacataaattgctagcaatgtccaatattaattaatgaacacagacgacgacaaaagaaaaaaaaaactaattttaaagcatgtggaattgaaggagtatctcaaatactctctagaagatcatttgaagggatgatccaacaaagcaaactacaatatccacaaaaactcttattgtctctgaatcaaacagagctataacattcaaaaaatttataaagccaacgcgcttgatcatcaagatgaagatagaatcgaagtttatgttattagcaaactgggaatcaggaaggaacacatccttcgaaatagataagcgatcatgtcatagtaggtacaatacaatcaaatggatcactgtattcatcaatttcagacactctagttgtaaaagaacttaacgatccataatcaagaatcacccacaattgtcagtcaaacagatcaacataaggtttaagagttctacaaatgatttagttagttcattcgttaaggaattagtggatttgtggcagaaaattcagaactaaattcaatatatgtgattagtgatcagagtgtttcaaacacgtcactgtctaaatccaaaggagaagtgttcaaacctagaggaagctactgggttttgagagttaagaagatcagaccagtccgatatatcttatatatagaaccacatgcacgagaatcatgaaaacgtagtgattttgatttttgtttagtagaacaaatattttgagatttttttagaaatttgttagaatttgagattttttatatgactaagacagagccaaacactagtgccgtcacgtgtaatagataagtttctatccggatgaagccattagcggtgacaaggtttaatagtattcaactactaattgcaagaactttagatacattgaatctagacagcatttcagattcattgaacttggacgtgtttggtttactctactacttctggtttccgcatcagatgtttagaatgtatcagcaaatctactgatgtgaaaaaaaaaacaagacgaaagatccgaccacaacttgccacgtggtaaccacaatttaacttgttgccggtacgtgtgtccacgcgctactatgtaaccgtgaccgtgacctagcttttttagtttttactccaactggaactggttatggatactttgtcacggacgttagttaataaatgttggcgtccgttaatcagaatttttgaagtaaataaaatatacaaaggtgttattaaaaatctgaatctaaaaatgaaaattaattgactaacactaaatgcctaattattttatttttctgatataatccttttaaaagtgaatgtatctggacaatatggtggtaacaattgagaatctaaaattaatccgccagcatatcccaaagctgtaattaatttaacgggatttagggtttctccgttacacaaaacgccgttaatcctttttcaccatcatgttgtcatattttacattttgtcgtttactccgtcaaaaagtcaaagtctctgtcaacataatgaaaacatatcactaaatataattaatactcgtgtatatatatcccacaagtcaccgagaagatgagaaatcaagaaaagggcataaa

SEQ ID NO: 6965 - DNA, 3000 bp, Unknown
  misc_feature (1)..( 3000): cDNA_ID_1816352_gDNA_ID_1621119_Annot_ID_56250 3000 nt of promoter + ATG
aaacaacttcgctatctcatctacaaccacataaaccaaaacactaaattctccaaaactcttctaaataatctataaaccacagatctataagagcatccattctcaaactacacgagagcataatacacacataatcacaattaaactacttcaatttagcttaataaaatcatctagttcctcaatttttctcaccaaactaacaagatctagatcagactgataaaaaaactcaaatcgcgagtatctaacctggattcccggcggcggaactagcgggaccttcgacgattttgaaagctcctttgagaacagaaggcaaaggaagagtgttgttaatacggcttgattgaacttcactgtaaaccgaagcacgtcctttcgcaggagcattctccggagatccgacggcggtgagatctcgtgtaacggcgagagcaggggccattgctctgtgggtgttgtttcgcttttcacctaactagtttactttcgtttcgaacctaacttttttcttccctcctttcgttcactcgtcgtcaatggagttcacttcgaggtctccgcattggggttggtgtgaatatatactctgacccaagggtttaatagtcaattcctttattaatttactcatcctacaaggcaaagggtattttagggatatcttgtataatggcctgttctatgatgttcggaactttaaggcccaatttaatttttgggcttttgagccttgagattatcgtatctagctagcttcttttttgctgtctatttttacgttttgtatgcgacgagtacacatgccttgcgtagacaccaaaccaaacacaatatagcctagtctgttgcattttattataacgaaattagtgttgtattaatgaaaatgcatgcgtgtgtataactccataagtttttaaaaagacatgtaattccatagtttactttcaccaaaaaatcaatcaagacattgaacagtaagaagaagacggtatatatgaacgttttgtaagcataaatctgaatttttttaaaaaattaaaacgttaccattgaaagtaagtattttgttcataataagtctagataaatccgaatttcgatagatatatagtttgtaaattaatacttgacaaaaaaaagaacttttcaattagtgaaagaaataacaagctcgcatgggggttattgggctaagatcactaaaagaaaagtaggtagtagtagccaccgaccgaagtatttctttctgattttttgttatcaattatcaattaatttcacaagatacgagagagataaagattgatttattttcttgttacttgatacaagattttttgtggcacgaattattataacctcaactttaacccttttccgaaaaaagaaaggtattataacctcaactattacaacttggaagtaattaatcgtatattgtgttgtttttcgtacataaagagaaagtactatcattttaaacttattttattttagtttcacttcttaatgagtttgggaatattttctaactttagttaaattatatataatgtatacttttcttaccaaacatttgatttaaaggtttttattgatttgttaaactatgaggaatattttttccctattatggaagaatccaaagataacttattgtaattatattagctggccaaggccaaccggtattatcgaagaagcaacctcataatgatcaagataatttgacagaaaaatgatcaggttaatcttcttccttcccaaaattaacaaagttgatttataatccaaaaaggaccaaaatcatatacgtatctttaggttgtggttggtaatccatgaattagaacgataaactgattttgcgattctgtcaattagttattgataatttaatttatgttttgttatttcacaatttatttgacaaaagtaaaagaaaatgatcatcatatatacatcataaattttcagtccagttaagaaaaggaaagaaaaaacttcatttcattctaattttgaatattactctaagtcaaaactataagtcaaattcaaattctctcactgaaaataacatatttttacttgatatatatacatcagacctacttgccaacacccataagaacgaggaaataatcatgcaactcgaagatgcaagatgttggtgatgaaaatcatcctcttgtatatgttaccatctacaatatatataaataaattactcaacatggaatttgtctcctcatcctgctattatgcaaaataagaaaatctatctgtcaaatagtagaattacaagcacaaacgattttctatttattgcttgtacgcattttacaatgacttagtcattccctattcatagtgattcaaataaaatgatcaatcatacataactagataaccaaaaatccaaaatcagtatattgtaatattgttatttgtcgagattgatcgtatattacacatcatccctagcctttttttttgcatctaatgactccacaaagcaccagcagataaaaaaactcttcgagtctttacttgtacgaaccttataaacaattattcatgtttttttttaaaaaggcaaaagaaataaccaatagaattgtagaactagagatacaaatggaaaacaccaaattttatcccatctcaaaagcaggagagtaaggtccccccaattatattgcacacacacaaatacaacttccccaaactctttttctttctaataagaaaaataatttttatatttagcaactattatctaaatgacccaattatgtgatcttatgactctatgatacttatctatcgttttacttaaaaaattatttaaaagacttaacatttgttttattatttgcgcctataaatagctagcgaccctctctcaaccccttaactcacacatttagcatcatcaaggatcgaaaacattaagtagctagttaagagagagagagagagatg

SEQ ID NO: 6966 - DNA, 3000 bp, Unknown
  misc_feature (1)..( 3000): cDNA_ID_1816348_gDNA_ID_1621119_Annot_ID_56251 3000 nt of promoter + ATG
agaaagtgctttcccaatcgacatcttcaacttcggtctcgagggtatctaaacctttggaacgaagcatttctttgaacttttgttccatatgtttcttgtagtgttcctttgtcatcctctcaatgttgtccattagatcatatggtagtccatggttcaccagctgaaataacgaaactttgaattgtaacgtccattttcggaaaaaaaaaatgtaagggaaaataatttgattatttttcaaaataataggttttatgtatatgataccaaagaatatctaagaaagaacctaaattccctgataatcaatcagcaagagaagagagacaagaacctcgaagaagccccagttttgacaagcatcgtcgatcaaagccatggtttggtctctctcttcaccattgagcttagacaagtctataactggaaacttaatgttcatctccatctctctctctctctcttaactagctacttaatgttttcgatccttgatgatgctaaatgtgtgagttaaggggttgagagagggtcgctagctatttataggcgcaaataataaaacaaatgttaagtcttttaaataattttttaagtaaaacgatagataagtatcatagagtcataagatcacataattgggtcatttagataatagttgctaaatataaaaattatttttcttattagaaagaaaaagagtttggggaagttgtatttgtgtgtgtgcaatataattggggggaccttactctcctgcttttgagatgggataaaatttggtgttttccatttgtatctctagttctacaattctattggttatttcttttgcctttttaaaaaaaaacatgaataattgtttataaggttcgtacaagtaaagactcgaagagtttttttatctgctggtgctttgtggagtcattagatgcaaaaaaaaaggctagggatgatgtgtaatatacgatcaatctcgacaaataacaatattacaatatactgattttggatttttggttatctagttatgtatgattgatcattttatttgaatcactatgaatagggaatgactaagtcattgtaaaatgcgtacaagcaataaatagaaaatcgtttgtgcttgtaattctactatttgacagatagattttcttattttgcataatagcaggatgaggagacaaattccatgttgagtaatttatttatatatattgtagatggtaacatatacaagaggatgattttcatcaccaacatcttgcatcttcgagttgcatgattatttcctcgttcttatgggtgttggcaagtaggtctgatgtatatatatcaagtaaaaatatgttattttcagtgagagaatttgaatttgacttatagttttgacttagagtaatattcaaaattagaatgaaatgaagttttttctttccttttcttaactggactgaaaatttatgatgtatatatgatgatcattttcttttacttttgtcaaataaattgtgaaataacaaaacataaattaaattatcaataactaattgacagaatcgcaaaatcagtttatcgttctaattcatggattaccaaccacaacctaaagatacgtatatgattttggtcctttttggattataaatcaactttgttaattttgggaaggaagaagattaacctgatcatttttctgtcaaattatcttgatcattatgaggttgcttcttcgataataccggttggccttggccagctaatataattacaataagttatctttggattcttccataatagggaaaaaatattcctcatagtttaacaaatcaataaaaacctttaaatcaaatgtttggtaagaaaagtatacattatatataatttaactaaagttagaaaatattcccaaactcattaagaagtgaaactaaaataaaataagtttaaaatgatagtactttctctttatgtacgaaaaacaacacaatatacgattaattacttccaagttgtaatagttgaggttataatacctttcttttttcggaaaagggttaaagttgaggttataataattcgtgccacaaaaaatcttgtatcaagtaacaagaaaataaatcaatctttatctctctcgtatcttgtgaaattaattgataattgataacaaaaaatcagaaagaaatacttcggtcggtggctactactacctacttttcttttagtgatcttagcccaataacccccatgcgagcttgttatttctttcactaattgaaaagttcttttttttgtcaagtattaatttacaaactatatatctatcgaaattcggatttatctagacttattatgaacaaaatacttactttcaatggtaacgttttaattttttaaaaaaattcagatttatgcttacaaaacgttcatatataccgtcttcttcttactgttcaatgtcttgattgattttttggtgaaagtaaactatggaattacatgtctttttaaaaacttatggagttatacacacgcatgcattttcattaatacaacactaatttcgttataataaaatgcaacagactaggctatattgtgtttggtttggtgtctacgcaaggcatgtgtactcgtcgcatacaaaacgtaaaaatagacagcaaaaaagaagctagctagatacgataatctcaaggctcaaaagcccaaaaattaaattgggccttaaagttccgaacatcatagaacaggccattatacaagatatccctaaaataccctttgccttgtaggatgagtaaattaataaaggaattgactattaaacccttgggtcagagtatatattcacaccaaccccaatgcggagacctcgaagtgaactccattgacgacgagtgaacgaaaggagggaagaaaaaagttaggttcgaaacgaaagtaaactagttaggtgaaaagcgaaacaacacccacagagca

SEQ ID NO: 6967 - DNA, 3000 bp, Unknown
  misc_feature (1)..( 3000): cDNA_ID_1974557_gDNA_ID_1621119_Annot_ID_56252 3000 nt of promoter + ATG
actatcattgtaagtaaatgtttaacaaaatttcttgaagttgcatcatttctattgtgccctatttgtttacatgctgtatcacattttcattgcagttgtaagacttatgggtcgtgctgcttcccacattacgcttgagtgtgctttacaaactcacccaaacataaccattattggagaagaggtaacgtttttggttgacttcaattcaaattaccgtaaagatatctgaatcttaatcgtgtagatgatagaattagactgcaaatcagattcatatttgtgacacttttccattgaagcaaattattcatttcaatatggggttattggttcagagagacctcacacatgcctcattagatcagtttatatttactcaactttgatctggaaatacttttttgcaggtttctgcccagaagcagactttgaagaatgtcacagactacatggtggatgttatctgcaaacgtgctgaacttggttacaactacggtgtcatactgattccagaaggtctgatcgactttattcctgaggtgtgttgtcattgtaaaaaaatagaatctactacttttaaaccgattaatataattgttcttcttaactgatgattaattttatttcatgacttctcaggtccaagagctcattgctgaactgaatgaaattctggcaaatgaggttgtcgatgaaaatggtttgtggaagaagaagctcaccgagcaatccctgaagctgtttgatcttctgcctgaagcaattcaggaacagctgatgcttgagagagacccacacggaaatgtccaggtaattgatcatggtcctgtctcctcgtactaaatttccaccacaatgcagttagcttcatctctcacaaatcattattaataataccatgtcctcatctcaataggttgctaagattgagactgagaagatgcttattcaaatggttgaaactgaattggagaaaagaaagcaagctggtgcatacaagggacaattcatgggacagtcacatttcttcgggtaagttacgcaatttgttctttcagttaaccaaatcgttatataatacattgcttatttattgatgtgaataatacaagcttgatttatggtttgtaatcaacttgaatacaggtatgaaggaagatgcggcttgcccacaaattttgatgccacatactgttatgcacttggttatggcgctggagtactcctcaacagtgggaagaccggactaatttcttcggtttgtactccaccatttccactaaaatctgttttccatctgtgatcataatagcctttggtaaactagtatgtgcttagaatgagatgagttaacttattggcgcaggttgggaacttggctgctcctgtggaagaatggactgtaggtgggactgctctcacagccttgatggatgtcgagaggagacacggtacagaaatataaatcaataaagcttactaagacacattttgaaatctagatattaaaaaatcagagttgatttcaacttgcaggtaagttcaagcctgtgatcaagaaagcaatggtggaacttgaaggtgaccctttgattcccttcccttttcatagttttcgattggcggttagattgtcttgctgactgtctttttgagctctgcaggtgcaccatttaagaaattcgcatcactgcgtgaagaatgggcattgaagaaccgatacatcagcccaggtttgttgcatgtttcttgtctttttttgacaaaccatctgttgtgtttcagattctaatccctttgcgggaatgttatcgacttgcaggtccgatccaattcactggacctggttcagactctctcagccacactctacttcttgaactcggggctcaatagtctctcgactaaccaccattcctttgcttttctgccttccttggaatttcgcatcagtcttgttttatcttgaatattacgtgtccgtaacatttcgattaagttgattcctctcgtgtttcttcaacatataagataattataatattatttctctcgtgtttcttcaacatataagataattatactacatggtctaaatttactacaaagatctaaagtcggagtctgtctagaaaaaagtcctttgcgggtctattaggaaaatcgtaagctactttttgtcaacatatgcgttacttgaatttttatgatgtttttaaagtacaaatttagtttaaggctaattattgtttcaacacactaaaagtcctggtaggctctatatacacatcaaggtcagattctaattttaatacaaagttctaaagtcagaattcaaatttaatacaaagttcttttggtttctattaggaaaatcttaagctactaaaatcaacatatcgttacttgtgaggttaactgttaaaccaccttttgcttaccagtaaaccctattaaaagaaaatagtaaaacctaatgctggtaggttctagagatacatcaaggtcattttcatatcaaattataccggtaggttgctttgttaacgggtctattatttgcttcttgaaagcaaaacaacacataacttttacatgtatgttaactgtttatagatcctaacttagcaagtgaaatgatatttcaagtggtgccttggtggaatgttaaattgtgataaattaaagatatttataagaagaaataaaaaacactaaggttgtttctgttaatagctaaactataggactaacattaaacgttaatgatgttcgaagttttctaacgaagagaataacagacacactgaaattcaaataatctctctctctctctctctctctcactatcttcgttaaattcggcaaagctttcgctttcttatttatggaaatttctttcatcctttagtttagtctctctctctctcccttttttgtcaattcagagacagagaggagagagagaccaagaaaaggagacttttgttgatc

SEQ ID NO: 6968 - DNA, 3000 bp, Unknown
  misc_feature (1)..( 3000): cDNA_ID_2044033_gDNA_ID_1621119_Annot_ID_172014 3000 nt of promoter + ATG
ggtccaaaaccaagaaaagcattagaatacttctcctcagggatatctcttttcctcaacagcttcataccaaagacctcagtgtaaaacctggtgagacaaataaagaatatcttaaaatgtaaaataactcctgttacagaaagataaagaataaggtattaatgaaaaagaaaaagacatactcaatggtgcgatcaagatcaccaacgcggtagacaacatggagaaaacgacggttatccttcttaggccattccaacaaatcagaagcctcagccatgtttctagaaagaagaaaacttgattcagctgctctcattgaaacaaaatgtacattacaaatcgagataaaacattgacacagcctcaacatagaggcggaagcaatctcattcatttcccctataaacttgctctctcctgataaatttaacgaacaccatcaactctagatttacatttaccaggattcttataaaacatcactaatctcaacttcataagcattttcaacccaaaaaggtctcaactttaacatacccaaaatcatgatgcaccaaatatgaatcttattataagttcgccgctattatataatcgcaaaacgatcaacaagaacgaacggaattgtgatttctcaatgatcatcacaacacaaagaacaattacattctataaaaatcccactaaattatcgatccacgaatcctgtcctaaattagatccggaaaacaccggatcgctagaataaaattccactattgaatcgagaaaaaatgattaagaatcacaaaatctagaacatgatcaacgaaatgtttagaacttgatcatatctgcaacagtaaacacacctgggaagaagatgtacggtacaaaaaagctaaaccactctcgagtaggtgagtaatccagtcattgttggcacaatcgtcgtcacttaaataggagtttgtagaaactttgccgacaatgtctttgctactgcctgtgacatagttagatcatcacagacgcgttacaaccgatggatgagtgtattattgtgaaaatatggtgaacgaccgttacggttataatctaacagccgtgtcatgggatgacacgtggcggcgtgaaacaggtgttaaaaacatgcttctgtaaaccgtctgtttacagtgtgcgacacagactcgagcatagagaaagaatctcattcaagtagaatcgtgtttcatgtgattttggaaaggcattagccaaggcccacacaaaattgtgaaattagaatttagcgagggagtgaagcccatcagtccgtgaaatgggatctcagcccatttagaaaatattttatttcttttgtttatatatattttctggtgttttgtatgaaatttggacgatgtcttattcacgacacatcataagctttctttatcgacatgtttggttttgaaatggaatcattttcttcattcttctttttggcactaccataaaaagaaggctttttatgcattaaattttaaaagtaaaaacgataaaattggcttcacattgaatcttttgaagccatgcgtagtgtataccgagactacattatgaaaacgacacacctcttagcaatgcggtaacggattgtaaattttaaaatcaaaccctttgtataatttcaatatatataactgtagatttaataattcctataaacagacgaaaaagtgtcacggttcattgttattttgttttccgtaatgaaaatctgtttattttatttatataaaggagataactaaattgtttcaggagattggcatatactatagcatataattcagtgtgatttcatgattcaaagagtgtttgtttattgacatacatacatacagaaagctttcctctttttcagagtttgtttctttgtttgtttaatctgttatcttatgttacatatggatctctatgttagtatgtttgttgggttgctgtatttttttttttttgtcctctctttcttctcttgctcgactagaaagaagtctacaactttacaaaagagactatgtaaaagtgatacaaaaagagaaaatgtattcattttgtctaacataatttctttgtatataagttccctttaaacagtttagtcggtgcaaaaagattcaggctaacaatattacttgttacgttttcttgagacatctatttttattttttttcttgtattgtttgagatgagaaaaagtgttatcaacaaataaataaaatgggccattgtcttcttgctgttcagcggaagcatgggttatattgtaattctctgtttgtcaacttgtaattcaatgtgtttgatagatatatttcaatgaccggaaaataaatacatagagaaaacacctacataatataatagtataattcaactaaaggccattgttatatgctttcaattgtccacttttattacatgtggtcaacaccaacatcccatttccaacccaatatacaaaaccaaaataataataaagaataatattttttattttattttatcttaattgtttgaagaactattattttagacagagtctttttgtgtacaagcaattcaactttatttaatttggttttttacaaaatttatggatgaaagaaaatattccaaatggaccaaatctattaaagattacatagtgatgcctagctggtgcttttatcggaattcaagggcattacggtaaaatatcacatatggtctgaaaaaaaaacagtttgtgtggggaggagcgagcagagtcggttcacgtgaaagcacagagacataaatctttctttcacagcctaaaacccctaaaaatgtctaatctctcttcttcttctccgtttctctttagattatctcaaccatacagccataaatccatcggaagaggaggaagataatgcaagaatcagtcgctgagtctgaatctgaaggggaagagttgcacaataagctcaagctcctcttca

SEQ ID NO: 6969 - DNA, 3000 bp, Unknown
  misc_feature (1)..( 3000): cDNA_ID_1013977_gDNA_ID_1621119_Annot_ID_172012 3000 nt of promoter + ATG
aaaatcgaaacttggcaatgatttctaactaaggtttaagaattcactaaatgggttttgtctagatttggattcgaaacaaaagaagtaatatttagccaagtgttaactcaaaaggagaccaaaaaaacaattttttatttgaaatatgtaaaattcgtcaatttgggggaatttgaactgaaaagtggaattgtttggtgaacttaccagaaatcaaaagaagagtgaagaagaagaagagaacaggaacggtggaaaccatgctagtgaaagccattgaagaggagcttgagcttattgtgcaactcttccccttcagattcagactcagcgactgattcttgcattatcttcctcctcttccgatggatttatggctgtatggttgagataatctaaagagaaacggagaagaagaagagagattagacatttttaggggttttaggctgtgaaagaaagatttatgtctctgtgctttcacgtgaaccgactctgctcgctcctccccacacaaactgtttttttttcagaccatatgtgatattttaccgtaatgcccttgaattccgataaaagcaccagctaggcatcactatgtaatctttaatagatttggtccatttggaatattttctttcatccataaattttgtaaaaaaccaaattaaataaagttgaattgcttgtacacaaaaagactctgtctaaaataatagttcttcaaacaattaagataaaataaaataaaaaatattattctttattattattttggttttgtatattgggttggaaatgggatgttggtgttgaccacatgtaataaaagtggacaattgaaagcatataacaatggcctttagttgaattatactattatattatgtaggtgttttctctatgtatttattttccggtcattgaaatatatctatcaaacacattgaattacaagttgacaaacagagaattacaatataacccatgcttccgctgaacagcaagaagacaatggcccattttatttatttgttgataacactttttctcatctcaaacaatacaagaaaaaaaataaaaatagatgtctcaagaaaacgtaacaagtaatattgttagcctgaatctttttgcaccgactaaactgtttaaagggaacttatatacaaagaaattatgttagacaaaatgaatacattttctctttttgtatcacttttacatagtctcttttgtaaagttgtagacttctttctagtcgagcaagagaagaaagagaggacaaaaaaaaaaaaatacagcaacccaacaaacatactaacatagagatccatatgtaacataagataacagattaaacaaacaaagaaacaaactctgaaaaagaggaaagctttctgtatgtatgtatgtcaataaacaaacactctttgaatcatgaaatcacactgaattatatgctatagtatatgccaatctcctgaaacaatttagttatctcctttatataaataaaataaacagattttcattacggaaaacaaaataacaatgaaccgtgacactttttcgtctgtttataggaattattaaatctacagttatatatattgaaattatacaaagggtttgattttaaaatttacaatccgttaccgcattgctaagaggtgtgtcgttttcataatgtagtctcggtatacactacgcatggcttcaaaagattcaatgtgaagccaattttatcgtttttacttttaaaatttaatgcataaaaagccttctttttatggtagtgccaaaaagaagaatgaagaaaatgattccatttcaaaaccaaacatgtcgataaagaaagcttatgatgtgtcgtgaataagacatcgtccaaatttcatacaaaacaccagaaaatatatataaacaaaagaaataaaatattttctaaatgggctgagatcccatttcacggactgatgggcttcactccctcgctaaattctaatttcacaattttgtgtgggccttggctaatgcctttccaaaatcacatgaaacacgattctacttgaatgagattctttctctatgctcgagtctgtgtcgcacactgtaaacagacggtttacagaagcatgtttttaacacctgtttcacgccgccacgtgtcatcccatgacacggctgttagattataaccgtaacggtcgttcaccatattttcacaataatacactcatccatcggttgtaacgcgtctgtgatgatctaactatgtcacaggcagtagcaaagacattgtcggcaaagtttctacaaactcctatttaagtgacgacgattgtgccaacaatgactggattactcacctactcgagagtggtttagcttttttgtaccgtacatcttcttcccaggtgtgtttactgttgcagatatgatcaagttctaaacatttcgttgatcatgttctagattttgtgattcttaatcattttttctcgattcaatagtggaattttattctagcgatccggtgttttccggatctaatttaggacaggattcgtggatcgataatttagtgggatttttatagaatgtaattgttctttgtgttgtgatgatcattgagaaatcacaattccgttcgttcttgttgatcgttttgcgattatataatagcggcgaacttataataagattcatatttggtgcatcatgattttgggtatgttaaagttgagacctttttgggttgaaaatgcttatgaagttgagattagtgatgttttataagaatcctggtaaatgtaaatctagagttgatggtgttcgttaaatttatcaggagagagcaagtttataggggaaatgaatgagattgcttccgcctctatgttgaggctgtgtcaatgttttatctcgatttgtaatgtacattttgtttcaatgagagcagctgaatcaagttttcttctttctagaaacatg

SEQ ID NO: 6970 - DNA, 3000 bp, Unknown
  misc_feature (1)..( 3000): cDNA_ID_2044045_gDNA_ID_1621119_Annot_ID_172008 3000 nt of promoter + ATG
aatttaagaatgtataaaaccaacaaaaatatgtttaagaatgtaagttttgtgtatcacatcccatgttttaaggttgttaggaatctcacatgcacattgaaaagagactaacactaattaatgtacgagagttgattgatgctatgtttaatctctttgtatacaaatacatatcgtttgacatagaaatacaaatacatatcgtttgacattgtactctttgaaaagagactaacactaatatgttagtaagactaatttatatttagctacattgtactcaaggtcctatatccaaagttttatctgcatttattgcacacttacattacgtatgtgtgtgtatacataacagcctatatatatggtcttgtaacacagctcagggattcaccataaacaaaaagaatttgaaccaacaaagcaaaacatgaaaggcacattcactaacttgcttgtgctccttctcattgcacttgtttgtgccaatgtcggtgctaggaaacttatctccgaagatacccaattcaaggatgaaaaatctttcctcggaggcggtggcagcggtgatggcttagggcttggccttggtggaggagctggtcttggtgggcttgggattggggctgggatcggcgcgggagccggactagggttaggtggaggcggtggtggactcggaggtggtggcggtggactcctcggtggaggcggctttgggggaggagccggtggcggactcggtggccttccttgaacgtattgacaagtgtgcgtgtgagagctgattctcagcttattactaattaattaagttactttcattctcttaataaaatctagagggtttgaatttcggatttcttcagctttaatttaaacttcaatatttgaaccaaaaaggtcttgctactagaggtaatgctcgtaatcgtattatgtgtaacgccggttctgatattcttaagtgcaagtgtggaacgtttctcttttattcactatatagcattactttcttttttcttgtttatatatcgctaaacaaaatgtatttttaatttgttttgaacaagtgtagttataacgccgaaaaacgattggaagaagtagcatataacaaaacaagcttatattctatccgaagtaggaagagaaaaagaactatatatggattgtgatcatgacccctcctcatatataaacaatgctatgcttacattcttaaacatgtgattttagtccagtggtttcatctttactgtcatgacatatgatcataaatatttttgcaagaggcacacatttaaatttactatgtatatagttattcctacaactaggttagtgaatggagatgccgtgatggttaaggtaattaataagatcaaattaaccgcgactaaaacacaataccattatttttggtcccaaacccaaatcatatttttatacatccatgagacctagatatgaagatcagatccggtctagccttgtataaaaagtaccactatactaattattcttcttcctcttcctcttgtgtttgttcttgttcacgtcttccgttagtagccttttttttttctctacaaggttttagatcttattagggaaagtgggaaacgaaaccccatgattctagagattagaaatcacaacgttatcagatatataaaactgagggttcacaggaaaccatttcgacatctgcttggaacaaaaaatgcataaggggtcaaaattacccaaacaaaactacaagtgagaaagggaaactacttgtggctagaggttgttaaaagacaatgacaaaatctattgaaggggttcgttttaatgggcctggtgaaatctcaaacccatcttccccggcccggtattacccaaaagaaaaaaaacagagagggcaatgagccgttctggttttcgatagagcgagagagaagatagaaggattcagaaggaaagtgttcgaaatgccgatgatcacattcacgttattgatggttgcatagaacagaagatcacaatgaacatacaatgttaagtcacatataagcaaacaacaagttttaaagcagcttcattacccatagtagttgattttaaatatatttcttgaatacttgataacttaagaatcaaaccgtgacaaaggaaatgttattttgaatcctgtttcaaatttaagtcaatgtactgtattctttttttttggaataataaatggataaaaatgtctacaactccaacatttgatgaagcaaatgttcctttttcatttttggtgatctacaatacctaaaagtttatttagatttttataaaattttgaaaaataagaagataaagattgaacaattacttaccactcaatggggatgcggttgctttggccttttcttcgtttggctgatgatgattcctcttccatcaccaaccccatctctttcttcacttttttaattcacaaatctctatttttaaatctcattaatcctacctaaatataaatatataaagtcccttttgccattgatagcaacaaaatcatcaattaatttgcaatataacacacacttactactacatagtagtttgaggaatctgggaagaagctccagtggcaaagactcaacatttgtaagatttctacacaacccatttcagtttttatgttttctattcacagattatttcgattgcagacaacatttgttttcttcttctttctgataatacgattttcgattcgatctcattgcgattattaagttttctgattgtttcagatgctatattatgaatcttaatctgatggttgaagattcatagatttaaaaatgctatctttttgcctatagagcctttatatgaatctcctttcttcattccatagcttaagagtttatcgaatccagttgaatttgaaaagatgcatttttggttattgattttgagtgttcttgtatcaaacttgttgtgtagaagatg

SEQ ID NO: 6971 - DNA, 3000 bp, Unknown
  misc_feature (1)..( 3000): cDNA_ID_1816304_gDNA_ID_1621119_Annot_ID_172007 3000 nt of promoter + ATG
acccatagtagttgattttaaatatatttcttgaatacttgataacttaagaatcaaaccgtgacaaaggaaatgttattttgaatcctgtttcaaatttaagtcaatgtactgtattctttttttttggaataataaatggataaaaatgtctacaactccaacatttgatgaagcaaatgttcctttttcatttttggtgatctacaatacctaaaagtttatttagatttttataaaattttgaaaaataagaagataaagattgaacaattacttaccactcaatggggatgcggttgctttggccttttcttcgtttggctgatgatgattcctcttccatcaccaaccccatctctttcttcacttttttaattcacaaatctctatttttaaatctcattaatcctacctaaatataaatatataaagtcccttttgccattgatagcaacaaaatcatcaattaatttgcaatataacacacacttactactacatagtagtttgaggaatctgggaagaagctccagtggcaaagactcaacatttgtaagatttctacacaacccatttcagtttttatgttttctattcacagattatttcgattgcagacaacatttgttttcttcttctttctgataatacgattttcgattcgatctcattgcgattattaagttttctgattgtttcagatgctatattatgaatcttaatctgatggttgaagattcatagatttaaaaatgctatctttttgcctatagagcctttatatgaatctcctttcttcattccatagcttaagagtttatcgaatccagttgaatttgaaaagatgcatttttggttattgattttgagtgttcttgtatcaaacttgttgtgtagaagatgagaggtgggagtctatggcagctagggcaatcaataacccgtcgtcttgctcaatctgacaagaaggttgtgtcacgtcgctactttgcctctgaagctgacctgaaaaagactgctctttacgacttccatgttgcccatggaggaaagatggttccttttgctggttggagtatgccaattcagtacaaagattcgattatggactcaacggttaactgcagggaaaatgggagtttgtttgatgttgcacatatgtgtggtttgagccttaagggtaaagattgtgttccttttcttgagacacttgtggttgctgatgtggctggtttggctcctggaactgggagcttaactgtgttcacaaacgagaaaggaggtgccattgatgactcggtgattaccaaagtgacagatgaacatatctatttggtggtcaatgctggctgtagggataaggatttggctcacattgaagaacacatgaaggctttcaaatccaaaggaggtgatgtctcgtggcatatccacgacgagagatctcttcttgcccttcaggtttggccattataagattcttctcttggtttgttctgttattgctgaatacttgtatatacagttcatgagttatcttgaaccttgtgatgcagggtcctttggctgctccagtgcttcaacacctgactaaagaagacttgagcaagctttactttggcaatttccagattctggacattaatggttccacatgtttccttaccaggactgggtaaaatttcatgtttcactatctgcttctagtcagatttgcttggttcaagtagacaatagctcaagaggaaaagttctgaagatctcataggtaatgaatgtctctgttttggtttttcaggtataccggggaagatgggtttgagatttcggttccagatgagcatgctgtggatctagcaaaagcaatcttggagaagtccgagggtaaggtaaggcttacgggtctaggagcaagagacagtctcaggttagaagcaggactttgtctatatggaaacgacatggagcaacacatttctcctgttgaagctgggctcacatgggccatagggaagcgtagaagagccgaaggtggatttcttggcgcggatgtgattctccagcagcttaaagatggacctacaatcagaagggtcggtttcttctcctcaggaccacccgcaaggtcgcatagcgaggttcatgatgagagtgggaacaagattggagagatcacaagtggagggtttagcccgaacctgaagaagaacatagccatgggatatgtgaagtcaggtcagcacaagactgggactaaagtcaagatcttggtccgtgggaaaccatatgaaggcagcatcacgaagatgccattcgtggccaccaaatactacaaaccaacatgaaatgtgtgtctccttcgtccatgactttgtctcttgcttctgttaaatgacttgtgtttttcttctgttctgttttggcctgaaaaatgtacgatattttgccaagagggcattgcttatttcatttttattgaaataaatttaacacatgtaatagtatcagagcccatggttttaatgtgtctcgattgtggatcacccgtggatgtccagtcctgaacgtgaaggatgtgtgttagaaattagaatatgtctctcatatgtatatataagtatgtgaacaagaacaagaggaagaggaagtggaagaagaatgataagaagacgaaggcccttgacgttgttcataagttgtaataatgcagaattggattaactttcgtcttcctcttattcttcttccttgtaaaagtttcaacaacataagatagaattatcatacttcatagttcacttcatacatacgcaaaacgttgtcgtttttattgaggagagatgtcaacactgaatcataaagaaacacgtggcaagtcaaaccagttaacagatccaaacgacaacgtttaaatagcaatccgcaaaacagcagaagataaaactaaatcgtcgtcgtcgtcgtgtcttcttcgtcagcagagaagctccggcgatg

SEQ ID NO: 6972 - DNA, 3000 bp, Unknown
  misc_feature (1)..( 3000): cDNA_ID_3049419_gDNA_ID_1621119_Annot_ID_172006 3000 nt of promoter + ATG
cgaccatcggtttatgtctaccgagctttaatcgattgtctgaagaagtcaggagattttcagagtgcattgcagctttcagatgagttgaagaacacttcctcattagatttggctggtccacaagattttaagagacatttgaggtcacatagacgctaaaatagcctgtgtaaactcttcagattttgttagatatatgtatgaaatcaaacccaatccgttttactttaattgtggttctaattcaatttaaaagaagcctgagaaaatgacaatgaaggtttgaaaagagtataatggatgatactatgaccagtctcataaagtttgcatactacagaagtacaaaatgtgtcaaagtttctctttgaaagaaagaagatattttgggtgccggaatctgagacttgagtccggtaggggaggtcgacatatgtctggagaagtccgctaaattacgaaaatagccttagattcctccttttttttttaccatagcttgttcttgacccagaaaaggaggaagactacaccgaacacaattgcgactggtgcccattttcggatcaaagcctggtcaaccaaattcaatgtttcataaccatatgttaactatctaagctacaatatgtcaagctcacaaggaatgagagcatctcatagccgtgtgatcaatgttgcaatgtgtaatataaggtaatatacaatcaaactcacctgacggttcaaatctttagccttatcagcatatatacgagattcagatgttaaccggctcgacatctcgctcacctctgcattaagaaaaaacaagaagagaaaatggcaaatgataagcatattgctcagctgattataacaaacgcaaaactagtgttccatttctccttattctaaaagcttaaataatgatcataggagaagtaatggatgttgacttacggtccagcttttcaccaacacctaagacttcttgcacattccgggtcattatttgatgaacctcatagagttcatcattcaacttggcgatgtttcgttgcgtacgagtgtcttggtacagtttcttggttttctgtatgaatgtatctacaaaaaaaggcaaagtggaaaaagagtgaatccagagaggtatgtttccaagatactgaatgtacagaaaaatctacactacacataccaaatttaataaaggcataaggccgagcagctgtttcaatgttaggcccattgacacgttcaaattcattcttgagatcttccaggtattggaaagcgagtttctttgggtaagagcggtcacacattgtcaagtagcaaacacgtccttctatgatgtaactaaagttttctggtcaaggaagcatacatatctggtctttcttaaactttagctttgagatacaagcatactaatatgacaacgtagatttcaaacataatgcaagaggattgaaacgtgtactaagccaaaaactggtaaaaatgtacaaggatgtcaaaagtgtgaatcttaagtaaatcaaagtaaactttctacaatccttattatatctatcaatcaacaaacttttgcagcagaaactgaactaataaggaatgaagaaaaaaccagaggttaaggatactggaaaacataggggccagtttcaacggacattcttgaagcgtcattttgacctctggacagattcttaaacaaagctttgacctgttgtttatacatatctgaatccggtaagtcacgtccatcatcgagcccctcagctagaggtaacccatcagtaacacgagctatcaatgtcattttcaccatctttgccttattacttctccagtaataaaaattcactgcaattatcacaaatttcaaaacaagaatatgaatcctgcaactcactaaaatcacaaaaccaatatttatcatcaagacagaacatgtaagccaggtaattgaaacacagatgcttaaaacttgggttctgtaagaacacacaatactctaagaagatgaattattttgatttttcaacaatgagtgttcgaaatagcttatctctatttgcattcagatattgaacaagacgaactattcaaacgtgagattcaaatatagcagagaacatcaacctcaaagaaaattctataatcaaaagctttcgttttctacattgtgacaattcaccaccatcaaatccaaagtttataacgaatttcagcataatccacattcatcatctacggaaagaaaattaacgatctaataacaacatcaatacaagacatcaaacggaaaaattgattcaagagctacacagtaaagtaatatcttcagaacgttctcaaagttccgatcccaaacggaagcaaatctcatacaaaattgaacaaatgtaaaacgtaaaattagacttgagcatggatttagagaaacctgataggagatttaaaattgcttctgctcgattcaaagatctgagaaccagaggaagacgatgatcgaaggaaagagaagtaatttgttttttttttcaattaaagggtttatcaaacaaagggactaaatgattatttattgattttcttttctttttttgtctgttcgaaatttaatttatggcgatctacgttttgcgattaccaattaccagccctcacgtgattgggcttatgacgcgttttgttgacatgtcttgatgacgtggctcgtttaattagcttcacaaacgctacattcatcttagcgtttttaaaactggattgaaccgatcaaagcgtcttaatgacccggataataccggaacaattttctaaaaccggtgactttcccttttattgaaccgaccggttcatttattaaattgaaactctcttttacatttagagagtaacacattcttctccgacgagaagatcgaaaatcacaaatcgtcaccggactcttgcaatcgagaaccatctgtcgcctttttatactcgaatacgagctcgtgatca

SEQ ID NO: 6973 - DNA, 3000 bp, Unknown
  misc_feature (1)..( 3000): cDNA_ID_1022478_gDNA_ID_1621119_Annot_ID_172005 3000 nt of promoter + ATG
cgatatgaagagctcaggccgagacttcatgtaactcataatcgaacacacagctaaagagagaattggggatgcgagcagaaagtttgggagctgcttaaactgaaagtatttaaggaaacctactcccctgtcagaaacaagaatctctaaatcaaatataagaaagaaaatttacaagaacaagaaaaggtttgtgttcaaagtattaaccaataatgactttgaatgaagttatacagcaacggaatccttcctttgcaccaaggcctcacttcatcacgcgtatgtccatggcagatgttatagtatccgtatgcttgaaatgcgacaaaaggaagacaaatgcatatgcatctaagaaatccagcaataaaaacctgcatagctaactgggtagcgagaagaatcattaggctaccatacctttaaagagttgacagcaagttaaagagacaggctttaatcattacatgattaaccaagcagatgtgatttgagacatactaaatcaagaaactattccagtgcaaccatgaactaaagagcataccagcagaacagttaagtaggaatccatcagatagagatataaagaacaaagtaactaaaaattgttcgagttctccttttctatcttctagaaggatcttaattgtaggaaatagaatgtttcagattaagcatactaccgaaaaaatccggagtttgaattgcagcaatagttctgaaatttgaatgaaatatgtataacttacataagcacgccgtttctgatataaagcttcatatgctcgatgcattgtctggaaacagatataaccagcattaagaattccattggaccttgcacagcctgagagagcaaaccaaagaacgcctacattgctggtaccagataacaagtgatacactcctccaatagagaaaagagcatacaaactttctgaatatctgaaagtcacaaagaaacagtttggtcttcagttagttaccattctgataagactgaacatatttactttcagcaaatgaacttaagagatcattggcttaaacacattacattgacgaataaaatatggacgccggattgaaacagaagataatcgaagctctgaatgatgcttcagtatccttcaagataataactgaaaccctgttagcaacgactggtgtaagacacggtgaatagcaaacagcattagcttgtagagctcaaaagactcttgacttgacttatttctagacacaataatcgatttaggatgaatgtcaaagaagtacctaaatagatagatagcagcaaatatgaacgccaagttactaacagtgaaaccagacaacaccatcacagctcgaagaccaatcaatggaaccaaaggcgcaaaaactgaatccaaaaagaatcagttactaccggaatgatacaaccaaagtaaggaatcaagtgggtagatgtctaaattacaaaacctgtgcgagagagaagcgagatgaagaaaggaagcagaggcaagaaggcgtaagtctgctcatactcatagccacactctgtgattcggagaaaataaacactgtcccagacaacactgttctcaagggatctcgaagctgcattggctactagaaacggaaaagaatcttctttgtgatacaagcaaggaggattcagtgcagcggatgtatcgtacggttggagtaagctccgccacaaaatggttaagaagagaacgagaagtcgcgagaagatggcgtatttgatcaagatggtttctttccttgatttcgagtttgattccaaagctttcgccattgatcacgagctcgtattcgagtataaaaaggcgacagatggttctcgattgcaagagtccggtgacgatttgtgattttcgatcttctcgtcggagaagaatgtgttactctctaaatgtaaaagagagtttcaatttaataaatgaaccggtcggttcaataaaagggaaagtcaccggttttagaaaattgttccggtattatccgggtcattaagacgctttgatcggttcaatccagttttaaaaacgctaagatgaatgtagcgtttgtgaagctaattaaacgagccacgtcatcaagacatgtcaacaaaacgcgtcataagcccaatcacgtgagggctggtaattggtaatcgcaaaacgtagatcgccataaattaaatttcgaacagacaaaaaaagaaaagaaaatcaataaataatcatttagtccctttgtttgataaaccctttaattgaaaaaaaaaacaaattacttctctttccttcgatcatcgtcttcctctggttctcagatctttgaatcgagcagaagcaattttaaatctcctatcaggtttctctaaatccatgctcaagtctaattttacgttttacatttgttcaattttgtatgagatttgcttccgtttgggatcggaactttgagaacgttctgaagatattactttactgtgtagctcttgaatcaatttttccgtttgatgtcttgtattgatgttgttattagatcgttaattttctttccgtagatgatgaatgtggattatgctgaaattcgttataaactttggatttgatggtggtgaattgtcacaatgtagaaaacgaaagcttttgattatagaattttctttgaggttgatgttctctgctatatttgaatctcacgtttgaatagttcgtcttgttcaatatctgaatgcaaatagagataagctatttcgaacactcattgttgaaaaatcaaaataattcatcttcttagagtattgtgtgttcttacagaacccaagttttaagcatctgtgtttcaattacctggcttacatgttctgtcttgatgataaatattggttttgtgattttagtgagttgcaggattcatattcttgttttgaaatttgtgataattgcagtgaatttttattactggagaagtaataaggcaaagatg

SEQ ID NO: 6974 - DNA, 3000 bp, Unknown
  misc_feature (1)..( 3000): cDNA_ID_2044057_gDNA_ID_1621119_Annot_ID_172003 3000 nt of promoter + ATG
cttccttgaccagaaaactttagttacatcatagaaggacgtgtttgctacttgacaatgtgtgaccgctcttacccaaagaaactcgctttccaatacctggaagatctcaagaatgaatttgaacgtgtcaatgggcctaacattgaaacagctgctcggccttatgcctttattaaatttggtatgtgtagtgtagatttttctgtacattcagtatcttggaaacatacctctctggattcactctttttccactttgcctttttttgtagatacattcatacagaaaaccaagaaactgtaccaagacactcgtacgcaacgaaacatcgccaagttgaatgatgaactctatgaggttcatcaaataatgacccggaatgtgcaagaagtcttaggtgttggtgaaaagctggaccgtaagtcaacatccattacttctcctatgatcattatttaagcttttagaataaggagaaatggaacactagttttgcgtttgttataatcagctgagcaatatgcttatcatttgccattttctcttcttgttttttcttaatgcagaggtgagcgagatgtcgagccggttaacatctgaatctcgtatatatgctgataaggctaaagatttgaaccgtcaggtgagtttgattgtatattaccttatattacacattgcaacattgatcacacggctatgagatgctctcattccttgtgagcttgacatattgtagcttagatagttaacatatggttatgaaacattgaatttggttgaccaggctttgatccgaaaatgggcaccagtcgcaattgtgttcggtgtagtcttcctccttttctgggtcaagaacaagctatggtaaaaaaaaaaggaggaatctaaggctattttcgtaatttagcggacttctccagacatatgtcgacctcccctaccggactcaagtctcagattccggcacccaaaatatcttctttctttcaaagagaaactttgacacattttgtacttctgtagtatgcaaactttatgagactggtcatagtatcatccattatactcttttcaaaccttcattgtcattttctcaggcttcttttaaattgaattagaaccacaattaaagtaaaacggattgggtttgatttcatacatatatctaacaaaatctgaagagtttacacaggctattttagcgtctatgtgacctcaaatgtctcttaaaatcttgtggaccagccaaatctaatgaggaagtgttcttcaactcatctgaaagctgcaatgcactctgaaaatctcctgacttcttcagacaatcgattaaagctcggtagacataaaccgatggtcgaatctgtctctgcttcatctcatcgaaaagcctcaacgattccttaacgttcccagatcgacccaaactgtctatcaccgctgtataacttagcaaatctggttcaattccacattgaaccatttcattgtatatcaccaaacacatatcgaatctacaagctttcctcatcccgtttaacaccgtgttgtaagtaatgatgtttacagatacactacaatcttccttcatcgttgacaaaacccccagaatctcattcacaaggccagctcgtcccaagatatccaaaaccgagttatatgtgatcacatctggtttacattcccactctttcatctccttaagtatcataagaaccttatcgatctgtctagtttcagcaaatgcaaagatgattctgttcattactattaacctatacggaagtgaagactctgatatctctttaagcagactcgtcaaatacgtgcaatcatccgtgttaatgaatgctctagcaaggttgagataacaatctgaactcaatggttccttacccggcaagatcaagacctctctgaagactctacaagaaagcttcatatcgttcagctcacccgccgctgcaagaaggttcttgaaaaccgaaataggcaaacatatgttcttttcttgtaaagactgtaacaagtcatatgctccagagagatttccatctcttgtaaacttctcaacaagattcgtataatcgattttgctgatgatctttgaaccactttcactatggttaacgatcttcttcaagagttcttcctcgtcttcttctccagtgtttatcaaagagtgcataccagagaacgagcagctccagctcaaatcagctggaactaacatcatatgtttctgcaatgccaataaacagaaaaccaaatcatcaatttgcagaatcaccatcaatcatcaacttccacatataactatgaacaatgtaaatctataaaaatggatttctcagttttcgagatgactacaaaaaaactcacacatttaatcagaaaacttcgtaatcaaacactagctgaagcgtgaaagccccgaaactaaaaaacgatcaaactcagaagaacagcaatggttcgaaatttcgcatcttcatcgaatcaaacattgatagaagaaactcgctgagcagtaacaatcagaaaacaacaacgagagcataacatgaatcacgaaaacggttctggatttttggaattcataccatagaaatgaaggaacctccatagacggggattctcttaacgatcgaccacttcatcatcttcctcggtaatctatctcctctctgcttgtgacatttttcagatttttgatttctgagggaattagttttggttacaattaacacattagttaatatcgagccaatttgaaaccatcttaaacctcagggaccaataagataaatacacgaaaatttaaaaagcaaaatgttatttgacagcttattaatttcctcacgacttcaactttcctccttagtattttccgacgaggaaagttcttcaaattcgctgttgaattttgtttctcggagaaattatcaaaaccctagacgatcacattatcgcttctgagatcaaagacgatg

SEQ ID NO: 6975 - DNA, 3000 bp, Unknown
  misc_feature (1)..( 3000): cDNA_ID_1397832_gDNA_ID_1621119_Annot_ID_172002 3000 nt of promoter + ATG
acaaacttcatgttgtagttatagtaaacttgcttatttacctgcgatagctcctacgcgtttatggtttacgaggcttggatctgcagaatgtatcaaaatgattgaaaatacgtattagtactatctaatagtccctaccaaaaaaaaaactatctaatagtagttaaatagttctcaatagaaattgtagttaggacgaaaagatatgaacatagacattttgacctttgcaataagtagtgacattgccttgtttacaaaggcacaaaaaatctcgtgtcctcgtattaaacccacaaactccaccacctttagtcgtttcttggcaaagaaggcacttcattgtcactggaaattcgtaatcaacccttatcccgtactctggaaactgatcatacggtgcattctccacacctgtactcctccaatacacacttgtatacgtcgcacagtcctgcagcatgagcctaagagattgagtcgctttagggtaatacgaacaacaagaaaccctagatcccaaagcagagccacattcaggcaaatgtctgcatagatagctagaactatcgcaggacgagtcacatctatctggaaacctttcgcagaagagcggttttggttcgacgataactttatcggtgttgcagttgaagaacaagtagtcgttttgaggagagacagtgaagtgtgtacttgaatcgatgctaaaagatctagtgggtcgaaaattgtctcgatcttgacagttccacatgaatggatcggagacaagaaggtgaggatcagagtagcttatagatttaacagggtatttaccagatggtgttctaagttcgagcttggtatcgttgtcggagcaaatgagcatgtgtctgtaataagggctaccacaaccgtcgtcgatggaaaaagggtaatttatcggaatgttgccgcaagaagatctgcagagatttgattgggatgatgttgttgatgattgaagaaggatggtcatgagaagggagaagaagataatgtaagagtgaagtggagacattgttcaaaaattaggagtttagatttgattattgggtagtttttagttatgagattataatttggtggtgtgaagtgttgagtaagcttggaatgtcttgttaaagagtttaagaatcaatcttgtcatgtgcttgttaatattgcttattttaggtttcggtttgtttttaaaatttcacctttctttttagtataaagtattccaagaggactcgtggttttgtttcagattatttgaaatatttacatacaatatgtcaacaaacgtactattcttttttctgatattttacaacaaaatttgttctttaacatgttatctaaaaaccatttaacaaaaaaaataaaatgtatgagaaccttataaaatacaaaatagtaatttcagtatataatagttttgaattttcttttatttagaatttcgtttaaagggttgtgatttgtgaagtaatctttggaagataatctcaatgtaaacaacacattgggcttctcataggcccaatataaacaacacattgatcattatccatgtaaggtgaactctttaatcgaaaccgttcaatttcagtcatctcaatccaacggttagtattccaaggagcacgtaatccactctaaattcgtaaacacgtgatttctcactaaatataaaacttgatacgttacgccttcctatccatccgtcaacgattaaatccaatcgttcaatatagagatccaacggctaataacgaaacattagcccacacgaaatctcctttttttttttgacgggattatacagtgggcctccacctgtaattgtccatttaggagacagcgcggttaatttagcattatccctcctcacagtcatctctttcttcgcaaataaatgtaaccatctctcttctcgttttcttcaacaaaaatcctcatttctctgagaatctggtgctttagctttggtgagctctctttcttatgaaacttatcgattctcttctcgttgattgtcttatacttttagttctctgcttaatttattgtccttaatactcgtggatttgttcataaatcgttttctgagcagttaggtaagagttttgttaccgaatttcatgttcttcgattttgaatctggatgattgtatgatgtgattagtagactcgcttagattttgtgatctgtgtatggtttgtggctaattttggtttcatcggtggtatgaatttatttggggttttaggtttgtttgattacgtaatcggactgtttacttgaagatttatcgattatagttgtgatcgtttttagttgattgagaagaagaaaataaatttcatgctcttgttattgtcgcgattgtggcgattttcagtgtcttatgaatcaattatgttgcatgtgagtcttggtgcaattgagattgtttcctttttttactagattgcttgtcttattgaacaaaactttccatttatgttgaaaaggtttataggaacggatgtttagggttttgttgtaatctgggtatttgctttctgatttcggcaagcaaatgtcgatttcaaggtttatatcactttctctagcaaaagaagtctttagtcatttgcaaagtcaagagagtttttactttatttattgcttccacgctattgcttcgtggctgattgagagagaccaattaaactaataatttgtagtttgtacaatatattgcgtgtaacattgtccttcgttatctgtttgaggaggaggaccgagttagcctatttttagtcactttacaaattttcttttatgttgcatcattcaatatgaactctctgatataaatatatgtatacatactggttgacttttatgggtatggttctctgctttttttctctgtgatggtctcttgattctaactttctttgttttatgtttttggtttttgttgtcaatgaataggtaaa

SEQ ID NO: 6976 - DNA, 3000 bp, Unknown
  misc_feature (1)..( 3000): cDNA_ID_3049423_gDNA_ID_1621119_Annot_ID_171999 3000 nt of promoter + ATG
tatgcaaataaacaaaaccggtggactgtcacacgtatattcctcaagtggtttgatcacttatcaaactctcaatccatctttaatatcactacccacaaaagttcaacaatagagtccactatctggataattgtagtattcttacccaaagatcatgatgttttcgttatctaacacctcgaaagagctctagaacatttaacaaaccaatttctctttaaatatacaaaagagaaacttttaccttttcatcatcaacactttccacggtcacaaggttaggaacaccagctgatcaaaccaaagaattaagaatagaactcaagtgtggagttttacacccaatttagtaactcaatacaaaaaaactaaagatgaggactttgaaatagcaaagtcaatttacatagcaaaggcttcactttgttgctctgcaaattcccaatgaaatgccactctatatcttctggaagctgcaaatttcaatgtatcaatataaattcagaacttttctaatccaaaagattcaatttttaaaggattcgtagaaatcatagcaagcagagagaacctgaggtgccttctcaatgatctcttgcacataattctctccaaaagacctctgaccagcgtcgtatacttggcgaatcagagaaactggtttcgtcttactcaccgctacgacccgtatctgatccgacccacgacccgctttctccgccgcctggtttacccgctgaaacaccgatctcagagccgccacaccatcaatcgccgccgccgacatagtagaatccgccacgtgttctttgtctggctcctcttcgttcatcgaacaatcactgatcttctggtcacagctttgtgggagagaaagagggaggacagagagacggataatacgctgcgtttcgatgttttaattttcaatgaaaaaaaaaacattcgccacgtttcgaaacagaggaacaatgttgatttttccccaaaaaaaaaaggaacaatgttgatacccgtgagaagttaaacgaatgtactgttgcagatgtattgctaaattatggatgtagattaattatatacgtagttgtaaatactaaatagttttgaaaataaataccagtgggaaatatttttttcataaaacaaaaactatatcctaaaaaaaaactagaacctaataaccccaagcatcatgtgtaaatttgtgtttttgtatataagcaaatggcaattttgatttttttttcttgacaaatgggcaaagtctataaaccatcaaaataagttctttattcgtaattgattccacaaacctttgatattcattttgtcttcataagttaaatttgtgtttttgtacatttattgtcacacatcctatttaccactagtttcaaccatggggactttcatatatttctaaattctaagtctggattttaatgagtgcatggttgaagttgttctctaaatctttcatgctttttaaatccaacgtacatttaacgatccatatgtctctccacttagaaacttcgacactttatcatccctcaacaatcataagaatttcattaaggagtttaaccagtgtgcctatagcgtcacagtccgaactttaaattgcagcaatgtccttcaagttgaagggactttttgtacttgtttaaaatacgcaaatatattagggtcccaaatttattattcattgaatttatcccaccaagttaagtgtcaacgccttacttgagtgctctcagaactgaatttagtcaagtttgaacaaatatgtatataccgtgtattacggaaagtcttgtattgtacatttgtactcgtacctttttctctcctatatatttttcttagttctaaatgtattatttgcttcatggatatgattgatactacaaaaaaactagttgaataataaatatgaacgcttcaaaaaatgtcaatgtctaaccttttgacaaaaaaaaagaatgcaagtttcgtaaacatggcacataaaggctaaagtgtgtacaacaaaaagacttggtttggttcggatagtggagttccattccatatggatacactattgaacaatatctccctaaatcagtaaatctctatatagtatatacttcgtaaaaacattataatttagttgattgtttgtaatcaacctaacaatattacgcaaaaacattatatttttaaagatatattatcataaatcgtattacgttacgtttataattaaatccttaaaaacaattagtagataaatcatttgagctttctgagttaactgatcgtgttgtcaggatcaggaagagaaaaaaaatcactaacggatgcgatcaagacgttactatactagttgcacttttagctaaaagattatttatttttactttgtctctagatattattaaacttggatatctcatggtgttattctttgcaaaatatctagatatttccccttttacttatttaaagtaattaatttccttattttgtctctggatattttggagaaatttttatctccaaatatcgatgatatataccaaatcacaaaaacatctatatatctagagctatatagctaaaaacaatttattgccaaatgatcaaatgaatttcatgtgtcccacttttgttctgcctaaatttagaaatttattgtttttttttctacgcgagcctaactcgttttactcttctgaaatctaaactcttcgaatttaattgaccactccactaaaagagtcttaaaaagtcaaatatttttcttattacgacctaattttgaaagaacttcttcgttgacctatgcatcattctctcgtctataaataccattcacgtcgttcgttactcttcatctaaaaacattcatacacatacaaacacacgaaaatacatcccaattctaaaaaaattgttttttcaatttttctcctttgatttcttaaaagaagatccacaacaacaaga

SEQ ID NO: 6977 - DNA, 3000 bp, Unknown
  misc_feature (1)..( 3000): cDNA_ID_3049431_gDNA_ID_1621119_Annot_ID_171996 3000 nt of promoter + ATG
tatatgtttttttttcattatatgattgaagagtatatcaagattttggtgtgcacatgatatgtgagatttatatgtttcttattaattgaatcctacaaaaattcaattaaaacacaataaagaaacactcctctaaaactaggtcaaagttcagaatcttcatagaaccaaaagcaaccaatataacataagcaaatcaaacagaagaaaagaaagaaagaaaaaaattagaaaaccaaaacaattgacataaacctagctagtcttattgtaaccaaacctagattagcaacaaccacctctaagggcaagaacaagatgaagaacactaccacgttctaggttgtaatgtttggcggttaaatcatcagcaagttgtttcccagtgtagacgatcctttgatgaacaggaggaatgccttctttctcttcgattcgttctttgatccgctcaatcgtgtccgttagctcaatctcaatgtctatttgtttttccgtcagagtcttcactttgatctccatgcttactcaagttttctctctcgctctcaaccttgtcttttgtctctcaaatcaaaatatatatatcttcggatagttaaaagccttgaaggatttggagttatttccttttttttaggcattggaatttccaaaacaaatccattatttaacatattttagtagattttatcagatcaataaaaaattcattaacgtttagcaaaattaaggtaaaaactgaaataccttttatcaagtaatccattaataatctttctttgtactgaaaaaaaacccaatcaaatttcatggtttacttgatacttctagaagttttaataaaaaataaaataaaaattgaaattcacccaaaagtcctttaagaacttatccaaacttaaaaacagttcaaatatcaaattcatccctttttatattgacaattgaatattatggttgagtgtttgaaaaacaaaaaaaaattgatgaatttgttttctttcttttttgccgtccggttttggttcgatttatccttattttgtaacctttttaatcgagttgagttttctcatttctgtaatgaatatttgtttatttatttattatgtgattcaagagaatatcaagattttggtgtgacattctaatttaccagataaggttatttgcaggtttattgttctaaaaggttcatatttttgtagaatcacaacccacctagtaacattaattgacgagaataccaaaattttcggatttgtcagactaatttgcttcttatcaattaaatcctacataaattcaacataaaacatacaaacaaaacaaaaactcctctaaaactaggtctaaaagtcagaattttcatagaaccaaaagcagtgattaacattgagaaatacaacagaagaataaaagaaaaaaatagaaaaccaagacaatagaaccaaacctcgatcgattatcaaaaacgatgaataacactaccacgtagtcggttataatgttcggcggttaaatcatcagaaggaatgcctatttcctcttcgattccttctttgatctgttcaatcttgtccatgggatcaatctcaatgtcgatttttttttcactaagaaattgagatttgactttgaaacgctgtcgttcagcaatctcccgcttcccatgtgaatttaaagtattaacgtggtggcattcacgctccaacttgcgcgtgacattctccagaagctcgatcaatgcataacccacgtggcacatacgcgacttccactgttgccgccccacgtggcagctagctgattttaggatcaaatctaataccaatgcactaaattaattataataattacttaacaatctacggattatcttcttacttcataagatccttatattttcattacactttgactcattcctttcaaattctcatattcactgattgaatacagtacagcataagacatgtgtttaagtgaagtaaacgctttactaatcagtaatcaaggattcaactagaaaaagggagccacagagacaaagactatacgcagaccaacgtcaccctcaacctttttctattcacccaatgctaaagaacaaaataaaaaaaaatctttccattgtcaaacattaaaaagtaaaaaaaaaagttcttcatcttcctcgtcctcactttattcctattccgtgttttttcagcgttttccacagctaaaaaccgacatagcttctctatttttgtttcctgggtgtatgtatgtacagagaataagaccgatctctccaagatctctgttttctgaagagttggtgaatactgtttaagcttctctataagagtgtcattccaaggtatctcttacttctctaatttggtgtttttagctttgtcttcaatttcttcttcaattttaatttctatgtatttgagtaatctataagttagattgcttatacagaaattctaggaaaatggtatttctttgtcaaaaagagacgttactgcaaaaaaacacttctttttctgggttttgggtctctttgagattttgatctaggagttgaattgaattgaaatcttttcttaaaggttctagtcactgctatactagtgcataaattctgttctttttattgattactagtaatatgaaaatgagaggaacaagagacgtattaaggtatgatattaaaatgtagagatatatcttcactctttttggaatactctgaaaatcttatcttaccaattcctctttaccaatttccttttcggtaaaatgtagaattttttatatctaagaaatataaatttccataatctgtacatatatcacacgctttttgaatgaatatttttgtaggtgaagtttttgatttcaaagggttcgaattgattttgcaggtgaagaagaagcgtttgattcccaaaggagattcatttatttgataaatagatttaagctaagagttaaaaaaag

SEQ ID NO: 6978 - DNA, 3000 bp, Unknown; identical to SEQ ID NO: 6967
  misc_feature (1)..( 3000): cDNA_ID_1974557_gDNA_ID_1621119_Annot_ID_171993 3000 nt of promoter + ATG

SEQ ID NO: 6979 - DNA, 3000 bp, Unknown; identical to SEQ ID NO: 6966
  misc_feature (1)..( 3000): cDNA_ID_2044091_gDNA_ID_1621119_Annot_ID_171991 3000 nt of promoter + ATG

SEQ ID NO: 6980 - DNA, 3000 bp, Unknown; identical to SEQ ID NO: 6965
  misc_feature (1)..( 3000): cDNA_ID_1816352_gDNA_ID_1621119_Annot_ID_171989 3000 nt of promoter + ATG

SEQ ID NO: 6981 - DNA, 3000 bp, Unknown; identical to SEQ ID NO: 6964
  misc_feature (1)..( 3000): cDNA_ID_1816358_gDNA_ID_1621119_Annot_ID_171986 3000 nt of promoter + ATG

SEQ ID NO: 6982 - DNA, 3000 bp, Unknown
  misc_feature (1)..( 3000): cDNA_ID_2044102_gDNA_ID_1621119_Annot_ID_171983 3000 nt of promoter + ATG
tttggtcgtgcgtgcaggtttctctttctttgaccgcttctaattccatagatcgtgctataatgtagttttgagttatcaacatattaaactctatactttatatgatttaacgttgacggctgactattttattctttaacatcatagaacctctaggaacgtgcgtccaagtttgaggaattcagtgacgatggttttatctccccgcaaaggtcagctctttttgtcttctctacgttatttcatcaacgtgtaaacatgtcactaattgaaaatttccgtaaaaaaaaagaaggccaaattggagagagagaaagagatacgactttggaatttctaaactgttttataaagatggagcacatagagatattagatgttcataattagtaaaattgggtttcttgacccataagcaatgttgttccctcctcttcgttccctctttctcttcaccctcttgctctcctccgtttgtttcttacaaatcaaagcagaccacgacgatgaaagcgacttgggcagtgatatcaaagtagacaaacgtctcaagttcgagaacccgaagctacgtcaagcctacattgctcttcaatcatggaaaaaagcaatcttttctgatcctttcaacttcacagctaattggaatggttcagatgtttgctcctacaatggaatctattgtgctccttctccttcatacccgaaaacccgagtcgttgctggcattgacctcaaccacgctgacatggccggttacttggcttccgagctaggtctcctctctgatctcgctctgttccacattaactcaaaccgtttctgcggtgaagtccctctcacgtttaaccgcatgaagcttctctacgagcttgatcttagcaacaaccgattcgtcggtaagttccctaaggttgtcctctctttgccttcccttaaattcttggatctccgctacaacgagtttgaaggcaagatcccatcaaagctcttcgatagagagcttgacgctatattcttgaaccataaccggttccggttcgggattcccaaaaacatgggaaattcccctgtttctgctctggttcttgcggacaacaatctcggaggatgcataccgggaagtatcggtcaaatggggaaaacactcaacgagcttatcctctccaacgacaacttaaccggttgtttacctcctcagatcggaaacctcaagaaagtgacggttttcgacatcacttcaaaccgtctacaaggtccgttaccatctagcgttggtaacatgaagagcctagaagagcttcacgtggctaacaatgccttcacaggagttattcctccaagtatctgccagctttctaaccttgagaactttacttactcttccaactacttctccggtcgtcctcctatatgcgcagctagtttgttagccgacattgtggtgaacggtaccatgaactgcatcaccggtttggctcgtcaaagatcggataaacagtgctcatctttgcttgctcgccctgtggattgcagtaagtttggatgttacaacatcttctctccaccaccaccgacgtttaagatgtcacctgaagtccggacacttcctccaccgatttacgtgtactcatcgcctcctccaccaccgtcgtcaaagatgtcccctaccgtcagagcatactctcccccaccaccaccttcgtccaagatgtcaccctctgtcagagcatattcaccaccaccgcctccttattccaagatgtcacctagcgttcgagcttaccctcctccaccaccaccatcaccatctcccccaccgccttacgtatactcatctcctccaccgccctatgtgtactcatctcctcctccaccgccgtatgtgtattcatcccctcctccaccgccttacgtatactcatctcctccaccgccttacgtgtactcatctccacccccgccttacgtatactcatctccacctccgcctcctccaagtccaccaccaccgtgtcctgaatcatctccaccaccgcctgttgtatactacgcacccgtgacacaaagccctccaccaccatcaccggtatactatccaccagtaacacaaagccctccaccaccatcgccagtatactacccaccggtgacaaacagtccaccaccaccatcaccggtatactatcccccagtaacatacagtccaccaccaccatcaccagtttactatccccaagtaacaccaagtcctccaccaccatcgccgctatactatcccccagtaacaccaagtccaccaccaccatcaccagtttactatcccccagtaacaccaagtcctccaccaccatcaccagtttactatcccccagtaacaccaagtcctccaccaccatcaccagtttactatccatcggaaacacaaagtcctccaccacctactgagtactactattcaccaagccagtctccgccaccaacaaaagcatgtaaagaaggccatccaccacaagcaacaccaagttacgaaccacctccagaatattcatactcatcatcaccaccaccaccatctcctacgtcctactttccaccgatgccaagcgtctcatatgatgcatctcctcctcctcctccgtcttactactagtttcaaccattgagtaaaaaaatgcattgccttatgattaacgagactactcacaattatattcttttggctgcgagactttaatttgtgtgttttgttgatttaaagaaaaaaagacattccagttactttttcttgtaatatttttttttcttttggatattatgttcttttttccctaacacagagctgctcattagcagcaatggagtatatagtttcagtttatttaatttgatactaaaatgttctgtataaataataaagaaaataataaatcctttcacaaaatccatttttatctcaaattaaaattgaatatttaattgaaaactgtaaagatg

SEQ ID NO: 6983 - DNA, 3000 bp, Unknown; identical to SEQ ID NO: 6962
  misc_feature (1)..( 3000): cDNA_ID_1816377_gDNA_ID_1621119_Annot_ID_171980 3000 nt of promoter + ATG

SEQ ID NO: 6984 - DNA, 3000 bp, Unknown; identical to SEQ ID NO: 6977
  misc_feature (1)..( 3000): cDNA_ID_1816336_gDNA_ID_1621119_Annot_ID_56255 3000 nt of promoter + ATG

SEQ ID NO: 6985 - DNA, 3000 bp, Unknown; identical to SEQ ID NO: 6975
  misc_feature (1)..( 3000): cDNA_ID_1397832_gDNA_ID_1621119_Annot_ID_56262 3000 nt of promoter + ATG

SEQ ID NO: 6986 - DNA, 3000 bp, Unknown; identical to SEQ ID NO: 6974
  misc_feature (1)..( 3000): cDNA_ID_1807460_gDNA_ID_1621119_Annot_ID_56263 3000 nt of promoter + ATG

SEQ ID NO: 6987 - DNA, 3000 bp, Unknown; identical to SEQ ID NO: 6971
  misc_feature (1)..( 3000): cDNA_ID_1816304_gDNA_ID_1621119_Annot_ID_56267 3000 nt of promoter + ATG

SEQ ID NO: 6988 - DNA, 3000 bp, Unknown; identical to SEQ ID NO: 6970
  misc_feature (1)..( 3000): cDNA_ID_2044045_gDNA_ID_1621119_Annot_ID_56268 3000 nt of promoter + ATG

SEQ ID NO: 6989 - DNA, 3000 bp, Unknown; identical to SEQ ID NO: 6969
  misc_feature (1)..( 3000): cDNA_ID_1013977_gDNA_ID_1621119_Annot_ID_56270 3000 nt of promoter + ATG

SEQ ID NO: 6990 - DNA, 3000 bp, Unknown; identical to SEQ ID NO: 6968
  misc_feature (1)..( 3000): cDNA_ID_1816300_gDNA_ID_1621119_Annot_ID_56271 3000 nt of promoter + ATG

SEQ ID NO: 6991 - DNA, 385 bp, Unknown
  misc_feature (1)..( 385): cDNA_ID_3049465_gDNA_ID_1621120_Annot_ID_172037 3000 nt of promoter + ATG
gaattcgaaattaggttaaatattctaaatttatttaaataactggaaaaataattttaactaaattattttttatgtttgataattaaaatagaaaatatatgtttaaacatttaaaaataagattaattacatttttggtttatattaatttttgttaattatattaattgaattccttttgcagcaactgaatcatattaatttaaaatattcaatgcgtatattcctttcttaaatttaaatatatcacttctccataattatagctaatcaaatattcagttggatattcatttttgaagttaacataaagtttccggacaatttccataattaaataactacttataagataattgctaaacattctcttataattatg

SEQ ID NO: 6992 - DNA, 3000 bp, Unknown
  misc_feature (1)..( 3000): cDNA_ID_2165180_gDNA_ID_1621120_Annot_ID_172046 3000 nt of promoter + ATG
gtttttatctatcatcaaatattcttacatttcgttattagtaattatataaacggaatatctatactattatttataattgcatgccacatttgtttgttttttaggctccgtgatgaaggtgcaaggaatggcggttgaacatctacttaaaatttttttttacatgtagcctattgaactcggtctattattatttttatttctgtatgaacaagtttccatttttatttctctacgaacaagtttacatatttcgaatttagattaccttctaaaacttgatatcttacaatatcgcatcgctattatttgatgattgatttaaccaaagataccgtgcgtagcacgggtactgacctagttcacatagtaaaaaaagaaaccaaactaagatttagtattcattttggaaattttttttgtaatgcccttttcatgatggccttttttaactctaccctttttttttagccatttttatttctatcctctttaaatttttaatgaccattttacctttatttgaaaatttttttatgttaacaaaatgaaatattaataactttcgcccaaatatttcaaaataaatttccggccaaaattttttgaaaaaatattttcgcgccaaatttttttttcaaaaatatttttcccgcaaaaaatacttgagtgtgtgaatccgtcttccacattttggcgccgtctgtggggagcggaggattcttgagtcgtcagatttcttccgtgtattacatacccgaagtaagccgcaatgtctggagaggatgctaccaacgcttcaatagccgaaaccctcaagaccatgcaacaaactatggccgatatggcgcagaagttttcaaacgtggaaaaaatcgtcgaaacactgtaaacaatccaggtatcacttagccaaaatgttagtaccattcagtctcgtgtccgttctttaaatgcaggaaattctactagagttcgaagaactatcttcggatccccaaattcccttccacgaaatgcaacaagcgatcaaacgaccctggatggtacaaacgcgaatagtcaaccggaagatggagaaacgcatcctgaagatgataaccagttcgatgatcagcacgagcaagaaaactttgaccagctcgaaaccatgagagaagtaagtcgggaactgaaagaaatgaggtcgaagttccatcaagttacaagttcggagccagacatcaaccgagttatccaggaggctaggcgaacaccgttcaccccacaaattgcaagtttgagaatcagagattctcaaaaactcaacttagaaccatataattgtttggaagacccgaaaggctatctcgcagcttttctaatagccgctgggcgagttgatctgaacgaagccgatgaagacgcagggtattgcaagcttttctctgaaaatctgtgtgggcaacccctgatgtggttcattcagttggagccaggatcgattagcaatttcaacgaactatcgaaagtatttttaaaacaatactctattttgatggataagagcattttggacaccaacctctgaaatctatctcaagggccgaatgagacacttcaggcttttatcaccaaattttaaaacgtgcttttaaaactcccaaggatctcacaatagtcggctctatcggctttgtgaaaaggattatggcatgattcgaggtttaaggaagatctaatacttcacaaacctgatactattcaagatgcattatttttagcgaacagttggatggaagtcgaagatgaaaaagagagtttcgcgaaaagaaataagcaagcaaaaccagcggtcacttttccacccaagaagttcgaacctcgggaaaatcagggaccaaggaagtttggttcgcaaccattcaataacaacgtcggaaagcagtttcaggggaaaggaaggtcaaatacttgtgtccgagatgaaagctcgtattgcgatatacatagagtcacaagacatctgaccaaagactgcagtgtccttaaaaggcatctcgcaaaattatgggccagtggagacctctcaaaattcaacatggagaacttcgtcaaacaatattatgaatcaagggataactcagaggctcaaaactctaaaagaccaagagcggctggcgaagaggaaccaagaacttcaaagggtaaaatcaatgtaattcttggaggatctaaactttgccgtgattccgtcagcgcaatcaagaaacatagacgcaatgttcatctgaaatcaagcttaagtgaagaagtagactttcaaggcacttcgatattattcgaagaaaaggagacacatcatctcgaaatacctcatgatgatgcacttgtaattacgttggatgtagccaacttcgaagtatcgaggatcctcattgataccggtagttcggtagatctaatttttcttagcactttggaaaggatggggataagcagggccgacgtggtaggaccgccatcccccttagtggcttttacaagcgaatcgacaatgtctctcaaaacaatcaagctaccagttttggctggaaagatctcgaagattgtggattttgtcgtttttgataaaccagcagcctacaacatcattcttggaactccattgatctaccaaatgaaagcgctcccctctacttatcaccaatgcctcaaattcccaactccgagcggagtggaaacaattcggggagatcaagaagcttcgagaacttgttatttagctagccaccgattaaaaattcaatagcaattaacgaagcccgcaaagaaaggaataatcccgagattccctagcggacagaaagtggatgatgtcgtggtcgaagtaattctggaagcagacaaaccggatcagaaagttcgaatcagagctaccttatcaggcgaagtgaaggaagccttagttgaattgttaaaaaggaacaagaagtcattgcttggtcggcagcagat

SEQ ID NO: 6993 - DNA, 3000 bp, Unknown
  misc_feature (1)..( 3000): cDNA_ID_1816419_gDNA_ID_1621121_Annot_ID_56280 3000 nt of promoter + ATG
tgtacctcatcattcttccttctggttaactgaaaatggagtgtagttcagtgagtgtactaggaatattactggtatttcctctccttcataaccttgtcaccatctccgggcagaatcttccggcggtgggtttgttcactttcggagattccaacttcgacgctggaaataaaaagttcctcacaagtgctccacttcctcaaaacttttggccttacggtaaatctcgagatgaccctaagggcaagttttctgatggcaaaattgtcccggactttattggtaagtttgtaaatttatctctattttacacttttaattttttcaaaaggaatcagattgttttattatatctttctaatcccaagtaaacatatagaggacaacatatggtttgtggattgatgcttatttgttatccttcatgttaaaattctgtcccaatacagttgttaaatattttacttaaatcaataaatgattttataatgagttcgattaaaaataagcaattgcaacgggtacttcaatattgcaaactcttttataatgtgtgaaaagttggtaaaaacgtaacgggctagtaattgttttttcaaaggtctcaatctgaatcagcctgatttctttaatattttaacaacgtatacaagatgaacacgctctttataggtataatgctataatgcatatcatttaaccattaagaaaactagctactcgtttttataggtactctatactaaatggaaattttgattggtaattaaagatatatgaaattgatgaggggtgaataaatcacagcaaaattcatggggataccacacgatttaccgccggcgctaaaacccggcaccgatgtgtcacgaggagccagcttcgccgtcgggtccgcttccattcttggatctccaaaagattctgtaagctcacttaaaatatttgttaatcaatcgtaaagcaatgtcataataaagattcacatttttttggtagttggctctgaatcaacaagtgaggaaattcaatcagatgatatcaaattggaaagtggattacattcagaaatcagtgtttatgattagcattggtatggaagattactacaactttaccaaaaacaatcctaatgctgaagtttctgctcaacaagctttcgttacttctgtcactaaccggtttaagagtgatatcaacgtaagtattttcatccaaaactaatcaaaaattaatacgagttagtgatatagatatgttgttataatgattaattgcagttgttgtattcatctggagctagtaaattcgtcgtacacttgctagcgccattaggttgtttaccgatcgcaagacaagaatttaaaaccggtaacaattgttacgagaaactcaatgatttggccaaacaacacaacgctaaaattggaccgattttgaacgaaatggcggaaactaaaccggatttccaattcaccgttttcgatttctacaacgttattcttcgcaggacacaaagaaacatgaactaccgtgagttacaattcgccattcaaagttccacactatcattaatatcgttatatgcttttactttgaagcaaacatttaataatacttgttgttatgactaattagggttttccgtgacgaatatatcgtgttgcggtgttgggacgcattatgcatatggttgtggtttacctaacgtgcactcgaagttatgcgaatatcaaagatcctacctttacttcgacgcacgtcataacacagagaaagcacaagaagcgtttgctcatcttatctttggagctgacccaaatgttatccaacctatgaatgttcgtgagctcatggtgtatcctgttaatgagcctatgcgtgagttttgggaggatccaatggatgagaagttatcgttagtccaatactagtggatctgtctacctcgtttagttcttgagctcactattttctatctctagatcacgtacgagctcttggaatttgtaatgtattgttcttaattagttgcgaagtaaaataattaatactgtttaaatcctcaactctgcttattttcataagaaaaaaataatcaattaatgggtaatttgatagacctgagaatataaccaaagcatatatatgacctgctttgtgctcatattagacaagtttcgggccatacgcactcattagaacgaaatgattgaatttggtggaatcatttaagacttatggatttcaaattacataactcacttgagtcattttatttacttttttttttgtttttttttgcaattcttgttgtaatgaaatagtggaaatggtttcaatttttaactgttccaaaattattttataataagtgttgttttaggttttaatataaaattttggttaaagttccaaattttatttatactgttttaatgtgttaactagaatgaattaatcatagtaaaacaatttttttttagtttgtagtatttaaaaaaaacgaacacttgatctgaaatgcatggagtattttcttagttacgttttcataggtgagaggttccatttgacatgtttttttatatattttattgaaatataggaatatgcatttaaatcttcttctgccctcaatgcatgatcgatcttcttgatactagtaacaataaatgtatcttgaaaattaagaataaataaaatagaaatgggataccagttgtgcattaactaggtgtgtagaaaaaagaaaaaaatgaacctcgagcaacacgttatcatatattcatatttaaataacaatatttttcaattgctaaattgcttttttcttaaaaacaatctttttgataaaaaaaattcagttgccaaattgtgtagtatttacaatataaatataacgtatcggtctacgagctaagacacaaaagcaatcttctactcatttactgttctgtttcactttctctctctctgtatactctctaaatgatg

SEQ ID NO: 6994 - DNA, 3000 bp, Unknown
  misc_feature (1)..( 3000): cDNA_ID_1816387_gDNA_ID_1621121_Annot_ID_172095 3000 nt of promoter + ATG
gaattattcaaactcaaccaagaaaagaaatattgattcaagactcagagtcaagtctctaccaaaccatatgagtcatgctttaacatgtttttttttgttcttagctcccaaacagaaaccaacaacgaaactagaatggtcccgccattttcacttgcaaccaaaacaatccatgaaagtgactcagcagaaagattaatctacctgtgacgtcagtgatttaatcgcttgcttagtcctaggggtaccaataactccgtgttcttcatcttcttctcgagtagatccgccattgttggtgttaagctgcttcgtgcaagctatacacgtcagcatctctcaccttctcttttgacactactcgaaccctatgagatcaaaccagaaacccaaatcacatttcaagcaaaacccagaagatcaaatctagaaatgaagatactttaatacccaaaaatcacaattcttgcactgtgcagatacaaagaggcaaaaaagacgtacacttggaagagctccgagatcacagaaacgcagcgatgaagagctcaaattgaaatggggttaaatatgaccgttacgccagagacataaattagggtacacagatctgtatagatcaaacccataaattcgcatttaactctgtctctgtcagtctctctctctctcttgctgcttcaagcgacacagagaatgagtgggagataatgtctgtataaagacagaatcgatctttctctcgctgtctctctctgtaggagaagaaatacaaagctgaagaagaagaatctgcggatttgggaaaaaagtaataaaaaggctttgagatttgttgggcttttgagttcgttggacactgcaaaaagctttaagagtgtggtctactgtgtttcttattgatcctctgtgccacttgtcactttcgttttctacttttgggaaaataatttcttcacaagtctgattattatatacagtaacgccaaacacattagtcatctctaatctctatgcttaactttatggtaacaagtaagaatatgtgatcaaagtggtgaaatgattgctctaaagtctaaagtctaaacgaagaactatactaatagagcgtgcaactaagccttagcattttaatttctaaaagctttgattactataatacaaattttatagacttgctccccacctttttctctcttccttgaaagtttaagccttttgattaattatgagtttaagtacaccttccacatcatcaagcaatgcatatcatgccctctcaaaaagttaatcttgtaggggtgggcatttgggtacgcgagtcagtttttggtaaaacccgatcgggtaagtgtaggtataaatttttagacattttttagaactgatacctgaattttttggataaatacccagatttccctgatctttggataaaatttagataaaatttagttattttcgggttctagttgagctcgaatttttgggtagaagaagtttaggacccaataagatagatctaaattttcaggtttggtttcgaatccaattttttgggtcggttccgtgttgttttttaaaccctaatctagagttttttttttgtttaatatgaaaacttagtacttaactttctctacttgtattatagacttgtaagaagttaataactataaaattcaattgacaatgtttgagatataatctctttggatatatctcaattgacaaataatttgagataattctaataatgtttgagatataatctctttggatatactatatctgaagaagtagttattgagataaatatagctaattaacttttgaataactacttcttcagatataatctaataatgtttgagatataaacgtgtgagatataatctcttgtgaagaagtagttattgagataaatatatcaacaaaggtgttaagcccaaacaagttaaaacggatcaaaacaaaaggcccaaaaacttaatgatacgctcatccgtaggtgatcacaccctcgtaaatacacaacacaacgatctgtccttaaattccctcaattcattgaaaagtttgcaacaacgaaaaaaaaatcaaatcaaaatctcaactctagagatttattgttgacccgtttaccgcgattctctcctcaattcgccggtaaacccctaactctgtcggaaaaccctaattcgccgcgacggaaattaccaatactcgtttcctcgtagcattggatttttaaagctgttgattccagctttgttgaggtaaatattatcttcccagatatctatcttctgattctgattttattgaggtaaatattattaatttgattcaaattttgagaagttggtgattcagttggttgatttagggtttcatttgggtactctgtctaggccaaattcgttttgtattgaaaattttattctttggattgcaaaaagttgtcttgtttattattatttggtaaatttgaatttttgtggtttgtcatgttatttgttctttagagctgtgattatgatttgttatttgatttgatgtatgaagcctgcgcaagtttgtgtctttcgtaacattgaatcacgttcaatgtaacatatttcattgcaaaatagttatgggattcaaatccttggttagtggatagaacaccaatcttctaattttacgttttgttgtatgcctattgtgctggaaaatggctagcaatatacatcttattggcagtttttggttgttcttcccatggctcataatcagagttactttatggtttcagttctatagttcattgataattcatagcatacttttttccctcggaatgtgcagaacattcaggttacttctctgtatagggtttagttgacgaacccctagtaatatggaattgactgtgacattctatctaaaaaatataacttttacatcgcattaagaaatctaaaagaagttttgatgccagcaagaatg

SEQ ID NO: 6995 - DNA, 3000 bp, Unknown
  misc_feature (1)..( 3000): cDNA_ID_1807926_gDNA_ID_1621121_Annot_ID_172093 3000 nt of promoter + ATG
tataacaatacaacacagcttagtccgaatcaaacatattattctccaaatagtccacaggtttgtttattgctattaatagtcattactcttgaaaactctttaccttctctctattgtaagactgaattttggaatcaatgttaaaacagtacccacaaccgatgatggttactcagcagagaccaatcttgttcatgccgccaacgccataccaaccggtttactactttacttcaaaattcttgttttgtctagttacaaaaaaaaaatgatcaacagagttagattttgctgacatctttgattttattgcaggagatgccatacaaaggaagagactcttattagcttttggccaaaaccatgaatggtggtggcacaagagaaggtctcgagctgatggaattggtttcatttaatgtactttatttttatttatttccaaagcaccgaatcttttcatttttattctaaaatgaacacaattgatgtgatggtgatttagtttgtttaggtattagactagattttacattagattcgtgctgatctcatttctttattcacttctgttgtgtctccctattcaaactttaacgttaaatcttttagttgtatgacatattctgtgtggagtttgttttatttatataaaaacagttaggtaggaaaaaaaactttttcatttgtgaaaaggaaaatcaacgattgtagttcaatcttacatatacgtgttaagacatggtagggaaaaagtggagtgcgtctatgattggatttgaaagcgtaatgtttaaaatttggaactattagattaataatgggtttagtcttgtcttgtcctaaaatgcatataaatcttattgcggtgtgttaaggatcgaggttaggggagattcgaaaatattaactttgtcgtgtttgaaaatattagtttaagtaagtctataaacataaacataggtaaatcaaataattgatttctaagaacttctagatactgttgatatataataataatatttgaagtaacacctgtaacttccctcgttcgaagcatgatagttacgcatttcttttctctaaagcaaataagtaaaaggtacgtgtagcaaacaacaattaatcttccccacaatacaaagtctcgtattacttcaattattactagttaaacaaagtgtcattgtagtgaactacaaataggtgtccaagaaatagaaatgttgctatatactatattctttcttttggagtgtatttatagtgtttttttgtcttccttataattactattcagagttgtggattaaatgcagagagatagtgcagaaattacgattcattgctgctttgtgttggggaagctgcatcaagaaatgtgaaaaagggctctttcgctttgctttgctttgcttgacttgcaataatatcaattaccccaactacaaatataaaatatttttaatttattcgcttaaatgctactatattgattgcgctataaagagatgttgacaaccttccacttaaacttttgctttttaaattaaaaaaacaccttcttaaacaaaaacaaaaacaaaaagacagaaaaaaaaagtacgcttagataatacataattacatatcttcaactatataaacaatgttttagaattctgcacatttttgttatgaaacaattaaggaatatgatacttcagataccctctatatattatttagaatctttgaaccttgtaatatatatgctgaatagaatcgcatataaattgataaaacatcactgatatgaacataaaaataaaggtgttaaacatctttgaaataaatggaaatatttaccataaacatttttactttggtttttcttgtcttctattttccttcctaacattttaatactatcatttatatatttagatatatttctagccttgtctagattatacacgcgtcacacttctaaatttatatctatcttttactagatttttctattatttattgttgcctacatatttctattttgttttgtaataaaactaaacctgatttgaaaattataaaagcactacgtgacacgatttgattcgatatacttaatttttgaaacataaacaatataaacaaagataagaaaaaataccacaaatagaaatgtcaaactctgcaaataaattcagaaatggaaacaaaataatattttaaaatatttaataaattgtgtgtgaataaatatgcatttgttgagagaagaaaaccataattaaaaaaaaaaaaagagaaaaggagtcaagattagtcttttaagccatagccaatacccaatttgcagagacagaggaagagagagaaagatagtgaagagaaagaaacaaccatgttctgaggaaggagacatgcatcatcatcatcattcatcatcatcatcatcatcataatctcaagcttattacttaacttctttttctctccatctcttcttaccaaatccaaagcaccaaaggtctctctctctctctctctcttcttgttcgcttaatttatttggtagtgatgttatgatttggttgctcagtttctacttatgatgatataattaaaaataataatttttgagttatgagagaaaaaaatcttttggttggtttctctgttttcttggatcattaagttcaatgagatttgatgagtttttttatctgttcaaactcagaaatttaatctgtcgattttagtttttgtttgcatgttgtgtaagttctagccatgttcaaagtttgaatcttttggaaccctttagatcatgaaacaatcttactgtgtcattgaacctggaatctgtgttttaggattgcttttataatcttttggtatcatttctctcttgtatttgttgattatgtggatcatgaataatatcatatgatttatgactggacttgttggtttggacatttagtttattgaagtaaagatttgaagacaatg

SEQ ID NO: 6996 - DNA, 3000 bp, Unknown
  misc_feature (1)..( 3000): cDNA_ID_3438546_gDNA_ID_1621121_Annot_ID_172091 3000 nt of promoter + ATG
tcatgagtctcgccatcttcatgctttaaagagagctagaggctccggtggacgtttcctcaatacaaagaagcttcaagaatcatcaaactcactgtgttcttctcaaatggcaaatggacaaaatttctctatgagccctcacggtggtggaagcggaatcgggtctagttcgatctcaccgagctccaattcaaactgtatcaacatgttccaaaacccgcagttcagattctcaggttatccgtcaacacaccatgcctcagctctcatgtcagggacttgaggcacatgagaagaccttgctccgagagaactcaggctaaactccggagactggtgatgatacatgacgggaagtcatccttggctacttatgttatcggttacaaaatttcttccttttaaaaactttgctttcatatcctctacaatctctcactctatattgagtgacttgacgaactttcaaatcattgtcaaactattttgttaacttccgattctctgagagtacaaattgcattaccctattacatacaatgagagaagattcagggtcactaagagtaatatacacgcatagatcccctaatgctctgaagacaaactggacacttagggtttaactctcgttccacggttgaagcacatcgcctgcaacatactacatgtccacagggaataaacgcaggtactctccttcttgacacgcagatcacacacaattctccatctgggatttcatctgcatcttcgggttcatcatcgaccacagaatcgttcggtctctgtggcagttctctctgatggttccattgtttccatttattccaggtcctgaagataagacagttaaacagatttcaaatcgaaacattgcccaaatctaaaaccaaatctgatctctcacaactccagtacctgacagcagcatagctaaggatgccaacagacacaatgcccaagataacgctgcccaagaatataaagttggtctgttccataaggtcctcaatcatcttgtccttggtcatctctgatctgcaaagattattcataaagatttatatatgaacagcaaatagagcctttctgcaacaatggactaaatcttgtcaaatgatcaacagattgagaaaacataaagaagaagatgaagtaataatttgagctagaacgcaggcagatatataagaacgaaaaatattcagataaaatctcacaagaaataaggaagatcttggcacgatttgatttcaggaactccattattaaaactgtagatgccaacagctgttatatctttcccaggtggtaaaatcttctctatatcaagcagaccaaccttggaagagaaaggattacaaagttagccaagaacaagtaaccatcagttcctcaaaaccagaaatttctttgaatatatatatactcacaggataatcggggtacaaaaaggcttgaagaaacgaagaattaataggctgcaagcgattatacacagtggtaagcggaagaggttgccttgagccatccatgttaacagcgacaaaactagagttcgattgctgatcctttccaacaatgacaaatgggacctgcacaaagcaaaggatacacaaaacaagtttgatcatggatacagagccaaagttgaaagctctgaagctgatagagagactttaccgttctcgtaaaatcagcaccgtgtttgcgcaatgatctctccaacataaaccggtgaccagtggactgaaacaatctcttccatccactatacacatactgtcaacaacaaaatgatgacattagaaacatacatttcccttctgagatcacaccagtaccaacttacataatcctaacttaatcaatcacaatgaacacctaatcatgaagaaatcatccaaactctttaacctaagcctttgataagaacacaaagcaaaattaggtcaatgtcaattgcaatttgagggaaacataaacacttagggtttagagcaacgtacagtttgcgttctctgaatgataagagctttatctccagtctccggagagattaacacgttgttgttcttgtaaccctcatcaccggaaattttcggtttgacgactccgcgaaccacaacgattcgctgatcattgctcttcctgttatcgttagtctctgatttgtcttcagaagccggaagcagtgatcggaggtcggaaatggagacttcgggtgcatctttgatcttcttcaacgcggcgttggtagaagcatacttgagagcagaaccgacggcgctaacagctaaagtcagtccgaggattgcgccgtcgaaggagagagcgatgtccgtcaatagattcaagagagcacgctccggcgaggacattgtggtaatttcgatttcaacgtcgtagacacggtcacacggacaagtaaacggaagagaaatgaggctattatcggtatttaatattatacattcgaccgtcgttctaatttgggtctttaatgggcctatgcacgagtgaaatacaaaatactagtaataaatagcgttttagttaaattacatttacaccctcaacgttacagcagatttacaaaccaaaaccataaatatcagatctagagtggcagagattagtatttcccgattcctcgccgccgttcatcaatctctccgtcgtgtttctgccactagctctccaccaaactttctctctcgcattaggtatttatcgcctctttatggcatataatcttgtgttttggaacttattgatgaagctaggttagaatctcctttgtctttcttatctccgattcgtgaagctctaattcttatttattcgatttatgtaatgtgttgctgttacacgatgtttgcttgtgagattcgattgaaacttgtgttgttgcaacatcaattctgtataagaaaggttcttaatttgactctgtagctttactttttttttagttgtttagggataaacatg

SEQ ID NO: 6997 - DNA, 3000 bp, Unknown
  misc_feature (1)..( 3000): cDNA_ID_1816391_gDNA_ID_1621121_Annot_ID_172090 3000 nt of promoter + ATG
aggaaaactaaaaaactaaaatcatgaatgaaaaactccaacaaaattatttttttaaattgtagggaaaccaaaattttaaaatcttgattggtatgaaaataagtttttgaaaaacaaaaaccaaaaactcttaaaaaatctacaaaacattcaaggccgttgataactgtatataaaatactagtttgataaagataagagaacatataagtaaagaaatgaatttttttttttacacgacgttgtcctcttttacagtatcaaattacaaacatttgaatgaatgtattgtctgggcttggtaacgtgattgatcatggaatgagatgaactagaatcttgtattgtaagtgattgagttaaggtggcattagttgctagaaatgcaatcatcagacgatgaattattaaataaattatcatttgatattcagatctcatattgatacatgtaccgtgttcttacatgacaaactcgtcgtttccccataaaattcgaatattttaacacttatctggactttcgacgattgctttagattcgagaatctcaatgcttgtatattactagtaccaacttgaattattctcagttttccacacatttgaattattgtataaccatatagtattaagttattatcacagttacaatttaaaaagtcattatgtaaacatctgctagaaatccatgaaatattatatacttcctctatagcataaaattgtacggtcggatataacaatatattccaattgggaacgacatcaagaacctaccatgaattcgagttaaaatagtagatttggcactgaaatgttttatgttttacattgcagtcatacttcaaagatttagtggttcttgttctcatcatgtccgagagcatacctatctaaattttggttattacttctcggttcgatccatttggttttccccacaaggtccaacccacgagcctagtgttgtctttagtgacacataacaatcctcgcagtaaaatatgctattgatatcacgacttgtaaaatatgatagatatcaagcctctattagtagatggatcaaatcatacatcataagttcataacctacgaaaacaacactacattcaagccagatcaataactaatagcccaatgcagtaaaaatgggcctaaaagcttgctcgttttgcgtttatttttgggtgagagaaaagcccataggatcacgaccggtccacagaaacaacaataaatcaagccagaccaataaaaactacggtttgacattgttcccgttacagactaaaccgaaaataaacacgttgtgacgaatggtacgttagttattacgtggttgcgtggaaaagaagaagttccacgtggtgactaaagtttgcacgttgcctcttgacacttttgcttctaacgtaaccatttctaaattttgttttggattcaattaatttccacgatattgaacgtttatattcagaaactcatgtatacatgactttttcagtttccgaccaacaatttaggtctcatttgaattgatttggacatgaaaattgttagaaaagttattaaattgatgtattatttaccaaacttttgttgcattctatcgaaagtcaattacaaaaacaggtgttgatattattgacttaagatcgtttagaagtaagaacagtatattgtcgtgattagtttgacgggtatgatcgaatcgcaagactcaaacaggaccgtcgattttatagggtaaacgattcccacaagtcacggaggctgagagccttgagcgtaggtgctgacctggcacacaaatgtaaaacttggccaccaattaagacacgtgtcttgttaagctccgtccccttaggccacgtggcaactgtttttctttggcagtgatggttcttctttgagagttcgtcggtgtccttatcggaaatgtaagaattcgtaaagaaataaaagttggcaattactataacttaggctgaaatgtctgtattgtccttaagcaataccatcaaaatttaataattttgttaactaacaaaattattgagaacattaaagtgaaaaaaccattcgacatattccaattttttcacattctttgttaaatttctgattttctccttctctatgactgttacacaattgatcaacggacgtaagggtttggagtatattgtacatttttttttcttaaacgagaggagaaaaaaaaaagaagggattcctcatccgcaaatagattcattgaatcaaaaaaaatcccaaccagacaaaaaacattagaatcatgcagtggatcccacttccgaccatttgctgatttttccgtaaatacattctagatatttttttaaaagaaaacgcaatttagattttaaattctagattttaaattctagagaagtaattcgcgcaaaaactgtaatcaaagtttaaattcgaaaattttgattagtttacgttgatcgaacaaactacaaagtaccaaaaaacagttatttatagtttcataatcacaaatggataacgacattagtaacaacattaataacatcatcttagtttaagtcagtagtaatctatggttaaacaaaaagggtaattaagtaatttgcattgctcagttcgcttccattgctggatttaacgggcgaataagaacaccaccaaggatagattggtttatttctagtttcttcggatctataaagtagaagaagaagaagaaaaattctcaatttctctctcacaatctcttcgttttctgtgattttatttagattttcccatttcaatctcttgttagaaattgtatatatacctagatcgattggttcgtagatctgtttgtttttctagggaaagttctttgattctccagaaaattggacgaagctttggattcaaattccagaattaaaaaaaaacagaaaaaaaattctttaggttttcattttgaattcttaccagagagtttca

SEQ ID NO: 6998 - DNA, 3000 bp, Unknown
  misc_feature (1)..( 3000): cDNA_ID_3049514_gDNA_ID_1621121_Annot_ID_172078 3000 nt of promoter + ATG
atgataaccattcataagtagttagacttgctgcatcgtcttcgccagaggaagggattttgccggcagtgaatggtcccaaagcatagcatggtgtcccagctgcataaaaatgtgtttgacccaaatgtgagtcttaattttgttattgttaatttagtttaaagggaagatgagaaatatatacgggttaaaggtgtcccagggttgctgcttgaacaggttggagaatccggatccattttcaatttacggagaccacgaacattgttattccccttggtaaccatgatgcttctggtgacttggtcgcttgagagagaaggaggagaagatcggacggtggataatgaatcgtgctttctcaatttcccgagaccattgtccggcgtcggtccggccaccgtttcatcccacagcttgtgtaggaaccccatccgatcaacaaaaatttatccaaaaatatataacaatattttttcaaattatttcgggtttttattttactgtctctatcttctttttttttcctttgcaatggaaatggttttatagaggtagtagagaggtaaggatgaaagagaagagagaagcattgaatatttttagtgaggttaattataagctttggcttaattaaggagattttaatttaaggataaatatgctgactaatccaatcattagtctctaatctcattggtgaatattctataagctgtgtcttaacttagaatcacaaactactagttcagaactctacttaagaatcacagaggttttcaacaagctattcaagttcaaagctttttaatttgcccatgtttaagacaagaagatggataacaataacaacaacatgatgataatcagagtcataacttctctacatttacacatcccacaaggcagtaacaataacaacaacaacaacatcaaaacctaaaatccagcttatcatagcaaatatcataggaacatttgtgtgttcaattgtcagctacttacattgccgttattcttgccattgcgatcatcatcatcatcaacgatcctcctttctcctcgctgcctgctcctctcttcctcttcttgattgttctgtgttatctccaattgagttttcaagaactgcattctctgcaactccatctctttagcaaatttcatcctctccttttccagttccgccattaacttaagcttagcagtttccgccttctcataagcttccgtaaatccaagtatcgccctcgccacatctccaactccactccctccacctccactcttatccaccttcaaccgctttggcatatgaaacgaaagcggttgaatcggttgcaaaggtgggagactctcagcagattcctcaggagaagcctcaggttcaggatcagactcagactcagtctcagaagcactacgtttcctaaaatgccaccgcatcgaatcagagcctctcttctcttgttgttgctgcacaatctgattacctttagtttgccgtttaaacatactcgaacggctattcccaagagctcctcccataggagccttctctgaagcttttgaagaagcaatgaatgttgtagtaccaccaatcaaactctcaagcttcttgaagaaaacccatttactaggtccatcaccagaagcaatcttagctttctcttgcttatacttcttcttcaccgtatcaattctgttcttacactgaatatcagttttagggtatttgcattgacgactcttgttcacaatctcagctacttctttccaatgttgttgcttcaaagttcctttacctggttcagagaatcgatctccccaagcttcgattagaacctttgtagcttcttcgctccaacaatcatctcttcctcctccaccaccaccgcttcctcctcctcctcctcgtccgtttctgtttccgctaccaccaccaccggttacagaaggagtatgaaccactaacgctaaagcgttcatggacggagattgagaagaaagccccggttgtggtttcttcacgacggccaccgtcacgtcgtttgttggcaaaatcggcggagaaggaggagcttgtggtgaaagggaagaatctcccggagatggaattgactgaatctcgtcgtcgtcctccatgaaaaatcgatcgattcggagaaggtaagacgatctgaggattttgcaaaattttggatctgagattcgctcaccggcgaggggataaggtcaccggataggtaatctccgttattgacccgatggatatgttaaatgacgaaaacacccttcactctttcctttaataacaaaagaacaatattagaaatttagaaccgtgacagtattcgaatggttttatggtaaatactcaaatatcgctataaggtatttatgctttggccattttttcgttaggaatattgaatatacacactgacggatttcaaaatttctctaatatacaaaagtatttttattttcttgtctatagtatggttaggtaggttgtctcaagtctcaaaaactctaactaaaataaaacgagataaatcaagtctaatgggctaaggcctggaataactttcaaggcccaataaaaacagatataagaaataaaaatacaaaatagaacaaagacataaatcaagtccaatgtgctaaacggcctataaataacttataaggcccaataaaaggagatttaatgacgtggaagcttttgaaacaactctcaagttcactagttacttctagaaattttctctggaactttctagctcactggtgtttactcactatatatcaatggagtgaaaatttcaaaccccatactatcaaatcgaagaagaggaagatccaattggaaagggttatcctaattcccaggtaatgatcctattctctgtatcgatcttttcctggaaaatttcagaattgttgatttttttaactgttttgttttctggcagtcattgatcggagaagatg

SEQ ID NO: 6999 - DNA, 3000 bp, Unknown
  misc_feature (1)..( 3000): cDNA_ID_3049518_gDNA_ID_1621121_Annot_ID_172076 3000 nt of promoter + ATG
gcatgactacagttacggttattacgattacggtttattaaccaccggttatggttataatttttttttaactttaattttaaccgttatatatacggttaaaacgattacgattaaatacggttacggttaaatacggttatagttacatacggttacggttatttgataattatgatatagttaatatataagacaaaatattatattttttaaactttataataaaataaataaatagtgatatatcaaataatatttattttacgtgattttgtgtttcaaatatttatagtgaatcagttatctatttttctttaagtaaaccaatgaataaaaaaattaatgatcataattataatgattgaattaattacattttccaaacaaaaacaatactaatgagaagatgttgtgaacattaagaaacagtttcaagagtataaataataataatatgaactacttataatttgatttatggtaaaaagagtagtggagtaacttcgatcatagtagtggacatattaaacaatttaagttactattttagtgaaataattatttatttatacactattataactatattttaaggttttgaaaatacgattaaccgtacggttttgatacggttacggttaattaacggttacagttagtatattttcttaaccgtaacagatctattttcactgttaacggttacggttattaaccgttttatacggttacggttgggttacggttaataaacggttcggttacggtccaaaataccgttacagttagattttggttatgcctacacaccgtaacgactatttttctcgaaaatttacttttaatgtttgatgagaaggtattattgtacaattataaattttaatataattttcgtttcgatacacaatataatctccaccaaaatctttttcatcatggctataatttagtttataattttacttacaagaaatgtttaattgatatcttgagtcaagatgagtctaattaactttataactatataagatgcatctaatatgttatataaaaaaaacacaacaaatgaacataactaaaagaaaatcaaacataacttgttaaagtactgttttaaaataaaacgggtgggtactcacctaattattttaaacctactcttgacactaaactggcctataaatagaacaccatggaaaggaaaagagacacacacaaataaagaaaacgaaaacacttttatacttatattgcagccatggctccgactttgcaaggccagtggatcaagatattttaattagttaattaaagtttcaattcaaataagtcccttctccgatgtggtgctcgaatttgggacctccatacttttcatatgagtagatggaggttaagccggtagaactacataccaacgcccggattattctatttaaattgataattcaacttttcgaaagttcataattttgtacaaaagacattatctaggttaacttggttattgccagtttgccactaaataacagtacgtagtattctatcacaaaggctaaataatagtacgtatatatcatcacgaaggctgaatattgttgatagtcgttacttgttttttttttgataagctataatataacttttatatgctttccaagttagatcatggtattgattaaagagataattaaggatcggatatctgaataaatatttctttaaaattaaaattaccaatcatgtatattcaaaccctcatacagatcggtttaaattcgaatttattattgcaatagacatatttttaacaacatgtaatgttatttaaattattatttagaacaagattagtatataatatagtttttcaactttagacttatcttatagttatatatttctaaattttatgttgattggatatgaatattttagatttggaagtttgaattttatgttattacttttaagagaataccattattgttatattaatgctttaaaattttgaattagattcttataattttatgttatatttgttggtaaacatattttaaagaatctactgtactttgttttggggtcaagtacggaaattaaattttagatatttgagtattcagtgttttagaaatttagtgttcatagacgtaagaggaaaagttgatgatacttgaattaagtagaacacctaagcatagtatttaaaaggtttccatatagttgaccaaaaaattgaaacttctatttttaatcattaataattctatttagtactgtgcacagccattaactaataagcgttgaatctagtttttttaatataacatctatatatacatttttgcagctattttatcaaataaattttagagttggacttatttacaactcaatgtcattagcattaaatattttttccaaaataattaattttacattaaatttttaatttaaattgtcaatcacattatcaatcaaatttaatccaaacaaacttcacatcaatcccttaaaattagcataaacttcacattaattatttagacatgaaaatatttatttaaagatttaaatcttctaaatttttgcttttagagttattatatcattacctaaaaggcaaaaaatattaattttttaaaatattattatttgtatatttaaacttcataaaacattattaatatttgaatttataaaaagtttaatctatcaaaaataattaacatcattatataatatatagagtttaaaaagatctcaaaaaaaaattcgtcatattttgtgattcgaaattttaagaatgaacatatattaaccaattggcgaaaaatatgtgggttcaacgtcccgcaacgactaaaatattttgacaatgattcataaacatattataaataagatcaatattaataaagtaaatagtttttttttttggacgggtttggcaggacgggtttgacagaacgttacttagtaacaatg

SEQ ID NO: 7000 - DNA, 3000 bp, Unknown
  misc_feature (1)..( 3000): cDNA_ID_2160220_gDNA_ID_1621121_Annot_ID_172073 3000 nt of promoter + ATG
gtcaccgcggtataccgcgggttaaaatctagtataacttcattttacatccacttccatgtgaacaaatgataaaattattattttatttagaaaagttttatagtatttttctcatgtttattttcaaagattacaaacaattttgaacttgaatttgaaaactgaatttggaatcaaaataaaccaattattacaaaaaatattagcttataaatttcaaaacttatatatatgagtaatttatatttgaggaattcttagtttctcacaacaaaaataagttttgtttctaaaaataacacacatttgcaaatgttctactaatagcataaatttagtgttaagagattaatatttttcttttaaagattaaattattttcaaaaagttatatagaagtaatttatatttgaaaaattctcacaaataatacaaaaataagttttgtttctaaaaataacacacattttcaaatgttccactagtgcataaatttagtgttaaaaattattttttttcttgtttcacaaagattgatgttctatatcacatcattaatttttttattgctgaccaataaaaagaagagagatatatagttaatattattaaactaacaaaacaataattttaaaatataaaagttgtttttcttaatttgtgtgaaaatctcacaatatcaaatttggtggaacaaatggagtagatattgttccaactcaaatcacaaaaatgttgaaaaataattcaatattacgctcagaaaaatgtaaacttatcatactatgatgttgatttagaattgtttagaaatatttaaattaatttaattttttaaataaagataacatagtcattgtattatcaataactaattttatctttgacaatttatgtgataggtactataaaatttacttttatactagtttaatatatatatatatatgtatattatattaatatatttgttttatcacgaaattgtcgctatgtggccatatttttaatttttttcggtggcctgagggcataaataattattttatttggatacaagattgtaacttcattcatggatcagcagctccatgtgttcacctcgataacgaaaacgatattttgaattagtcaaattattgattggcgataacgtattgcttctacgaatgttatggaattaattaattaatttcatgtacgtatcatattttcttttttgaaattttgactaacattttaacactttttttggccagtagtgagctgttttatgttttctgatatagtttttctttacagcttattaaaaaatttagtcatgtgatatagtaaaaatttgcgtaattatcttaatttgtgtgaaacatgtcattattaagatagtttatcaaaaacatgtcattattacactttttataaaacataatgaatatcttacaaatctactatttaaactaaacttattcatagatttggtccatatcattttatacttactataatttttattaagtttacttgattttaagtttattgaaaaagtgtgggcacaacaacacacatgcatgtgttggtggtggttgagaaataaaataaaaatgtgaattacaatagcattttcccctataactaacaggttgttctacatgactaaatatcttctaaccagtggcattttcataggcaattataaatagtatattaattagtgtaatatctaaaagaaaaaatgtatataagacaataaaaatacatgtatttaaagctaaatggagaaaaaagaagcaaaagtgttatgctagagatttgatcccggagttgagggtgtcaagtgacccccctttttcctaaataggtccgcccctgtttctaactaacatatttcttcaaaaatgcaaaaacaaattgagatttatcttgtcgcaactttttttttttaatcattatcatgtcgcagtttgatggacccgtgattttgagtttcttcatttttttctatatcattaatattatatatatatatatatgcatatatatttgagtttgagtcagatcaatttatactgattagttgtaaagaatttgaaactttgaagcatggataaagggtttaaataaggttttagggatttaggaattcatgtttaagattcggttagaaagtataggattcagtttttactttttaagatttgtagtttagttgaatatacattggtgctcttttaattatttttaacaaaaagaagaagttatttttaacaagataaagactattaaaaaaatctcttgaaaataaatgatgttttggttcaacaaaacttgaatacattaattattaagggttaacaaaaaaaattattaagggtaatttaaaaactgtgagagaaaaaacattaatcattgctcaagtctttcttcttctttttttggtcgctcaatgctcaagtgtgttctgctttctagagcagcaactttttgacaaaaggaaaaagaaaaacatctttctcaaccttattaaaaatagaacaaacgtgtctaggtagaagaactgtagaaactaactagttagtttcaattgatataagacatagcaaaaacgtgagagattgaatattcacggcgttgtggttttcttttgctaacaatgattttacatgacatttttgcgaaacgttttattttcttaaaaaattgtgttacataattgtttttttgtttgttctataattacgtaacagctcttaacgtttacaataaatatatattttctaacgtttatatttttattagatattttttccccaaacttttttctttattttaaactgagttcgtttaatctttaattatagaacattcttttttttttgtcatcaattatagaacatgttaaaagctcttttatttccaaatattttacaatataaatatattagaggaccgaggaacttattgtacctcatcattcttccttctggttaactgaaaatg

SEQ ID NO: 7001 - DNA, 3000 bp, Unknown
  misc_feature (1)..( 3000): cDNA_ID_3049521_gDNA_ID_1621121_Annot_ID_172072 3000 nt of promoter + ATG
tattgtacctcatcattcttccttctggttaactgaaaatggagtgtagttcagtgagtgtactaggaatattactggtatttcctctccttcataaccttgtcaccatctccgggcagaatcttccggcggtgggtttgttcactttcggagattccaacttcgacgctggaaataaaaagttcctcacaagtgctccacttcctcaaaacttttggccttacggtaaatctcgagatgaccctaagggcaagttttctgatggcaaaattgtcccggactttattggtaagtttgtaaatttatctctattttacacttttaattttttcaaaaggaatcagattgttttattatatctttctaatcccaagtaaacatatagaggacaacatatggtttgtggattgatgcttatttgttatccttcatgttaaaattctgtcccaatacagttgttaaatattttacttaaatcaataaatgattttataatgagttcgattaaaaataagcaattgcaacgggtacttcaatattgcaaactcttttataatgtgtgaaaagttggtaaaaacgtaacgggctagtaattgttttttcaaaggtctcaatctgaatcagcctgatttctttaatattttaacaacgtatacaagatgaacacgctctttataggtataatgctataatgcatatcatttaaccattaagaaaactagctactcgtttttataggtactctatactaaatggaaattttgattggtaattaaagatatatgaaattgatgaggggtgaataaatcacagcaaaattcatggggataccacacgatttaccgccggcgctaaaacccggcaccgatgtgtcacgaggagccagcttcgccgtcgggtccgcttccattcttggatctccaaaagattctgtaagctcacttaaaatatttgttaatcaatcgtaaagcaatgtcataataaagattcacatttttttggtagttggctctgaatcaacaagtgaggaaattcaatcagatgatatcaaattggaaagtggattacattcagaaatcagtgtttatgattagcattggtatggaagattactacaactttaccaaaaacaatcctaatgctgaagtttctgctcaacaagctttcgttacttctgtcactaaccggtttaagagtgatatcaacgtaagtattttcatccaaaactaatcaaaaattaatacgagttagtgatatagatatgttgttataatgattaattgcagttgttgtattcatctggagctagtaaattcgtcgtacacttgctagcgccattaggttgtttaccgatcgcaagacaagaatttaaaaccggtaacaattgttacgagaaactcaatgatttggccaaacaacacaacgctaaaattggaccgattttgaacgaaatggcggaaactaaaccggatttccaattcaccgttttcgatttctacaacgttattcttcgcaggacacaaagaaacatgaactaccgtgagttacaattcgccattcaaagttccacactatcattaatatcgttatatgcttttactttgaagcaaacatttaataatacttgttgttatgactaattagggttttccgtgacgaatatatcgtgttgcggtgttgggacgcattatgcatatggttgtggtttacctaacgtgcactcgaagttatgcgaatatcaaagatcctacctttacttcgacgcacgtcataacacagagaaagcacaagaagcgtttgctcatcttatctttggagctgacccaaatgttatccaacctatgaatgttcgtgagctcatggtgtatcctgttaatgagcctatgcgtgagttttgggaggatccaatggatgagaagttatcgttagtccaatactagtggatctgtctacctcgtttagttcttgagctcactattttctatctctagatcacgtacgagctcttggaatttgtaatgtattgttcttaattagttgcgaagtaaaataattaatactgtttaaatcctcaactctgcttattttcataagaaaaaaataatcaattaatgggtaatttgatagacctgagaatataaccaaagcatatatatgacctgctttgtgctcatattagacaagtttcgggccatacgcactcattagaacgaaatgattgaatttggtggaatcatttaagacttatggatttcaaattacataactcacttgagtcattttatttacttttttttttgtttttttttgcaattcttgttgtaatgaaatagtggaaatggtttcaatttttaactgttccaaaattattttataataagtgttgttttaggttttaatataaaattttggttaaagttccaaattttatttatactgttttaatgtgttaactagaatgaattaatcatagtaaaacaatttttttttagtttgtagtatttaaaaaaaacgaacacttgatctgaaatgcatggagtattttcttagttacgttttcataggtgagaggttccatttgacatgtttttttatatattttattgaaatataggaatatgcatttaaatcttcttctgccctcaatgcatgatcgatcttcttgatactagtaacaataaatgtatcttgaaaattaagaataaataaaatagaaatgggataccagttgtgcattaactaggtgtgtagaaaaaagaaaaaaatgaacctcgagcaacacgttatcatatattcatatttaaataacaatatttttcaattgctaaattgcttttttcttaaaaacaatctttttgataaaaaaaattcagttgccaaattgtgtagtatttacaatataaatataacgtatcggtctacgagctaagacacaaaagcaatcttctactcatttactgttctgtttcactttctctctctctgtatactctctaaatg

SEQ ID NO: 7002 - DNA, 3000 bp, Unknown; identical to SEQ ID NO: 7000
  misc_feature (1)..( 3000): cDNA_ID_4370923_gDNA_ID_1621121_Annot_ID_56281 3000 nt of promoter + ATG

SEQ ID NO: 7003 - DNA, 3000 bp, Unknown
  misc_feature (1)..( 3000): cDNA_ID_1840670_gDNA_ID_1621121_Annot_ID_56283 3000 nt of promoter + ATG
gagtttccactttcatctacaattaaatttcaaacattagtttctaatacgttagtttattaaaggaaaatgtaaatacatacgcttataagttataactaaacaattaagggttacaaagagattattggttttcactttcctcgttatgtctttgggatttcctaatttttttattctaacgtaatacagtaacaaaaacaaacgttttctcaccaaatcatctctactagttcaaaactgaaattaatcatgtattttactttactttcttctatttattctgtttctataaatattttcatcttgcaactagtcatcgtaaaaaaaaaaattctactactgaaacgtcttaaaaatattttaatattttattttgtctacactggagcatttttttaaaaatagcttatgatacttgttactcttcgcacggttttggttagggttttcccgtcaagaaagttagttctcaaattattattgaattttttttaatctccaaattttgttgattgtaccaaattaatcatgatgtcaaaatgatttgacggaatgaattaacgggttctatcaagccacttgtgacttaatggtgaaactaatttaacttgatgaacaaacattggtaattaccatgtaaaatcaacaaaattccagaatttttctttacatttttctatcttttaattaaaattaaatatatatgtattaccttggtcttcattagatatcttatattaggatactgaagtctaaattaatcctctatcgtggcaaaaatatcgttattaaaattcgttgtatcaagtttatatcaatattttatatattaaaaaattacatattacatattaacataatatatgtaatgtcaactattttgaacaaacatatattaattttcattgtaataataaccagatgtgatcttccaattactttctcataaaccaaagaaaaaaatggttgaaattttcatactgtaaaacatatgcagtactttcaaagaaatttcaaaacatttttgttttatcattgtcttgttaaatgttcttcaatactaaaataatgtagagtaaatttggaaaaatgcattgtttatgtttatacttttgaaaaatatcctcttaatgtttatactactaaatcttatttatttatgaaaaaatttcaaattaagcaacgttttcttatattttttttacattaaaaaaaaattctttcaaaagtataatatgttaggtcacattttaaaagtttgccttaagcgacaatggaccttggcacggcaccgagattcattgatgcaatacagaaaattttgataaagatactaaactatgataaaatgttgcacgttaatttgtgggaaatgagtagttgcaataaaagatatattttccaaagtatatatagttaaaactgtgaagattgtcatttatacgtgaaaacgtgcaaaactaataattgcgataaagacaaaaaccgaaatatgtagttgggattaaataacaactcttagtttattttatttgtttgtctaatatttaattttatttatgtgttgtatgcatatgacataatgattggcttaaattaaaatgggtgaacttaaaacttatccttatataaatcaaagtccctatgaccatttacgacatttcacgcttaatatgttgtcggttgaatagttagaatgtgggagtacacaccgaaatacacaccgttaggcatgactacagttacggttattacgattacggtttattaaccaccggttatggttataatttttttttaactttaattttaaccgttatatatacggttaaaacgattacgattaaatacggttacggttaaatacggttatagttacatacggttacggttatttgataattatgatatagttaatatataagacaaaatattatattttttaaactttataataaaataaataaatagtgatatatcaaataatatttattttacgtgattttgtgtttcaaatatttatagtgaatcagttatctatttttctttaagtaaaccaatgaataaaaaaattaatgatcataattataatgattgaattaattacattttccaaacaaaaacaatactaatgagaagatgttgtgaacattaagaaacagtttcaagagtataaataataataatatgaactacttataatttgatttatggtaaaaagagtagtggagtaacttcgatcatagtagtggacatattaaacaatttaagttactattttagtgaaataattatttatttatacactattataactatattttaaggttttgaaaatacgattaaccgtacggttttgatacggttacggttaattaacggttacagttagtatattttcttaaccgtaacagatctattttcactgttaacggttacggttattaaccgttttatacggttacggttgggttacggttaataaacggttcggttacggtccaaaataccgttacagttagattttggttatgcctacacaccgtaacgactatttttctcgaaaatttacttttaatgtttgatgagaaggtattattgtacaattataaattttaatataattttcgtttcgatacacaatataatctccaccaaaatctttttcatcatggctataatttagtttataattttacttacaagaaatgtttaattgatatcttgagtcaagatgagtctaattaactttataactatataagatgcatctaatatgttatataaaaaaaacacaacaaatgaacataactaaaagaaaatcaaacataacttgttaaagtactgttttaaaataaaacgggtgggtactcacctaattattttaaacctactcttgacactaaactggcctataaatagaacaccatggaaaggaaaagagacacacacaaataaagaaaacgaaaacacttttatacttatattgcagccatg

SEQ ID NO: 7004 - DNA, 3000 bp, Unknown; identical to SEQ ID NO: 6998
  misc_feature (1)..( 3000): cDNA_ID_3049514_gDNA_ID_1621121_Annot_ID_56284 3000 nt of promoter + ATG

SEQ ID NO: 7005 - DNA, 3000 bp, Unknown
  misc_feature (1)..( 3000): cDNA_ID_1816407_gDNA_ID_1621121_Annot_ID_56286 3000 nt of promoter + ATG
accggaacttcttaaccaaattctgagcaagtctcctctcgagtctaatatacttagacccttcttcactctcatcatcatctctcttcctcttcccattactctttatcactaaagtcctctcttcctccactgtaacctaatttcccaccaaaacccccaaatcataaattaaattaaaaaaaaaaccctaatttcataaacaattcaacatttctatgggattatatcaatacctggatatctgattttgaaattccggggatatcgagataaaatatgtattctttgggagattccaaaatgtctattgggatattattgctacttcctcttccacgactctcgttattactttcgccggaacgagaaatcgggagaattagcttctcgatcgcctccggtaagccaaaaaagtggttaatcgcaacagcactcatcttctccgatcaatgactgccagaaaacaaaacagttaaaaaaatcaacaattctgaaattttccaggaaaagatcgatacagagaataggatcattacctgggaattaggataaccctttccaattggatcttcctcttcttcgatttgatagtatggggtttgaaattttcactccattgatatatagtgagtaaacaccagtgagctagaaagttccagagaaaatttctagaagtaactagtgaacttgagagttgtttcaaaagcttccacgtcattaaatctccttttattgggccttataagttatttataggccgtttagcacattggacttgatttatgtctttgttctattttgtatttttatttcttatatctgtttttattgggccttgaaagttattccaggccttagcccattagacttgatttatctcgttttattttagttagagtttttgagacttgagacaacctacctaaccatactatagacaagaaaataaaaatacttttgtatattagagaaattttgaaatccgtcagtgtgtatattcaatattcctaacgaaaaaatggccaaagcataaataccttatagcgatatttgagtatttaccataaaaccattcgaatactgtcacggttctaaatttctaatattgttcttttgttattaaaggaaagagtgaagggtgttttcgtcatttaacatatccatcgggtcaataacggagattacctatccggtgaccttatcccctcgccggtgagcgaatctcagatccaaaattttgcaaaatcctcagatcgtcttaccttctccgaatcgatcgatttttcatggaggacgacgacgagattcagtcaattccatctccgggagattcttccctttcaccacaagctcctccttctccgccgattttgccaacaaacgacgtgacggtggccgtcgtgaagaaaccacaaccggggctttcttctcaatctccgtccatgaacgctttagcgttagtggttcatactccttctgtaaccggtggtggtggtagcggaaacagaaacggacgaggaggaggaggaggaagcggtggtggtggaggaggaagagatgattgttggagcgaagaagctacaaaggttctaatcgaagcttggggagatcgattctctgaaccaggtaaaggaactttgaagcaacaacattggaaagaagtagctgagattgtgaacaagagtcgtcaatgcaaataccctaaaactgatattcagtgtaagaacagaattgatacggtgaagaagaagtataagcaagagaaagctaagattgcttctggtgatggacctagtaaatgggttttcttcaagaagcttgagagtttgattggtggtactacaacattcattgcttcttcaaaagcttcagagaaggctcctatgggaggagctcttgggaatagccgttcgagtatgtttaaacggcaaactaaaggtaatcagattgtgcagcaacaacaagagaagagaggctctgattcgatgcggtggcattttaggaaacgtagtgcttctgagactgagtctgagtctgatcctgaacctgaggcttctcctgaggaatctgctgagagtctcccacctttgcaaccgattcaaccgctttcgtttcatatgccaaagcggttgaaggtggataagagtggaggtggagggagtggagttggagatgtggcgagggcgatacttggatttacggaagcttatgagaaggcggaaactgctaagcttaagttaatggcggaactggaaaaggagaggatgaaatttgctaaagagatggagttgcagagaatgcagttcttgaaaactcaattggagataacacagaacaatcaagaagaggaagagaggagcaggcagcgaggagaaaggaggatcgttgatgatgatgatgatcgcaatggcaagaataacggcaatgtaagtagctgacaattgaacacacaaatgttcctatgatatttgctatgataagctggattttaggttttgatgttgttgttgttgttattgttactgccttgtgggatgtgtaaatgtagagaagttatgactctgattatcatcatgttgttgttattgttatccatcttcttgtcttaaacatgggcaaattaaaaagctttgaacttgaatagcttgttgaaaacctctgtgattcttaagtagagttctgaactagtagtttgtgattctaagttaagacacagcttatagaatattcaccaatgagattagagactaatgattggattagtcagcatatttatccttaaattaaaatctccttaattaagccaaagcttataattaacctcactaaaaatattcaatgcttctctcttctctttcatccttacctctctactacctctataaaaccatttccattgcaaaggaaaaaaaaagaagatagagacagtaaaataaaaacccgaaataatttgaaaaaatattgttatatatttttggataaatttttgttgatcgg

SEQ ID NO: 7006 - DNA, 3000 bp, Unknown; identical to SEQ ID NO: 6997
  misc_feature (1)..( 3000): cDNA_ID_1816391_gDNA_ID_1621121_Annot_ID_56294 3000 nt of promoter + ATG

SEQ ID NO: 7007 - DNA, 3000 bp, Unknown; identical to SEQ ID NO: 6996
  misc_feature (1)..( 3000): cDNA_ID_3438546_gDNA_ID_1621121_Annot_ID_56295 3000 nt of promoter + ATG

SEQ ID NO: 7008 - DNA, 3000 bp, Unknown; identical to SEQ ID NO: 6995
  misc_feature (1)..( 3000): cDNA_ID_1807926_gDNA_ID_1621121_Annot_ID_56297 3000 nt of promoter + ATG

SEQ ID NO: 7009 - DNA, 3000 bp, Unknown; identical to SEQ ID NO: 6994
  misc_feature (1)..( 3000): cDNA_ID_1816387_gDNA_ID_1621121_Annot_ID_56298 3000 nt of promoter + ATG

SEQ ID NO: 7010 - DNA, 3000 bp, Unknown
  misc_feature (1)..( 3000): cDNA_ID_1816504_gDNA_ID_1621122_Annot_ID_56301 3000 nt of promoter + ATG
tttggaaacttcccaaatacaccgaactccaaaaaaactcagtctagtggaacaacaccaggaaaagaagtatgctcgggtagcactgtttcttgtcaaggcatgagaagtacatcatttactctagtctctgatgaaaaattggtatcttgtcgaaaaggccgtactaaaaaagagatagcaatgcttcggcaaaaatcatgtgtggaaaaaattaggacttacagcaaaggcagtggctataaggcggcaaagtttgcatcagttggcagcttccttttagagaaaagagtcaaatcatcttctgaatttgtgccaagaaattcttcatcaaagataacagcagagattggagtgaaagtttcattagctgaggatagcggctgttttgtaagaaagaacagtaagttggattcacctgtggtagtggtagatgcaaagggctatataactgccttacctgctaggtcggtaaaatctgcttcaaaaaaaaagactggttctgagtctgtaactctgataccatcagcttcagaaaagaagtctgattcttcgataccatcaacttcagaaaagaagtctggttctgagtctgaagagaaggcatctgtgtctgcaaagctagcaccagattactatgctgggatcccatatgatgcagctctgggtatatatgttccccgggataagaaagatgaattgattctaaagcttgttcctcgagtgaatgatctgcagaatgaactgcaggtctggactgactgggctaatcagaaagtaaaagaggcaactggtagactacttaaggaccaaccagagcttaaggcactaaggaaagagagggaagaggcagaacagtataaaaaagagaagcagttattggaagaaaacactaggaaaaggctatctgagatggattttgcgttgaaaaatgcgaccagccagttggaaaaagcattcaatactgctcacaggctcgagctggaacaatctatactgaagaaagagatggaagctgctaagataaaagccgtcgagtctgctgagagctttagagaagcaaaagagagaggggaaagatcactgaaggatattcactcgtgggaagggcaaaaaattatgttgcaggaagagctcaagggtcaaagggaaaaggtgacagtgctacagaaagaagttaccaaagcaaaaaatcgccagaatcaaatcgaggttagccacttttgtagacatacgttaggtcttcttgtcttatgacgattatcgataggtacccgcaattcaccatatgtctcatctgctaacgtcccttcctttcatattcgtatctctggtaacgattttattcttttggatacatatatatcaccttgtacattgctatatctaaggaatgcgataaagtaaaggaagaaaaaatgtcagtatcaggtgtttttagtctactgcatccttctgctttaaagtagctctagaaatgaagtgtagtaatatcaagagtgttgttgattgcaattgatgttttttatctatctaggtttggtcgatgttgtatcaggtgtttttagtctactgcatccttctgctttaaagtagctctagaactgaagtgtagtaatatcaagagtgttgttaattgcaattgatgttttttgtatctatctaggtttggtcgatgttgtaagtttgagaaagggttgtttttagttataggagttgatgaagacatctaacgaaaattcctctgcaggctgctttgaagcaagaaagaacagccaaagggaaactcagtgctcaggcttcattgataaggaaagaaacaaaggaacttgaagcgcttggaaaagtggaagaagagcggatcaaagggaaagcagaaaccgacgtgaaatattacatagataacatcaagagacttgaaagagagatctcagagctgaaacttaaatcagactactcgagaatcattgcactgaagaaaggcagcagtgagtcaaaggcaacaaaaagagagagtcttgggatgccgaaagtgaaaagagaaagagaatgtgtgatgtgtttatctgaagagatgagtgtgattttcttgccttgtgctcaccaagttctttgctttaaatgcaatcagcttcacgagaaagaaggaatgatggattgtccgtcttgtcgtggaacaatccataggaggattcaagctcgtttcgctcgctccgggtgaaagctttcttaacagtttaaacttgtagaaacaacagtctctcttctatctatgaagaacacaacaacttttggttaataatcccatcttggctttttgaatgattttaactaccaagccaattagactacacgtggctaccttatggtacttattttcatttttgcccttctaattttctttattaattaatgtattcatatcaccataaactgcaaaaaaaaagttaattttggtgaataaatcgacgccaagatagaaatatcttggtcacaatcaaagattcaataatgtggggcgtaaagcaaagatttataaactatgaagggtgtcaatgcaatgttttaaaaaaatacagatagaactacacttatgaaagttccgcgtatgaaaagtcaaaaaagacattaacgttgaccaaacaaaaaaaagaaagaagaggaagacattaacgaagacttcgtcgccgacgactttctggatttatcgttgttgttgttaatgtttacctcttccgatttgaagcaaattagggtttatttccatccaaaatctccttttctcatgctcaatgatcaatttccccccatttcaaagttatctctctcatctccaattttgaattttctcccgatttgtctggctttctccattgctgatttttcaaagttttcttctccattcgtcgtatttctgggaccgttcttccctatactcgccatcgtcaattcgactttgtgagtctccctctgcgggagttcatcagcgtcggcgagatg

SEQ ID NO: 7011 - DNA, 3000 bp, Unknown
  misc_feature (1)..( 3000): cDNA_ID_1808095_gDNA_ID_1621122_Annot_ID_56302 3000 nt of promoter + ATG
gattcggattcggtttctggaggatctaggtcttccgtgaagacggatttgaagaaattcatagcgtaaagctcagatcttaccaatcggtactctcagataatttgtttgatccgtgaaagaatcaatttgaagagtgaaggattcgaattagcgtcagaaataggaagatcacaaaagacttgaagcttgtcgctgcagagacgtctaatttttttcccatttttttaatgaagataaataatactttatttggcgtcaattatcagattaatgggccagaagttttataaatgggccagaagttggatatgttagtccaacaaataacacaaaaccctagaattcattcaagggaactaacgtcaaggtttttgctcttcttctctcccaagtcccaaactcgttttgcatcgccattgttgtgttgctggagctaaatagagagaaagagagagagtgtctgtgatggtgatgagaaagctacagttaccgttgagccagacgcagaaggttaggtttgagagagcaatcgagcggcttcaatcactgtcgtcgtcggctaactctgacgcttctgttatcgtcaccgactctattcccgtcaaccatgacgatgccttcctcaagtaatttcatctcattctcccttctggattgaaatttttgtcaaattgcgttttcacgattggttttttcattaaaggggacatggaacttccgaggtcgatggtgagttgctcgcgacggtctgtggagtagtggagcgtgtggataagcttgtctatgtacgcaccttgcgagccaggtctgtgattgatctttgaatttgtttagtttcccagaaaatgtgaatagaatggactctctactctgagattaagtagaactgatggttttgatgatctacgttttaggtacaagcctgaagttggggatattgtggtaggccgtgtcattgaggtagatttttgttttggtgtttggatttttgaaatcggattgagtgagtaacataaaggtttcaatcacattgcacagttactggattgatctttacttattcaggttgctcaaaaacgttggagagtggagctcaacttcaatcaggatggagtactgatgctttcttccatgaacatgcctgatggtattcaggtacagtttgattcttgatattttgccatttggatgattgcttttggcttcaatgatataagtttattgttgttgccagaggcgaagaacctctgtggatgaactcaatatgcggaatatctttgtagagcatgatgtcgtatgtgtaagtcctgtgattagtaatgttccaatctttacatatcttaacagttacgtcaacctgactaaaagggttccctctttggtttgttcaaactcttaggctgaagtacgcaactttcagcatgatggtagcttgcagttacaagccagaagtcagaagtatggcaaggttggttctcatttggtcacatgctcatgtagttatacctttcgctagtctcttcctctgaacattgattaatccatgaatcgctacagctcgagaagggacaacttctgaaggtcgatccttacttggttaagagaagcaaacatcactttcattacgtagaaagtcttgggattgatttgattattggctgcaatggtttcatatgggttggagaacatgtcgaagtgagagatcctatggcaatagatgatcagaaagatgaggaaatgatctcatcctcctccacaggaaaagagcaaagccatattccactcgagactcgacaaaccatatgcagaatcgggaatgcgatacgtgtcttgtctaatctaggcttcaccgtgacactagaagtaatcatggagactgttaacctcagtaactcaaagaatattgacatacatgatatgcttggatcagagtttcacgttgtggtagcagagaatgaagctgaaagaagacgtacaaagaggaaaaagtgaaaactacccctttttgtcactgatgtatcagagacttgtaacgtgtattagatcattcggtcttgtttgttactcagcttctattgaaagttcgaattttaatctgattgagatatgtagtatgatggatgtgtttgatactattaactgtacatcagattagattagtcgagttatgtcttttggagacggctttcttctttcattcatgaatttatcggtttcgacttttgtagctgaaattcgttttgtgaaaggatctacagttgcagaaacaacatagaaaagattcgctgccctttttagctcggagaagggataattgggaaatgactaaaataccctcatgagaatccaagtaataacagcgattaccaaacctcttctctcattcacgaaacagtgttctacggccaatttctctcgctcgctccacactcccaaaacaatattcttcttcttcgatttctcactctctgtttgtcgctaccgatcttatttcccgctatttttgttccggcgccgttctccttaaagtcgctattgtcttcgttgaaggtcagtttacggccttttttaaatccattttggtgtattcgtgattgtttgtgggttgaatgatcgtgcgattatttggggtttttaattaatttcgattcagtaacggttctgaattgcattgcgattaagcacttaatcagaaagtagtacgctttagatttgaggaatctctgtacatttactaggcaaaaagtttactttttttttttggcgtatttctgggattgcattagttaggcgattgaatcacgtttctgaaagctacaactaggagatgaaatcatctctcttttgcatgtatacagataatttagatgattttggtctaacatctttgatactttaatggtttttgcatatgaaacaatttcgtatctatgttctacgcttttttgtgtgtgtttaacttaagtcgttcatgtgtaatggattaaaaaggtgatg

SEQ ID NO: 7012 - DNA, 3000 bp, Unknown
  misc_feature (1)..( 3000): cDNA_ID_1816482_gDNA_ID_1621122_Annot_ID_56309 3000 nt of promoter + ATG
tccacattcatctcccatattaagcactggaactccaagtgatatgtactgtataaacaagaaattgcggatttgttttagccttctttgaagaacagctgatttattcgttgctccttcttccccacaattccaacttagctctgaagctagctcagggccactgaaactgactatgtcaacaagcgagagtcctgagtttcttgaaatgtagttgaaggagaaggccggacctcttccatcggtaaatacgtcaccacttccacaaattcttgtagccagatcactaagaacgcctcttccccttaaaaaatttcttacatttcgacaatatcttgtgttgagttctgcccatcgcttccaatgtgggaaccgtacttcttttggcatcatttcaagtggatcccagcaatcagctattagtttggtctccgcaagaagtggatcaaaagctattgcttcaaccaaaggaggacgagagagctgttcaccgtgaacgcctctcaagagagatgaagcatttataaaacaaaatccatctacatgaaactcggttacccaataacgcaagctctccaataccaactgctgaacaacaggatagttacagttcaagtaacttttagaatctagatcattggctcttcccttgtagtaataggaactgtcatcaattccacgaagagctccagaatcagcagtatgtgtaaaaactacttccaaaagtacctctattccctcactgtgcaatttcttcaccatcactttcattgagttaactgcggattcaaggctattggaaggtccatatatgtccattggtgaaaagaaatgaaatggaaaataaggacctttttgctcggagaatgagaatattggctccaaaagaacagcgttggttccaagggttttcaaatggctaactttctcagctacaccagaaaatgtccctgctacgttactaggcaacttgctggatctgtgttgtgtaaaacccttcacattcaaccggtaaacaagaagtttctccagaggtatgttcggagacacatcttctccccaatcaaaagaaggactcttagataaacttccaagatatttctgagagacagatttaccaacgactgtggcatatggatccaagacaattggctcaccttcaacatcgacatcttctttagagtgagctgtctccttgcaacggtagccatatctcacaaaatcccatgtattgtcaactgaagcatgccaaacatcacctgttcggttgacataaggatcaagatcaagttctaaagcaggtttatctgttgtgctatcatcatacaagcataaaaccacgttcgttgagcttcttgaaaagaacgaaaaattccaagaatcatcatctggcccggaagaaaggcctagcggcaatggatgaccagcagtaaaaccaaccgggatacagaagtcagtgtccctgtgagtcagcatttcttgaccgtccggatctctacctgacactaacttcaggtgaaatgataagtagaaaggagattctttcccatcaaattctagccctagcattaactcagacaaggagcttttcacaaatgtagtttctgttgtgtgggtttgtgagtcttgggaagagttttcgaaatccagaggcaaaaaacacgaagaatcagacctgtagacaccccaaaccatcaccagcctactcttgtcatcaccactaagttccaaagatgagacataaaccaaaatgctgtacttttctctcttcttttcaactttgactttaaccagagcacctgcttttgtcctgaatgaatatgatgttaccttcttcaggtcatcagcctcagctcttctactagacaatgcctctctcagctcgatggaagtctttgaagcacatatcttactaaactgataactttgcaacgcgcttgtaaccaaatcacccatgaaacgttttcgtgtaaacattagtgtctcggatccaagtttaatcttgttcttcctaccagtaaaaagccttgcagaaggaaacttccatgttctagtgatgccattattgagacaacaagatcctatcccaactgatggtgaccacgcagccattgtttaaacaaagcaccaaaaactttaatccaggttatgaatatccctgttaagaacacagatcaaaccccaaagctctttattaagattgaacgaaagaaaacagaaaccaaagcagaatttcgcaagggaaactatatccaataaacaactcgttgaataagctaaattcccatctcaaagctaaaatcaaaacagaacccacttagcaaagttttcctaccatcggcatttcaaatttccagaaattaagaaagatagtgtagtagaatcaacaagaacaagacgtctcgggatcatgattcatcggaacactaagaaataattgaaaaaaaaaaggaacacaagaaagcgtaaagaagagacaaacgtcgtcaaaaaagtcgagcttactgtcgcataagcatcatcaccgccattgaagcaaaaaaccaaacttggaaacagagaatttcacaatgattgaaacagagatatctaacactacccatctgatgatcgagtgagtgtatgtgtccatgagtttatgatttgattttttttgggtgaaactgaaatgttttgtcttcttccttcacgaactctccaccttcacctcacgcgcctacaaaacggtttttagcgattgtaacatagacacgcgcgtaaggtgcatgtgggggttgaaaaggagtgatcttatctgggccgagcccataggcccaataattttgaaagatacgacaaaagtacttttcagttttgaaagttcaagacagaagtgagctgagctgttttcacttcaagagtggatattgccgttttaaggtgtcacttcaagagtggatttttactacttttgtttttagggttttgtttttggagcctaaacattgttagtttctgtca

SEQ ID NO: 7013 - DNA, 3000 bp, Unknown
  misc_feature (1)..( 3000): cDNA_ID_1807717_gDNA_ID_1621122_Annot_ID_56310 3000 nt of promoter + ATG
gttcgttttagactgcatcggatgaaaaaaaggctcaaagatgagctagaagataagaatactgttcaggagtatggctgtcctaactgccaaaggaagtaaagcccattactctttatgtgtttataaaatctttacatggatgagttgtattatgttcactaaagttgaatagattttcatttctgatgtagatataatgcgctggatgctctgagattaatttctatggtagacgattcttttcattgtgaaaattgcaatggtgaacttgttgtggaatgcaacaagctaacttccgaagaagtagttgatggagatgataatgcaaggagacggcggcgggaaaacctaaaaaatatgcttcagaaattggaggtatctgtatactgttttagtggttcaatatgcttgattgtgttttcttttattctggctttagttatataatttgtgcgttgagagaatttgagtatgaaatgcaggttcaaatgaaacctctgatggatcagttaaatagagtaaaagacctaccaatacctgaatttggatcttttctggcatgggaggcccgtgcagcgatggctgctcgcgagaatggtgatcttaaccctaatgatcctttgaggtcacagggcgggtatggttcaacaccaatgccatttctcggagagacaaaggtgatcactagttacacttttcaatgtatatagaagttcaatgttataatggaagatgaggcagtggtattgtaatgaaatttccatttgtttgtccagtcagttcatgttaaagcttttttcattgcgcatatacatctgcaaattttccctgcacttttcctccttcattgtggtttgttgatttcttaaatcttacatggttaggttgaggttaacctaggtgatggaaacgaagatgttaaatctaaaggtggagactccagtctgaaagtcttgcctccatggatgatcaaggaaggaatgaatctgaccgaggaacaaagaggagagatgagacaggaagcaaaggttgatggtggggcaggagcagcagcaaaactttcagatgacaagaaatcagccattggaaatggagatgagaaggatttgaaggcatgcttttggggacaaatcctttatatctatttagactcccacagtagcttcgtacttctggatatgtttcaagaatcttgatacagtattttcattttgcttcaggatgagtatctcaaagcttactacgccgaacttatgaagcagcaagagcttgctgcaaggcgaaatcaacaagaatccgctggtgaaccaacttctggcattcagtcgggtactgtatactcaggtcgtcaggttagtatgaaggccaaacgtgaagaggatgaagacgaagatgaagaagaagtagaatgggaagaaaaggctcctgttactggtcagtttgagtttatttacttcatttccatttcgcatactcgttgatcaaatgaaacgacacactagttagttagaataaaaggaaccttgtttagtagtatatattgaaatcgcagagcttcaacaagaagaaacttgttaagacatgctcataattaagttagattacacaggtctgtcatggttatatgatgtaaaaagattatgatatgctcgatttggtaacttaacattttacgactcttgcagctaatggaaactataaggtggacttgaatgtggaagcagaagcttcgggtggtgaagaagaagaagaggaagacgacgtcgattgggaagaaggctgaaaaacaaatggatcaaccattgatcatagaatgaagtggtcgattgtgaattctcatgtacactataatgattaatgacttttagtatctcaccatctacaccaaaggttgatttatctgtgaaacaaaaatggttttatggttttggacaaaagtccaatttacaagggtgttactgttaagtgttgttgtttataattctgttgggaaatatttatggcgatatttgacatgtggttaagtgtatttttgaattaatctctctttttgtaatttttgtttctttcgtaaattagataaatctgttgagaaatagattcacacgcataacgttcatttgcttcatccagaaaaatattggaaaaactaattaattcagtattatttttgtaaataaaataaacaacaagccaatcataatttaaggtactttcccagttcgacaaaatccaataaagaaaataatatttgtcccttgcccattggttgttgcatggacctagccgagaaagccacgtcagtgaaagtcaacaacttgacccaaataccctcggatacgcaacaaaattacgataccacccacagcacgacttagtcctcaagtcgttaacataagagacggagcaaaactttagttacaaatcgttcctcctcctcctcatcttcctcacagctctcgcttctgatctcttacttgcacagaaatcgaaaattttctaaagcttttgttctattctcttcgttttcctctggtaattgaatcgtcgaatttgaaacttgattttcccgtgtgtatttttttgatgatttgtgatcgtttctaaaaattatagtttgatcttttcatgatccgttgatgattatgacggctaggtatatctcttttctcttttcttttttttttgattaggttttacaattctacaattttagaaagcttgattaggtgatactgagtttgtacttttcggatcattgctcttttgtcttctgcacttgtatgagagtgtgtctctctcatctattttcatatcacggattttttcttcagggtttttaacattagggttttcacaagaggcttgtgatgtggctttactagtttatatgataaattatttccagagaatttcttgtatgctagtcttctttgcatcaaaactaatattttgcttgttttttttttctgcagagtttattaactttcactgatg

SEQ ID NO: 7014 - DNA, 3000 bp, Unknown
  misc_feature (1)..( 3000): cDNA_ID_1816478_gDNA_ID_1621122_Annot_ID_56311 3000 nt of promoter + ATG
gggggtgaactgacacacgaggaaacaatgattataagcggagctctggatttgagccagaaggtatgtatttgaattagatgtgcgtatctgaaacctacacaggtcatgctgatgaacaagttatgttgtaaatgaaatgatttacttgctattccccattgatctggatttagattctccatgaaaacttgttgcacgaggatgagtttactttgttgaactgatgcatatactttgattctttcgccttccagttcagaacatatcatatactgcttcaatattacttccaatgatctaattcatatactttcgtttactggaagttcagactgctgaggaggctatgacgccaattgaatcaacattttcgctggatgtaaatacaaagttagactggtgagttaaggttagagttggccttttttcgacaaattgttttctctatctggcaagtctttgaaaagtaaactattttccttggtctatctgcttagtaataacgcatggtttgaaatcatgaattttcacctcctaaatgcagggaaacaattggaaaaatactgtcacggggtcatagccgaatcccggtctacttagggaatccgaaaaatatcattgggcttctattggtacacctgtcaaacttttgcattacttcattttactaaatcctactagattacatacgtctgtatccgctggtatcatctaggttaagagtcttctaactgtacgagcagagacagaggcacctgtaagctctgtttccatcaggaagatcccaaggtatatctgacttccctgagtataagttgacctactcatattatgtttctagatagaagtataagttcccatacattgcctttccagggttccatcagacatgccattgtatgatatcctcaatgagtttcaaaagggaagcagtcacatggctgcagttgtcaaagtcaaagacaaagataaaaagaataacatgcagttactgagtaatggcgaaacacccaaagaaaatatgaagttttaccagagtagtaatttaacagctcctttgttgaagcatgaatcccatgatgtagttgttgatattgataaagtaccaaagcatgtgaaaaataggggaagaaacttccaacagaacggtactgtgacgagagacttaccgtgtttgttggaagataacgaggatgcagaagtgattggcatcatcaccttagaggatgtctttgaagaacttctacaagtacgatcttatgcttttcgtttttccttttctgacctcaaaaatctctcttttatgcatatttttttctatatacatttcactttacggagctttcctttggtgatttactgaaaatgcaggcagaaattgtggatgaaactgatgtttacatcgatgtacataaaaggtattgtagtggtatttattacttctgagtcacttatctaatgtttaccaaaggaaggttctcactaaaaagtaaaagtgcatcatattttgctattatttcagggtacgtgtggcggcggctgcagcagcagctgtatcatctataacacgtgcttcaccagcggtaagcaagcaacattggctgatcaaatcttcggcatctcttaaccaataaatttgaaaacttgtgaggggttaacggttattttgtgtgatacaggagattcaaagcaaggtaggacaaacggtgaagaagctagttgggaaagaagcacgaggtacaaagaattacacaacaaaaatcacagagcctcttttagcagaatcagatagatagtagttaaaaaggtttaaggttcagtagcacttactttgttgtatgtttgtgtgtgtctatatataaagttgaaataatgaacaaaaaaaagagaagaaaagagttttgtttctttcaaaaccaataaaatggtacataccgatttcatcagcttgaacgatatgaagtatgagcacaaaagtggccgatgactcaaaatgtatttccatctttctccttaatgcccaaacgagagatatcatctatagctcgataccaaatccattaagtaagtattcacgtaatgtagtaagcaacttctcaaaaggccaatcccatggccatgagtaagtgaatggcatgtcgtttaagcaatgcatatgggtcaatccaatctctggtaatatttttcttccgtggaatgttaatggatttgatgatttgagttcatttatccaaccaaaatcttgttattaattcaattataatcaactaaaataaaagcaaattttttgctaattacagatacaaataaaatcaattatggaaattgaaatgaaaattaaaatgaggttgatctatatacggtaattggtaaatgttaacaccaaaaacagataaaaacacaaaaaagggtagacagagaaaaaacaacacagagacctctccgtcgtgttctctccccctctcttgaactttccggtaagcttcgtcgattttcctgttggacaagtgattgtaaaagtagatagttttgattaacctagatatctccattcttgtagaaacttcacctatagctcagtcgggtctgattgttacttcgaattgagtcgattgatctgccttataaaccctaatttcgtggtccttgtgcactctcacagtttccgaacccttattcttgattttctgaatttcctgagctctctcttgttactaatttgatttgaaagatggatttgggagtcaattcttctcatcgatggctctgggttttgaaattgagttcgttgtttctatgatttttgagcaaatatcatctccgttggttacttttagtgtgtttaagtttttgaacagctaatctctgttagttacttatacggtgattgatctgttttcagtttattctctgtatcaatgcagattttgtatcaaacacgaacctaatactgcttccttgactggtaatgtaagtatttgggttgttaactccatg

SEQ ID NO: 7015 - DNA, 3000 bp, Unknown
  misc_feature (1)..( 3000): cDNA_ID_1816472_gDNA_ID_1621122_Annot_ID_56313 3000 nt of promoter + ATG
gccagatagagaaaacaatttgtcgaaaaaaggccaactctaaccttaactcaccagtctaactttgtatttacatccagcgaaaatgttgattcaattggcgtcatagcctcctcagcagtctgaacttccagtaaacgaaagtatatgaattagatcattggaagtaatattgaagcagtatatgatatgttctgaactggaaggcgaaagaatcaaagtatatgcatcagttcaacaaagtaaactcatcctcgtgcaacaagttttcatggagaatctaaatccagatcaatggggaatagcaagtaaatcatttcatttacaacataacttgttcatcagcatgacctgtgtaggtttcagatacgcacatctaattcaaatacataccttctggctcaaatccagagctccgcttataatcattgtttcctcgtgtgtcagttcaccccccttaccagcctatgttggagagaaatagcatgtcaatgggagctggaaacaacaatacttttgataatcaagcaacgtaactaactacttcacaaatcagacaaggttacagcgtaatatctgtccttttcctattctggattcgccaggttagatcataaagggaaactacctcctggctgtgaattgagacaagggctttaagctgagctcgcctaaatagtgtgtcattatgcccaattacagcatcaagaacctgaggcatgtaaaacgttgataaaagtaaacatctacagctccataccactgtggcataataaatgtatcaacttgtgttgatgatataatcaatgcagttagctctaacaagtaccacttcttaaagacattgctagatttttcaacaaatttccaaatcttccatggttgtaacataacgttctgactattgtagcaactagtgaaacaaaaccatttattatgacatttagtgctctattaaagagtagtctacaacaacatcacctttccgatagggtaagcaatcggatagcagattatcatcaaaatgcgaaccaaccacaaaaagtttgcgccaacagcaagtccatatctagagcatatagcttgcggaattatctggttagaattgcaacaacatagtttgtatcagtcataactgaagagaacacaatttgataccaagaagatatgtaaagtaagttacctctccaaaagcaagaacaaaagtaactgagagtaaaacagccacaaaaggatggaatatcttatccaggcatataggaagagcctgagacaaaagatccaagaacaaaattcactgattctgaggtgcacaaagacagtaatttatcgttgtaaatcagaaaaactagggtaacaaatcaacaataattaacctccatagcagctgcattgcaaagaagtagagtcacaagaagttgatgctgcttctttaccactggtaagattgcagctgcaatatccaaaaacaattcaagtaactccgtcaagagtaaaaatagagactctatcactctgcttttaacaaaaattacagaataagaaattagaaatcaagttttaagaaattctatagccattacgaattgaacaagtcaggtatgtaattttgagccaacaacacacagatatcgaaagtcgaaaaaaattaaagaggcgtaccggcctgttttttctcggcggaggaaccactctgttggagaatctcgagctcaacgagaccaagggacattagtccgagtgtgagacccgacattattccggcgaagagtacgaggaaacacgcgacaccgacgacgacgaaccaccacggagaaccgaatcggatgtcctcggcttcaaagacgaaactgttgagcgagtaagcggctcttaccaacgccaaagtgctcagaacaaccattgccgcgcttcgatgagagacaaaatcaaacagagacggagctagagagagagagtgtgtgttttttttgttggtaaggaagaagacgacgatgaatacctttgatacggggatacatggaccacctgacacgtcagcatcctacatgcgttatttccttatttttctctctctttttttaactcatgcgtttttttgcgttattcttcttttaattgatttgttggattattgatgacttctgagttttgctaatcatcttatttattcagcgtccaccggttttaacgcccgagaacgatatacaccttacctgattacctctaatcacattattcttgagattatcgaaggtacatttggaccgctagcaaaaaaaaatatgtaaatacttatttttcaagttacaaagctaatgttattgacaaaagaaaaaggaaaaaaaaggatgaaatcttggaaagctacagcattttgttctgcccaacgcaaattgtaacactaaagatttcgtatggtcaacgtgaatgataatttaatcgtaaatattttcttaagtgtaaaccggtatttaaattcccttaattcatcggaaagattttggtataaaattgatttactttctttgggcttttgggggtcaaactatgagcctaataatggcccaaaaagacttggcggaaattactttttttttttatttgactagtgaaaccggaacgagcgagacgcaacagaatctgaagatcgaaggacagtgaaatcgaagaattgaagcacaagcttctccatctctgcaatctctctatccatctctcgtcatcgcatgtttcgcttcccaattcggaagaaagagagacgacgcgtctgaagcatatctccgtaatcggggtgaagaaaaacgcggcgagaagaagaggcagattttcgttttgggagggtagacaaatctggcgaaagtggagggcctaagggcgaggccgtggcttaagccaggagcttgtataaatggagatcaatatgactacgacggttcggaagacgaccattccaggccttggtggcgccgtcgtctcagatccttgtatatggcagcc

SEQ ID NO: 7016 - DNA, 3000 bp, Unknown
  misc_feature (1)..( 3000): cDNA_ID_1816468_gDNA_ID_1621122_Annot_ID_56314 3000 nt of promoter + ATG
ggttcggaagacgaccattccaggccttggtggcgccgtcgtctcagatccttgtatatggcagccatgtcctttactccgtccacttttcgaatcgctatctcgttgctccttcttgttgctatcgtctccgccgtcatttttctcccggtcgaacaggcaatttctccctccctcctcattcgcgtgtagctttagtgataatgtagcaacgatagtttctgtatattctaagtttagaaattgatacaacggagtatttctggagctcgctagatcactagagaaactgtcctagatcaggcgaatggtactttatatatgatttagaatcatcattaatcatcattgttatgatccctttctgcagaaattgaaggacttcttgttatggattaaggaagatcttggaccttttggtccacttgcattgtaagtttttcatgtttgctactcatttttgtttctaccacttattggtttgttttggtgacactgttttctggctgccgtaaaaaatcttgtgatgagccttttttaccttattgaaatttttcagggctttggcttatattcctctcacaattgtggcggttcctgcttctgtactcacggtagttctggattcataactatgtagtgaaatttagggtgcttttctaagatgtttgtccaaagttttcattacaagataggatacttagacttttaatccggttctgatagtcttgattgtttctctctgcagctaggtggtggttacctttttggcctgccagtaggatttgtagccgactctcttggagctacattaggtgcaacagcggcatttctgcttggtagaacggtatgtctcttatggttccatctgttttaatatatttcgcttgcaattgtgttgcttgccataaccacagaagtactgattcctgttttgtgcgtcctcacatctaggcattttatctaagtgttgcatcttggctgtctcattgttgctaatgatatatcttttgtctttctggtatcatgcagattggtaaatcttatgtcacttcaaaaataaagcattacccaaagtttcaagctgtttccgttgcaattcaaaaatctggcttcaaggcatgaaaatctagtaacactctctataataattgacagtttgttttccttcagagatctactatgcgtatggcaaagtacctcaatttcctggctacatttaattgattgactactaactaaatgatgatattttcttcctgtgcagatagtcttgctgctacgcgttgtccccatactgcccttcaatatgttgaattacctcctatctgtaactcctgttcgcttaggggaatacatgctggccacttggttgggaatgatggtactgacatttctttaaaatccgcttgtatattggccatttatactttaataatggtggaagaagttagcatgcatgttaaagtgctgattgctaacattatacataatagtaattctaatcttctgaattgttttgatgtagcagcccattacatttgcgctagtatatgttggaactactctgaaagatctttctgatattacacatggatggcatgaggtgtcagtatttcgttgggtaagttttcgctcatttacttccacttgactagtagattggaaatgattgtagatgagcttgaatgaagtcagaagaatgaagatagttttgtgtttctgctgtaatgcataattacttatcacttatcatttatactgagattactaggtttagaagtttgtagtattagaaaaataacaacttgtctgaaatgaagtttgaagtatgccttattttatgaggtttattggaaacatcttggtgtatatccctcaatataatgtagagttgcttattttccataatatgatagacatttctgggatctgaaatattgagaatgtagcttaaaaatcctgaggatgaggatttataaccaagtccaaagcatcctatgtgtagggaagaacattgtgatagtctcgcatctgcatttatttagttggtattttgtagctttgattgaagtatctgagtgcccttgcattgtaagtctgatttctcgtttcttctgcattgtcatttgtggatgcaggtaattatgatggttggcgtagctctagctggtaagtctcttctgcagtcatgtccaaatatatatctagctagcttcactacattgtgagaagtggaatgacaccatgtggtctgtgttttaacccgtctttttttgggtttttgaatgatgtgggtgcagtaattctgataatatgcataacaagagtggcgaaatcatccttggacaaagcattggctgagaatggtactgaattagatgggaagaagaatgacgacgcttccgtactcccgatcgcagagccaccaccggatctacaagagcctctcgttatcagaatcgacccatccaatacttgaataatatagacaagaagaaacctcttgagtttgtaaatttcgcgaaattttcttaccgagtgagttattagaaacgttttgtatagcatcataataccatacttcacagtttaattcgtttgttctttagttgattattttggtatatacttgaggttttgaaatcttgtaacttgtaagaatgcccaaccggtggctacaataattaaccggaaattaatttgactcgagtccttatcagaccggttgaatcggtcgagtcaggtcgggttagaaaatatcaatattcgggcatattccttggccttcatacgtgtgcgtctgccattttttttctaaactccgaatcccaaaattgttgccttccttcgtctccgatcattttcgtggtgtctgtaaccccaattacaattcgaatccattagcgaaagaaagagacttcctttgaaagagaagagtctcgttggctcggttttctgttcaaatcagcggatttcctcacatttaattgttcaatc

SEQ ID NO: 7017 - DNA, 3000 bp, Unknown
  misc_feature (1)..( 3000): cDNA_ID_3049545_gDNA_ID_1621122_Annot_ID_172133 3000 nt of promoter + ATG
gttttattttagtttatctgtataatatgtctatatgttatcttgtcttttctatttttagtacgatttcttgaggagactagtaatgttttatagttctattaaatgtattaatgttaaatggacttattataatcataattattatagtcagattttataaataatcatcataacaaccaataactgaataataatgtagtggtactatttatcttctttttgtacgtgaagaagaagaaaagaatccgaaaatgtcctttaggaagcttcctcgaatgattttcccatacacaactcttttcagttttcccactcattttctctgtgtatagatttccgactgattattatcattgtttgacaagatatattttctagttagaaaatttctgagcggttcatttcattccactcatgttctctgtgtatcgatatacaaacttaaaaatgaggtcttacaaaatacttggacagaccaattattatcaatgtaattaggaagacctgtacgtagacaacatcagtagtagtagcaggagttaatatttaattaggagcatcaatagtagcagttgcatatgaattaaatgattcgaaatgaactaatattcatatattatatcaaagataatgatatcttggagtatttatttaggtcaccagatgatgatttatattttaaattacatttttaaaatcttataatgaacttacactaaataccaaataaaaatttctgttcagtatgatttaattctataccagtaatttctaacacactataaattattaaatatagttgaaatgacttacgtaaatgtttttttttttttaattacgtgcgaaaaatgaatatgtggtacgtacaacggccacatgaacattaggaaagattgttcccacacgcccacatgaccatcacatgcaaaatctgctcacttctccttttaactcccaccattttttttttttaattttgccttttgctctttcatttagattctgtttctggattttccttgtacgaattgtgaagagactctcttactttttttctcctaactttctttttgcgttatcataccaaagtgcatgacctcattaatcattttactttcttttttttattataaatttttaatatttcgaacgttattgtttacttgttgtctcattggtcgatataatattagattttgcttatacacaataaacacatagaaccggtaggtatatatcatataaaatttgaagtaattttatgcgtgcatccatcaactgagaatcgatatgcatgttgttttgccagcatcaatcgtttgtttcaagtttttggttatagaataattggtaaatgaaacataaaacatgagcattttcattatagtctcatataatattggataattctaaaaaaaaagaaaaagaaaaatctaaattaattcatggtggtttagttgttgaatgtctacctttaaagataaaaagcatggttctagttcccttggtttcgagtctaattatggttggccatttcaaatgtttctagcatattcgtctctttcgtaaattttagagtaatttggaattcatccaatacatatattatctttcgagaatcggatgccttttcattacggttttttttttggttcattaggagttagttacttgaccggttataacgagactatgagtcaagatccaaaactctggtgttaaatgttataaactcacagaaactgtttcgaggtgtatgtattctgcatatattccccgacatggacgaagaaattagtctcagtgtccgtacataatgaacatcccaacatataaattttgcaaagtatataaatgtccaccaatgagaattagacaacctatgagtaatgtccaatctaaaaccccaaaagtgtgtaaatatattaaagtgtcctttgtttctctgcaaacgaatatcgagagagaactctatttccatggttctatgtgccacttgatgcttattattggccactatctcatgcggcacccatttctgtgatatctcaatcattctttttaataatcaaacgtatttttgtttgcgcagtttctattttgagttttgatgaccttcttttttggtaacctgatctcttaaaccgaacaatcactagtttatattggtaaccaccatatcaattttggcaacaaaaacaaagccgctacaataattttgtatggttaaatatgtgcattcattatagtttactacgttataatgtttcgactaatatatgatgaaattggtcatcagctcatcgcatacaacaagatgttgtaacagttttagttatgtttccttaatggaatgaaactaatttgaacggaatccgagagatatgaaacataaaaaaaatgagagggttttataccaaataatcttatgttttatcattaggtaactttattttttgtttttaattagtggaagtacacgtgtaatgaaaaataacatacaatatggtcatgaactatattttttttgtcaaactattcgttactaagttatttgataaaaatagcacgattatacgcgcgatgatatatatcaaattgtggaaaatgttataaagtagaaaattgggccgaagctggatccaattatgattctcaaataacgtgaaggaaggcattttagtcccctctatacggcccaaccactcgccaccgcttattggtccaacttcagggtactttggtaataaatcaaagcttagcttttgaaattaataaagtataggggttgatttgttattctcagtttctatcgggttaatttgtcatttgcatcgtttctagtttccacttttgttgggtgattttcttctctggaaggatctgtttttctcttcttcgtcttctctcacccgcctactgactttttttcaaatttcttcagcaacacatacatacagtcacaaggtttccaattttcgattcacgatggaaatg

SEQ ID NO: 7018 - DNA, 3000 bp, Unknown; identical to SEQ ID NO: 7016
  misc_feature (1)..( 3000): cDNA_ID_1012855_gDNA_ID_1621122_Annot_ID_172125 3000 nt of promoter + ATG

SEQ ID NO: 7019 - DNA, 3000 bp, Unknown; identical to SEQ ID NO: 7015
  misc_feature (1)..( 3000): cDNA_ID_1816472_gDNA_ID_1621122_Annot_ID_172124 3000 nt of promoter + ATG

SEQ ID NO: 7020 - DNA, 3000 bp, Unknown
  misc_feature (1)..( 3000): cDNA_ID_3049554_gDNA_ID_1621122_Annot_ID_172123 3000 nt of promoter + ATG
tcaggatttttaagctacattctcaatatttcagatcccagaaatgtctatcatattatggaaaataagcaactctacattatattgagggatatacaccaagatgtttccaataaacctcataaaataaggcatacttcaaacttcatttcagacaagttgttatttttctaatactacaaacttctaaacctagtaatctcagtataaatgataagtgataagtaattatgcattacagcagaaacacaaaactatcttcattcttctgacttcattcaagctcatctacaatcatttccaatctactagtcaagtggaagtaaatgagcgaaaacttacccaacgaaatactgacacctcatgccatccatgtgtaatatcagaaagatctttcagagtagttccaacatatactagcgcaaatgtaatgggctgctacatcaaaacaattcagaagattagaattactattatgtataatgttagcaatcagcactttaacatgcatgctaacttcttccaccattattaaagtataaatggccaatatacaagcggattttaaagaaatgtcagtaccatcattcccaaccaagtggccagcatgtattcccctaagcgaacaggagttacagataggaggtaattcaacatattgaagggcagtatggggacaacgcgtagcagcaagactatctgcacaggaagaaaatatcatcatttagttagtagtcaatcaattaaatgtagccaggaaattgaggtactttgccatacgcatagtagatctctgaaggaaaacaaactgtcaattattatagagagtgttactagattttcatgccttgaagccagatttttgaattgcaacggaaacagcttgaaactttgggtaatgctttatttttgaagtgacataagatttaccaatctgcatgataccagaaagacaaaagatatatcattagcaacaatgagacagccaagatgcaacacttagataaaatgcctagatgtgaggacgcacaaaacaggaatcagtacttctgtggttatggcaagcaacacaattgcaagcgaaatatattaaaacagatggaaccataagagacataccgttctaccaagcagaaatgccgctgttgcacctaatgtagctccaagagagtcggctacaaatcctactggcaggccaaaaaggtaaccaccacctagctgcagagagaaacaatcaagactatcagaaccggattaaaagtctaagtatcctatcttgtaatgaaaactttggacaaacatcttagaaaagcaccctaaatttcactacatagttatgaatccagaactaccgtgagtacagaagcaggaaccgccacaattgtgagaggaatataagccaaagccctgaaaaatttcaataaggtaaaaaaggctcatcacaagattttttacggcagccagaaaacagtgtcaccaaaacaaaccaataagtggtagaaacaaaaatgagtagcaaacatgaaaaacttacaatgcaagtggaccaaaaggtccaagatcttccttaatccataacaagaagtccttcaatttctgcagaaagggatcataacaatgatgattaatgatgattctaaatcatatataaagtaccattcgcctgatctaggacagtttctctagtgatctagcgagctccagaaatactccgttgtatcaatttctaaacttagaatatacagaaactatcgttgctacattatcactaaagctacacgcgaatgaggagggagggagaaattgcctgttcgaccgggagaaaaatgacggcggagacgatagcaacaagaaggagcaacgagatagcgattcgaaaagtggacggagtaaaggacatggctgccatatacaaggatctgagacgacggcgccaccaaggcctggaatggtcgtcttccgaaccgtcgtagtcatattgatctccatttatacaagctcctggcttaagccacggcctcgcccttaggccctccactttcgccagatttgtctaccctcccaaaacgaaaatctgcctcttcttctcgccgcgtttttcttcaccccgattacggagatatgcttcagacgcgtcgtctctctttcttccgaattgggaagcgaaacatgcgatgacgagagatggatagagagattgcagagatggagaagcttgtgcttcaattcttcgatttcactgtccttcgatcttcagattctgttgcgtctcgctcgttccggtttcactagtcaaataaaaaaaaaaagtaatttccgccaagtctttttgggccattattaggctcatagtttgacccccaaaagcccaaagaaagtaaatcaattttataccaaaatctttccgatgaattaagggaatttaaataccggtttacacttaagaaaatatttacgattaaattatcattcacgttgaccatacgaaatctttagtgttacaatttgcgttgggcagaacaaaatgctgtagctttccaagatttcatccttttttttcctttttcttttgtcaataacattagctttgtaacttgaaaaataagtatttacatatttttttttgctagcggtccaaatgtaccttcgataatctcaagaataatgtgattagaggtaatcaggtaaggtgtatatcgttctcgggcgttaaaaccggtggacgctgaataaataagatgattagcaaaactcagaagtcatcaataatccaacaaatcaattaaaagaagaataacgcaaaaaaacgcatgagttaaaaaaagagagagaaaaataaggaaataacgcatgtaggatgctgacgtgtcaggtggtccatgtatccccgtatcaaaggtattcatcgtcgtcttcttccttaccaacaaaaaaaacacacactctctctctctagctccgtctctgtttgattttgtctctcatcgaagcgcggcaatg

SEQ ID NO: 7021 - DNA, 3000 bp, Unknown; identical to SEQ ID NO: 7013
  misc_feature (1)..( 3000): cDNA_ID_3049558_gDNA_ID_1621122_Annot_ID_172122 3000 nt of promoter + ATG

SEQ ID NO: 7022 - DNA, 3000 bp, Unknown
  misc_feature (1)..( 3000): cDNA_ID_3049532_gDNA_ID_1621122_Annot_ID_172118 3000 nt of promoter + ATG
aggatatatggtgagacggtttggatcaatattaatacggaatgatatactatggtaaaattctaaaattaaacaaaatttacaatattaatacaaaaaataacttaaaatttcagaaatttagttatataaatcatttcgagatgtatcatacataaaaaaaagcaatagcatatatctataaatcatctttaaaacaaaaaaataaaaatttttgagaaaaatataggctcgttgtgtacttcttaatatgtttatcatttataaatactattaactaaaataaaatctttaacttgttaacaaaaatataaatacgttgtgtacccggatgaatatctagttattaacaaaactgtaccatttgttttgtagaattttacttattattttattttttggaccaaaccaacttattatttattggcatgtctagttagggaaaatgtttcaattgaacatgtaccgtatgtgtgcatgtataaatagaaattttatgattggattttaataatgcaacgaatcgatgtgaaactattagtgtaaaaccacaatcgacgtcctttgagaatttactggtaagaagaacacagaaaaggatagaaaaggatctggatggatccaagagaaaccctcgcgtgagtaattaaccctcacttaaaccccaatcaccatttcaaggcgagaaagcaagttgtttcttgagtaatccaagttgtttctattttgcgattttaacgggtcaaagatttgctctaagggaaggaggtagaacagttggagccggtgtggtatcaaaagtgatgagctaagtcgctatagcagatttaaaagttcttcaaacgaaaaaacacaactgttctctagtatctaaagattcatctctcatgagatttctactactttgagagtttatatcaaataaacgagagattagtgttttaaaagaaaagcttctcccagtgtgatatcttcactttattctacaacctaacattgacaaattaacctttaagcaagccaaagaatggagttagaaactagactccaaatcatcagcattccaacattcaaccaaacctaagtgcaaccatggcaataactgtggcagctctgaagtaaacttctttgattcttctttccactttatttgagacttcttcttcgttgattgttttcctattgaaattaacaagggcttccctgagtctactcacagaccacgagagcaataccaaactcaaactcattgcaccctcgaagaattggtttgcgcaaaagggtacctgcctggaagcaacattacaaacgagaaagaagagcacagccataccagtgccagcaaagccaattgaacactgagtcaaaagctcgaagagttctccacgtgatttctttagagatagcattgtggtttttctatgttgttcattgcctatcatcagagagagaaggctctcacacgcatgaagacggtttcgttcgtagaggtcatattccttatctcttatcttcggattttgtttctttggtgaaggcttgagcctggttttcttcggactgttggaaatcgaaagaaacgttttttaaagatgcaaaagtaccaaaaactagttgatgatattagatacctctttggaggagctagtgtaactgcgtcctcgggtagctgcagagtgtctattggtacttcactgtcgaatctgcagaatgagaggagagcaaaaacttaatgttaaacccaaaaggatgagactcataggtatgaatcaaacttgcagtgaagaattaactaccgctgaaactgcgggacaagccgtgagagctttctccatcttgttgagttccttaatctatgaaactcagctgccgtagagaccaaatcattcaattcagctctgctacttgagaacagaatgttagcatccaccatgagatccaataacggctttgcatatggttgctgagaacttgatcttaaagcatctagacccatcaattcagataggagagacaaatcgaatccttcttctttgagttcttcttctgatctagacaaaaggaactctaacacctcctcttttcttgcatactgctgagtgatccccaagcttaaacacacagggtctggtccagtttctgttaaccacagttcatgtcagtcgaaaaaagggattacaatttggtgaattcaactgaaatttgatcaaagtcacataccatgaacatccatgagtctatgcttcatcatggttgaatcaaactccaaaaagtggttagacttactaaaagaagaaaaaggtttcaatggctccaagagttgtgatttcaggttaaaggagctctccggtaatatctcatattttcttcctccaggattcaccagataagcccggcttgtctgaatcattcatagacataagaaccaaacaaggagaagacagaaccaggacaagaattcaacgagagattctaaacccaagtgttttaaaacagagaaagtaaaaaactgaccttgatgatctcgttgcttcttagctcttgaaggagactaaacctaagtgttgaatagctatgagaagccattgagaaaaaactgacttcttatttttttttctcttcttcgtcacaaaaccatggaaacaaaacgaaaaagcttatcgtcagcaatctcgcctatatatgcgtcagatattataagatttgtgtaaatcttttctttattcagttttggctggtgaccaaaacacactttgagtttttaaatatttaccctttgaggcacttattacttaaattaccaagaacatacccaatcttttcaataattacataaatatacctttggtttcttatattctcgaaattaacccaaagatcattagggtacatacattctttactcgagagagagaagttctaaagtcctcaaatcccgcaaagctttttcagcttctttgttgaattgcgagcagaggtagaaatcagcaggaaacaaaa

SEQ ID NO: 7023 - DNA, 3000 bp, Unknown; identical to SEQ ID NO: 7010
  misc_feature (1)..( 3000): cDNA_ID_3049566_gDNA_ID_1621122_Annot_ID_172113 3000 nt of promoter + ATG

SEQ ID NO: 7024 - DNA, 3000 bp, Unknown
  misc_feature (1)..( 3000): cDNA_ID_1816460_gDNA_ID_1621122_Annot_ID_56318 3000 nt of promoter + ATG
cttgatgattttcaagaatcgaattgaaatttaaggctcgtaaaagtttcgttttggttttaaatctattgaaattagcaaaatttatgcttaatgttaagataactagattatcatattcactcattacatcattttagatcaagaaatacttcgtcggctccttgttaaatctatcaaacataccactaaaaaaaaaaaatcttaaagaatgattaaataaatttaaccaagcagtagaagtggaattgaaattggcagagttagtgcgacgacccaatcacctgtctccaataaccgcctcaaaaactgtcgaagcccattgggcacttgcaaagcccaacagttggagttccagctcacccactagccgttattacgcaggctaatttttcaacgtgcgagaaaccagatttcctttttcccgaagactatttagggaatttcctctcttgagccaaattttcctttttcccaaggggggtatttaggtattttcgtctctctcggccaagtttcctttttccgttcctccgtaataaagctttcattctttttgtaggtttccattagaagttcagaaatactgtttataaatacaaatccagagtcagagatccattcgatagcactttcctctctttctctcatcgtaaaaccgttcttcgttttttctatttctctcgtctctttcttctacccagatcactgatcaaccgtgaattttactctactctttcatcaattttactgtgtttaattcataaaacaaaacaaacgatcgatttttgtttttttttggggatgaagatcagaagcaaaagcaaaggctatcgtcaagagatcaaatcaacttgcaccgactccaacactctgttctcaaaaggtacttttcgtcttgttggaatttttggccaaataacgtcttttttttatatggtatctaattactgtattctggttgatcgcaaaacaaagaattctcatgtttaaagtgggtttcgtctaatccaatttgaattttaggtcttatattatttccctagctctaaccctaatcatatatttctcaaagtttttgatttttattcaagattccttctaatcaattatttcttctttgtatgtagatgtggttgcaacttcggagcttttttcatctgtgatatcgtagcgtgtgaaagacggataattctacagagacaatgcatcatcccattcggtcaggtcaattttcatccctattttgtttataatctataatcttatagatagtttaattacaaaaaaggtttttatacttttgatttttcaaaacaaaatatatttctcaaagttttgatttttaaaagttttcaactcttttttatttttctttttttttataaatactaaattaatatgacattttgaaatctaaccggattttggatcccgccatttaaccttggtcattagcgattccacaaatccaacaagtttttcacatcttcatgtatatttagcatttatttttcttaaaaagttttcaactcttttttttttttttttaaagttttataaatactaaattaatatgacgttgtgaaatctaaccggattttggatcccgccatttaaccttggtcattagcgatttcacaaatccaacatgtttttcacatcttcatgtatatttaacatttatttatttttttaaaaattcaactctttttttaaagggttatataaatattaaattaatatgatgtcgtgaaatctaaccggattttggatcccgccattgaaccgtggttattagcgattccacaaatccaacatgtttttcatattttcatatatatttagcatttattttttattttcttttcttaaaaggttttcaactctttttttttgttttaaggttttataaatactaaattaatatgacgttgtgaaatctaaccggattttggatcctaccatttaaccgtggtcattagtgattccataaatccaacatgttttcacatcttcatgtatatttaacgaataaattgttaaatttttagattttggtgtaaacaaataagacacaacatccaaacccctaagaagtgtccttggttcaatatagcttacatataatttagtaaactaaaaacaaattatttaaaattactaaaaaatgtatttatttttatacgattttaaaattatatattcatattgtatatatttggataagtgttaaattttttgatttcatttaaacaaattggacgcaacatcaaaactcctaagagatgtcctcggttcaatatagtttacatataatttaaatttttaacaattgtttttatttttctaaaagttatttttaaaattatatatatatatatatatattgctattaaactataaggtttttttggataagtgttaacattttaaattttgtgtaaacaaattggacataacatcctaacccttaagatgtgtcataggttcaatatggtttagatgttaaatttgtaacccttattttattttattaaaaatgattttaaaattatatttttatattactattaagactagatttttttggataagttttaaatttttaaattttgtgtatggtttacacataattttaaatttgaacacttgtttttctttttaaaaaaatgttttgaaattatatttttatattactaattaaagtaataattctaaaaagaaaaattttaaagaaaaaaaaaactagcagaagttttgattatatgatttgaattttgatcattatggatattcacgttttttagtacataggtgataggactagaaacacctaaaacacttatgattaattaaagatcatggtatgttttatattagtctttcatttatctttattatgcttttttattattattcaattaatatttgttcaaatttgagtgagactgataataaagagattcaagcagaagaaaataaagtcaaacaaaaatg

SEQ ID NO: 7025 - DNA, 3000 bp, Unknown
  misc_feature (1)..( 3000): cDNA_ID_1816456_gDNA_ID_1621122_Annot_ID_56319 3000 nt of promoter + ATG
gactaatatatgatgaaattggtcatcagctcatcgcatacaacaagatgttgtaacagttttagttatgtttccttaatggaatgaaactaatttgaacggaatccgagagatatgaaacataaaaaaaatgagagggttttataccaaataatcttatgttttatcattaggtaactttattttttgtttttaattagtggaagtacacgtgtaatgaaaaataacatacaatatggtcatgaactatattttttttgtcaaactattcgttactaagttatttgataaaaatagcacgattatacgcgcgatgatatatatcaaattgtggaaaatgttataaagtagaaaattgggccgaagctggatccaattatgattctcaaataacgtgaaggaaggcattttagtcccctctatacggcccaaccactcgccaccgcttattggtccaacttcagggtactttggtaataaatcaaagcttagcttttgaaattaataaagtataggggttgatttgttattctcagtttctatcgggttaatttgtcatttgcatcgtttctagtttccacttttgttgggtgattttcttctctggaaggatctgtttttctcttcttcgtcttctctcacccgcctactgactttttttcaaatttcttcagcaacacatacatacagtcacaaggtttccaattttcgattcacgatggaaatggcggaaggggaaggaactacagaggagaactacgacgtagacatcgcgaccaccgcttcttcattaggcggctccggcgtcttccatatcatcaatgacatagtcggattcgtcctctatatgcaccagcagatcccttcgtatgttatctcttcctatcttcgtatctctatgcttcgatgtatccttcgatctggtgatgatgtatctatttgtttgttcttcaatctctccgttaatttctccgattagtctgttggttacgaatttatcagaagaaaaatagtttcgtggttatgaatttatggattctggatggattagtgattaattcctggtaggtgagttatgttcaattctaggagaaattgaaaagctctacgcaattgtgcacactacttccttttggttttagaattaagtctgttgtatccactatgagtgttttactgaaaaccagaaacttcaatttgcagctttggttttggctacacaaagctccttctaccaatatgactgttgttggttatttacatctgtgcagggtattacaagacatgagccttgaatttgaaggattgcaaactgaatttatggatttggtatgttagtcctacagacgccattttcactttaaggtctaaggtctttttcacactctaagaatcttaggttgtaggagacgaatcttgcagaacctcaagtgaaaccactggttagaagaaaactgatgagtagaaagagagaggtgaagaatgagattaagaaactggagaaactgatgaaaaccatctctagtctccgaagtgcgctgcagttaatgatccgtgaagctcctggcattcagaaagttgtgttgattcttggtggtagtccattacggcctcaaaatgcttatgagttgttattcacacaacgcagagaccatgttctaggctacgaaggtgactttgctaaatccaaagctgcagaagcactttcaaaaaaggtttattctttttcttacctctgttttcatgttgcttgtgatttgtctcttttcaattttatctgctgtgataagtcaaaaatggttgagcccttcactcttggctttacagactatccgagcactgatctcgacgggtgctggatcaacttcctacccaggtaacttttgcataaattgcaaacttctttagcattgttgtgaattatggtgtaatgatttttttcccttcttctgagttgcaggtccaatgaggctcttcatattggttcatgctccacctactttgaatcttccacaacatttccttcctaaacgtgacttcagatacaacagaaaggtatacacttctctgctaattctatttcacacatccatgtacaacattccgattttccgtcacctgcaaacatcttttattattgcagtttgtgccttcaaagttgagattcaagtgcagaacgcaagacaatgcaacaaattctcctcccacaaatgatctaatatggtacttctcttattcacaattctccagttacacactaaacaagttcttgaccatgccttactgtgtcattgcaggtatcaatgtcgacatgtgataaagggattagctttccatcaaccagttgaagaataagactttagagtttgtttgtatctctctattgttgtaactaaaccctgttgcaaattttagaaaaaaaccagcattgttgaaacaattccaaatcttgagatgacattgtactactactactgcatactctaatactctgttgttttaacaaaatcaggattgttcaactattttatatttttggacgaattgttaacatttaaaaacctaattttgtcgagaagtttaatatacataaagttagggggtcaaacgcattaaaataaataaatagggggtcagaatgaaaaagaaacaaagctttaagtttttctaataagagtcctcctcttctgtttgctctggttacttcggcaaacacagacgcaaaattttcttcttcttcttcttcttcttcttcttctaccttgaagctgctaccggttcctctctcagtcgttgataacacatcgaagcttccattatcacctgtaagttttctcctgttatcttctcttcgcttgatctcaattgttccttctttctcgttgttcgggtttatctactccaacttgaatcgcttgttttgctaaagtgaattcgagttttttagggttttgttagttctaatgccaatttcgatttctaggtaggaggaagaagatg

SEQ ID NO: 7026 - DNA, 3000 bp, Unknown
  misc_feature (1)..( 3000): cDNA_ID_1989601_gDNA_ID_1621123_Annot_ID_57861 3000 nt of promoter + ATG
tcatcgtagaatttagacagaatttccaatggaaaaaggagaagagacattgtggttggttcaaaaccaagataaatatacaaaacaatcacttaaagtagttagagtgattttggtttagaatagcatgggagcacatctaagagagtggaaaagtctacaagtgttgactcaatttgagagtagattggtctagtacctctgagagaacactgttagttctacaagtacataccaaataagtatattgggtaaaagataaatttggatccattagtaaagccataaagccactagattcctgaactttttcagtttccttctagcagtattggagttgatgatttgtcgatcaatctccttgaagatagcatgcagcgggattgtagtaaggttaattatggaagacgttatttctccgtctccaaatatgatagaccaaagtgtggattagaagcagtctcagggtttgtggtgatgatttgtttctaacatttgtccattccagcaaaacaagccaactgtcaaaaatcgtggacgccaacctcagtctagacataatcgaatcccaaaaagtctgggtaaaaaggcactgcaagaaaatatggtctcttgtctccaccgagccagaacataggcatcaatcaagaggaacctgcagtccccaggaagcaagtttggatcttgtagataacatgtcaaggtttgtgattcacatgtggaatacatgctttggtgttgaacatttgaaccataccaaagcatcccagtctttttcggaatctctctgcctaaaaaccttccatgttttgcttcaagagaaacctatacaaggtttgtcctcaagaaaccagtcaaaaccagtgaatcaagcaatttttctcacatttaaaaataaataagttatactatcacatttgtcaaacacattgttttatcttcatcgtcattgaaccactaataaccaaacacacctcattttattctaatatatctagaatttccaaatttagatttttaccttatataacatttttataatttaatgctttgatttttaatgcactttaaatttgaatattaaacatcttcatattaaaaatagagtcatttggaaatattattaataaaactatttataaaattaaatagtacagaatttataaaatgtaatatcatataatttatccatatatggcacgcattcttacctagtttatccttaaattatcaagaaaaaaacaaatttaaaaatattttctacatttatgttaataagtaaattttacttaagttaggaaacatagtatcaaatttcttattttacttaagttaggttttgaagaattaacctcgatttgtatctatcgtgtttttaaaaaatgaaaattgacatttatccttaaatttataagatatatttgtaaattgtattgttctcattagtataccctaatcacttttctatctctctataaatacctgtaaatctcattctaaaataaagtcaatacatttagcctctatatggtaccaaagcttacaattctaaatggtataaagaatatatatgatatattgtgaaaatgttggtgccacttacctcggtaccaatccggttttctattctcgaatgaaccatatatatagcacttaattcaagctggaatgcttcagattactcatgtctccattggtgatcagttagcaaatacattcactaaatctttagcgaaatcaatatttcaaaaaaaaagttccaaaattagagctacacgagtacttccatactaaaaggacgtataaagaatatacatgtaaaccatattgttatatcctaatcatttttttctatctcttaaatacttgtaaatcttaattctaataaagttaatgtattcggcctctataaaattttattttatatatacttaataagttattttcatactccatatgtttcttttatttgattttctagaaaaaaaatgtttcaaaaagattaattttataggttttcaatacaatacttattagttataattgataaattgtaaacttcaataaaaattattgaatattattggtttaaagttattaaaaattttaaattataaaaaatagtacatttaaaaaacaagatttaatatgtctttttttaatatttatgtttttcctaaaaaatcaaataaaaagaaatattaaaaatattattttcctttttttattatttttcttttcaaatatctattttctaaatccatattatgtttttcttttataaataatctcatttcgccatggagaacacgagtaattctcctggtgtatgcctaaaaaaaaaagcaaagattataatatgagtatatataattatatatgacgtaacctgcgagatgttgaattgtccacattgtaattgtcacgaacacttaattaaatcttgcgaaaaagagatctcaaaaatatcgcgagaaaaagaaaaaaaggataatatgagaaaagccaaacgaagagtgcatcgaaagctgagagcgacataataaaggagagagaaaaatgtggggaccagactggacgtgtgcacagaatattcacactatttgaattttgttttcgaatccgccactctatctccaaatcaacttatcactcaatttgataataacttaacctacctctcttataaggaagcctacttatcaccgacgaagactccgcttatatctgataagtcggtagaacgatgtctctgtgcaaagaagaacgcgtccaagaaagcgaggtctaaagtttctcaatcccccaatcttctcctccttctttatatattctctctctctctctccatttttctctaaaagctagagctcttcaaaaccctagaaatcctcgaaatcagagtctttacctgggctcgtgtcttcagagctcggattcgtgtttctttcgtcgtctctcttcttcgtttctcgtcagatttgagattcgttgagaatg

SEQ ID NO: 7027 - DNA, 3000 bp, Unknown
  misc_feature (1)..( 3000): cDNA_ID_2995955_gDNA_ID_1621123_Annot_ID_172144 3000 nt of promoter + ATG
tgattaatcaaaggtgtgtttcttttttctttcctcatgaccattctgtatgttgcagatgaggtttggatgacttcgttgttggatgattcattgtgcatatgttctcttgcagcctcaattggcagcaccagttgtgcaagaatcctaggccaaacccagatattaaaactctattcacagaccacacttgcacacttccgaatggtcctctcgcaccttcagcagtcaatcagcctgttactactttgacgaagccagcagcttatccgtcacttggacctcatgttgtaagaaacctcgatgtttgactgctttaatcatgttttttgaatctaaattaatcttaatgtttgtggaatctgtattacatgtagccctttccacctggtcctgctgctgctaatgctggtgctttagctagttggatggctgctgcctctggtgcttctgctgtccaagctgccgttgttacacctgccttgatgcctcaacctcagaatcaaagttagtttttgacgatcctctagatttctaatcctcgacttatcaataactatcatttcagtttccatcaaaaacttattatttttcttccaaaaagtgtcaatcttgaagcgaccaagaacaccaccagcaactccaggtatagtagattatcagaatcctgatcatgaactaatgaagcgtctccgccctgctccatctgtggaggaggtaacgcgaattcttttctttttctggaaagctgtttatataattcttgcatcttctcaaaattctaagcatttatcattttccaggtgacatatcctgctcctaggcagcaagctccatggtcgctggaagatttgccaacaaaggcagctctggcgctgcatcaagggtccactgtgacaagcatggagttctaccctatgcaaaacacgttacttcttggtatgggggtttgaaaaaaagaatacaaattctaaactgtgtttgaagttatatttctgttatctcttatttggctttctgaatgaccgtttgaatgccatcagttggatctgcgacgggagaaatcacattgtgggaacttgccgctcgagagaggctggtttcaaggccattcaagatatgggatatgtctaattgctcacatcagtttcaggtttgtctttacagctaagaagtttttagtttatgtgtttgatgtataaaggcggaattcaaccaaatggctatgagaagtgttggagataaaacgtatcagcaaactagttgctgtgcaagattcttatacttgcctttcttttggcatcattcaggctttgatagctaaagaaacaccgatatctgtcactcgcgttgcatggagtccggatggaaatttcattggtaagcttcccgtcatgcattgttggattttaattgtatgttgtctatggtctctggtctcagtctcttattgtgcaggggttgcgtttacaaaacatctaattcagttgtacgctttctctggacctaatgatcttcgccaacatactgaggtaagcatacttgtgatctgtacgagaaatattgcgatgtaataatatcccactgagactagatcactttttcacagattgatgcccatgtcggtgctgtgaacgacttggctttcgccaatccaaacagacaactatgtgtaattacttgcggagatgataaattaatcaaggtgagataaagagtcacaaagtttcactgttagatatcaatgcagctggctaacttgatcaatgtggaacaggtatgggatgtttctggtcggaagcattttacttttgaaggccacgacgctccagtttattccatttgccctcattacaaagagaacattcaggtgcggcaaggattgaatcaaactatattttacatcaattattatactgttttaccaatccgtttgaagaacaataaagtagacgacacatttcatatagtattatcttgcctatgaatttctgttctttaccaaaatacatctcgttcttatttggatttcagttcatattttcaaccgccatagatgggaaaataaaagcctggctttatgataatctgggttccagagttgactatgatgctcccggtaaatggtgtacgaggatgctttacagtgctgatggtactaggtaagatcttaaactcataaacatttccctcttctataccgcttgttcttcactcctcagtttccaaaatcttcagattcttttgtttactccggaggatactgagttgtgtccttgagtttctaatcttatctttctgttttaagtttaccttttcagtgctttctgatgttttttcccccttcagattgttctcttgtggaacgagtaaagatggagattctttcctagttgagtggaatgaaagtgaaggatcaattaaaaggacgtataaagagtttcagaaaaagttggcaggtgtggttcagttcgatacctcaaaaaaccattttctggctgttggtgaagatggacaaatcaaattttgggatatgaacaacatcaatgttctgactagcactgatgctgagggtggacttccggtaagtcccaaagattctttttcccatggcttgttgcttggatgttcgtctttttaggtttgcatataacttgtcccaacttcaggctcttccccatttgagatttaacaaggacggcaatcttctagccgttactacggcagataacggatttaagatcctagctaatccagctggtttccgatctcttcgagcgatggaaactccagcttctgaaacgatgaggactccagttgatttcaaagctgtaatgtttctcaactttgtattacattttttcccttttttacatccactgtcattacaagctgtctcggtttacacactttggtatattctgttaggttcctggtgctcctgttgcgtctgtcaattgtaaagttgaacgaggctctcctgttagacactcacaaatg

SEQ ID NO: 7028 - DNA, 3000 bp, Unknown
  misc_feature (1)..( 3000): cDNA_ID_1989600_gDNA_ID_1621123_Annot_ID_57862 3000 nt of promoter + ATG
aataaaatgaggtgtgtttggttattagtggttcaatgacgatgaagataaaacaatgtgtttgacaaatgtgatagtataacttatttatttttaaatgtgagaaaaattgcttgattcactggttttgactggtttcttgaggacaaaccttgtataggtttctcttgaagcaaaacatggaaggtttttaggcagagagattccgaaaaagactgggatgctttggtatggttcaaatgttcaacaccaaagcatgtattccacatgtgaatcacaaaccttgacatgttatctacaagatccaaacttgcttcctggggactgcaggttcctcttgattgatgcctatgttctggctcggtggagacaagagaccatattttcttgcagtgcctttttacccagactttttgggattcgattatgtctagactgaggttggcgtccacgatttttgacagttggcttgttttgctggaatggacaaatgttagaaacaaatcatcaccacaaaccctgagactgcttctaatccacactttggtctatcatatttggagacggagaaataacgtcttccataattaaccttactacaatcccgctgcatgctatcttcaaggagattgatcgacaaatcatcaactccaatactgctagaaggaaactgaaaaagttcaggaatctagtggctttatggctttactaatggatccaaatttatcttttacccaatatacttatttggtatgtacttgtagaactaacagtgttctctcagaggtactagaccaatctactctcaaattgagtcaacacttgtagacttttccactctcttagatgtgctcccatgctattctaaaccaaaatcactctaactactttaagtgattgttttgtatatttatcttggttttgaaccaaccacaatgtctcttctcctttttccattggaaattctgtctaaattctacgatgacaaactattacattctagcttcttgattccaaacctataagcctaaaccaaccagcatcattttctcttgttcagcctaaaaagaaagtttagacacattaccttacttgatggaggaggttgattttcagtccttgatccctcaaatttcttcagaaagtttcctccgacatgcttagtcttcttcgttgtctccgagaactttgaaaaaaggtggatccggtggaagtagtagtggatccgacggaggaaagggagagcgtggcgtcgacagctatgaagaagattaagaaggatggagatgaagaagttaaccacgtcgtcgttgagaaataaaagcaaaactaaaactatttatagattataagatgaaattaagggtgaaatagaggttgcaaggcaaccctaaatacccttattgatgtcattttttcgggaggatcttttctctccctcttctctctctaatacctttcagagagaaaataggttctcgacctgattttgggggctagagtttttatggagacttatgtcacaatgtcgttgggctctgcgtctggcatcacttgcgtataagcggtggaagctgttttttccgacatcggtggctctgtttaccactgttggctgacacttccagtactgattggcttcttctgcaacggtggctggttatgtctccatcgattcagcctctggcgattcagatggctagtactggcttttgtccggatttgtttttagtctttcattctctcgtttctctttagcttcagttattttgtgtttggaccgatgctttggatttgattgaagttttgttcgtaggtttgaatgaaagcaagccccaaatagcaaaatttccttaacgattgaaaactttttgattaaagaagaagatgaagaagatttacagatttgtatcaagtggagtcatatttgcaacaaaagtcaattggaatttcgccttggtttgtttgggcgaagaagatgaataagctttccggcgatttctgcttagaatgaagcttccgacatcacaacaacttttcgataatcggagactccctcctcctcttcaacttcccacatgtcttccaacttgtttctcatttgacacgtgttttatatgttgtatacaagtttttccttcagtttagggttctcttatttgagcttttggacttatgattttttttactttagtgtttgtaaaatattggcatgttacatttggctttgtattataattaaaacacacttgtaaaaaaaaaaaaaaaactaattgatgttcattacactcatatatatatataatgaatatacttgctagaaacctaaatacatgggctttagatgggctagtagataggaaatacatgggcttgtcaagttaaggtagaagtcatccacaatgccacttgcattcaagattctctcacaagtctgaggaaatgtttttacgaggctttacgggttaacgctgctggtgaagaaaagcagagtgattactaggaaacagagcttgaggtttgtttctgaaagcgagaatccgggtgcgattcaaatttatagcccttagccaattgcttcatgtaggcttttcttgacagcgaagttacctcatcgactttagcttttcttccttcggttagatcgtagtgagcatagtcgaaatccatggcggaacctgtccaaattttccttggaagctctccgaggaagaaagtgttcttgaagtggacaccaagctttcatacatgtatccattattattactaaacacgaagaaaacaaaacggatctaactgaatatactctgaagattattagaagaaattagacagaaactaatcaaatgaagcctgcagagaagagaagagaagaaagcgttaaaagactaatcaaataaattcaagcagagagtgagagagcggagagtattgtttcgtcgcttgtgatttgagaggaggaggagtgatggagaaggtttaccaatgagagaacagacc

SEQ ID NO: 7029 - DNA, 3000 bp, Unknown; identical to SEQ ID NO: 7026
  misc_feature (1)..( 3000): cDNA_ID_3049574_gDNA_ID_1621123_Annot_ID_172145 3000 nt of promoter + ATG

SEQ ID NO: 7030 - DNA, 3000 bp, Unknown
  misc_feature (1)..( 3000): cDNA_ID_3049570_gDNA_ID_1621123_Annot_ID_172148 3000 nt of promoter + ATG
cttgatagaagctacggttgtcatggttatagagaaagactgaaattctgctctgattttgactcaatgatgacgtcgataggtcttgctctgtgtttgacacaccactcatcaatggttctgtccattgttgatgacgatgatcctcaattagcgaaggaggaggagacaatggattcgttgtggaagaaaccgcacgggtctgaccaaactcggtctggtttttctcgggttggagtaacagaagcttatcttgtagtactcgtagaccactttctaacgaatcctccatctctaagactttctccgacaatttagtgtcgtcgaggatcttcttacgtagaaacagagaaaggttggttcttttcttgcatcgctctctctcgtgtaatctgctaaacctctcagccatgtctcgaacttttgattgatcctccggccatgtcttgatgagttttccgtcacgaccatagtatatgacacagacatcgatgttgcacagagttgaaagctccaaggctttcttgaacatggtctgttctctcatagacaaattcgtggtcttttttgcagtagaagaagaagacagggacgatttcttgaaacaagtttggtttctcacagacaatttggttttcttcttcgtcgacattgaagaatccattgttgttgtttacccacagaaaaagaagaagaagatacctagtttcttatcagagagaaacctagaaaataaacttagtgtaactaacacacggttcagggttatatagaattgtgaaattcttgtatttccatataatatttgatattgattttactaaaccaagagagacaaattgagctgtgggttttatttcctttttctttagagtatcttttcttcgttaaatgatgatgatttacttctattaatctaaccgttgtgatatttaagtaatgaaattccctttttgtttgctgtctatgagataaatcttaattagatacgattttcctttaccaatatcaatgtaaccgttgtagatacgatcttagatacgatttcccacatccagtatcttattatataaagtatagtttttaaagttactaactcataagattgtggcacgtgtcaagtctaataatgagaagtttatatgtgtcattaaagatttaactttttaattttcttaaaaaaatagaaaaccttaaaaagaaaaatttacatatattaatttcttattatataaagtacagttttcaaaattactacctcataagattgtggcacgtgtcaaatctaacattgagatgtttacatgtgtcattaaagatttaactttttaattctcttaaaaaaataaaaaaccttaaaaagaaaaatttacatatattaatttatatatatctaacaatatttaaactttatttttcttaacaaaaaagaaaattaacaaatttgaaaacacatatattattggtcaattaaataaataatcatgtattaatttaaaagaaaaatcattaagtatgaataataactaattaaaaagaccacttaagtttaaaataacaatataatttatttaaaattaatttaattggataaaattgtgtttatcattgtaatatagtgttttcatttgttaaattttgaacacaaaaatatttttaaaatttagtgaccttattataataaatttttaaatatttaagatttattctaagaattttaacgtattcggtgattgagcaacttggatcctttgatatgtcactaaaagcttataactatgttttattgtaaaaaatttaacgcatgtagtcataagttaaaacacaagatttttggagagaacaacttatatgatttacttttcaattacttaaaaagaagttagtatattttttaattaattttaactcatttaaaataagtttacataagagaaaattacgccatatataaagaaacattttaaaaagttttgcttttcaaatatttttgtggattttttttttgttaagttttgtttactgtttattatttttttaatatcaacaaagatatatattagatctgatataaatatatttttttaataaaaaaaaattcacttaagatgaagtgtttagaatgaaaatcgagtatattatgatgaaatagatacttaaattgtattgcaaaattgaatgtgtaagatagaaatttgtaggttattatttagaattcaaatatcatcaataagcttgaatgtgtagaattaaaatgtatgataaaagagaatgtataagcatcaaattttgttaaataaaaaaatattaaattaattgtcaaaaaaaatataaattactattttattattcaacatttgaatactgtcaataaagatttacatctaaatcacacacccgcctatttaggcggccttattagttttttataaaatagtcccaaattttagttttaagtaaacacaaagaggaatatttatactcttccgagttcgctgacatatggtaaaatgggccttcgttttcttttatccgccttcattgttgggccctagcccagttgttttttttgcgcaaaattaatacatcgatggggattgactcttgacgctgtcgatcatcactattcactagcactagtaacaatgaacaagtcattgcttacctgcagaattcattttccacgatcaatttaatttggctggacaaaatacaacgtttttttttcatgttccctgtacgtaactaaaaagtaagacaaaaggagtggaaatggacattattcaacgtaaagactttttaagtcgttgcgtttaacgtgaaaaacgcctcggagggtcaagctgtgttggaattatctttgtggaatagagtctattatttttgtatataaagagatgggcatgaaaacatgttacgtaccatcacaatttccagattttatttttttgctttttcactatcaatattcaagaaaattaaattagcttaagaatgatg

SEQ ID NO: 7031 - DNA, 3000 bp, Unknown
  misc_feature (1)..( 3000): cDNA_ID_1816574_gDNA_ID_1621124_Annot_ID_56325 3000 nt of promoter + ATG
aacatacatttcaaaaatattatgtcaaacaatattagaaaaacaaaacttcacaagttactacaaaattatatataaattagaaaaaatataaaataaaactcgtgtgttcatgtttataattattattgaaatgttaattataatgtgtattaaattgttcagtgtgatatcattgttgtataaaatttgttttgaaacattatatcttttatgttttaataatttcaattttaaatttcaatgtatttgaattatatggttatatttgaaataattgaactaaatataactatttgtaaaatatataaattataaagactaaaatgaaatataagaaagattttaagggtatttgaggttgtactattcacaccctaaaaaaataaagggttgagggcttgttagagttcaaaaagccctcaaatttaaggatttgaggtgttgttgaagggttgcacacgcttctcttccttcattctcagtaggttaccgtccttggaaccaatgcctaagatttgcccttgcggtctggccttagtctaaagacttataaactgtttgatttcattttgaatttactaaacacaatcgaactaaacaaataaaacgtactattttttaaaaatattttagttacatctttatatttaaaataatttaatcattttatgtaagtataataaaacaaacaaaaaaatgtataatataacaaaattattctttattgtactcacttaaaaacgtttaactaaaatagaaatgattcagaaacgaaaacaaaaatcaaaccaaatgcaaaagtaaaccgtattttctttcgattttagtgtcccgtatataaaaccaataaaattagaaacctgaaccaaaccgtaaacttgattgcccctcaatataaggacaaggattagtcgagttatgtaaacataaaagatttgtgtcagaaaaactacagtataaattctataaattaatactctataaattaataacttttataaattaataaattctttcggtcccgagttaggaccagtgtaaaatgtgacacaaatcgataaattaataaaataataatttttttgaaagtcctatgtaaatatatggtctcatcaatatcataaattaataattgtataaatatatatataattgtatatatatatatatatatatatatattatagaaaaaaattctttataatatttttttgcttaaattcatatttgttctttgtttgactatagttttcatattttactgtatcaaaatttttggtgttattttctaaacattattattatgttttacttgtaactgattttagaaagatattttctacaaagaaagaaatcttatagaaattttttaaaaatttaccaaattaggaaaatctctttatatatttattattaatttatcgataaattaatacctctctaaattaataaaattttgcagtcccaacattattaatttatagaggttttatttagttagtgtcataatatcaaatgctaaaaatatatatagcatcttgagaagaaaaccatcttatttcttaattagaaaagaccatttctaaattattattttagtttagtctctatttagtttttgttatcacagacttgagaattaaaattcataaaaagatgtgtagatggtctggtcgaagacatggtttataataatcgattgcttccaccgagagataaacacaacaagtcatcgataagcaaagcacatattcacacttttttttaattcatatacattcaagttcattataggcttacacatcatttcaaaagattttgtcaattcatcttttttcctcttgccgatgtgccaccttcttcgcttggcgcttcgacgtgtgcggtgagcgtattttcttacacatattatattacactaaaatgtcaataatcgcgaatgtttgcggcagttgagatgaacaaattagattagttttaatttataattcacaaactatatttataaattataatgagagtacaataaaaataattgaaattatcgtaactaaatataaacggtttttacatataagtaaagttggtttacggcagtttataattcacacaaaaaataaagcgaactaaattgctaactaatttgtccattctaacaatatcaccagtcaaacttaatatttgataggttttgacaatctaataaaaaccgtgaataaaaaagagtaatctaaatttattttatattaagactgcaagttttgtggattaagtcagcatattttttctatatttttataacgatttatgaagaaaattgaaaataacatttttgaaaaatcaatgataaacattttatatcagttttactatgtaatgaaggtttagtttttttaaaaaaacatctgtatcagttctttttcaaaggcgaaatttaaaaacaaaaaatatttgggaaaactaaatttaaaggatatctacaaaacaaaattgtccatctatttatttttcttgtaaattagtcaaatgtaggtttttcaaaaaaaaattaagtcttatttacccttattttattttataattaaaaaaaattataattttctaatttatttatacaaaaaaaatagtaattttaagtaaaattttaagaatctaaatcctctaaatgtataagagtttttcaaaaccctattttttgtctctctttcttctttactcggtttaaaaaaaaaacattcagctctataaaaaaaattcataacgaaatagtcataacgaaattttttcatatgccaccagatagtcaaataccattgaccgacgtgctagaagaaaaaaaataaaaaaatttgaccgacatgtcatttataatctttgtatttaattattattatataattttaagatatttctctaaaataaatatatcaatcgtcttctcctaaacccagcaaattcgtttaccagtcatcaccaccacaacctccggcgaaaatg

SEQ ID NO: 7032 - DNA, 3000 bp, Unknown
  misc_feature (1)..( 3000): cDNA_ID_3049650_gDNA_ID_1621124_Annot_ID_56326 3000 nt of promoter + ATG
ttttcaaactttataatagatatatttaaaatcgaaccgtgaacatgatattattgtagtgaatagaaaatttaggaaaacataaaattttgtcttatttcacttaaaataaataattgcatacagaaaaatatattttaaggattgttttgataatgttttgcaattcaagtgtaagaactggtggagcatgaatccaatagattccaatggagttatgtataaatcacaatgagattaactatatgaaatcatagttagggaaattaaagattaaggtttataaatgtattttggacaaaaagaggaataaaatacaagtaattaatatctttgcctagataacctcaatacaatttgaacttcaaatgaacttggatggtaagatatattatagaaaaagtttggagtagaaaattttgaattataattcctaatatttcaataatatttttttgcctatcattgtttcagtaatatctacaatatattctaaagataatttttggaaaaaatcttcattgatattatatataaatcacatcccatatttgaatgaacaaatatttttctacctatgaaaaattcaaaattttgactaataatatgcataacactactttatatacatttaaagtctcatgtttttctaaaataatatactatttatagtaattggaataaattcatttgaccctcgaggagatatattttaatataaattataaatattattattttggtactacaacaaggattaaaaccttattatgatattttgacatgtcgaaacatgttgatttagttaaaattgtgtggaaaaatttttgtttatgatatatcgtgggctaattaaatttcggtgtgttgcaatgtatcatactcatttcagctttcttagctaaatattacttgtacttcaatgactagtacaaaacacccaaataccatgaccttgcttgttttgatattctctaataaaacccaacttggtttaaacatctctaaaatctgacttagttccaagattgaccaatcatctaccttcttgagatgcagcctcgtgattatacttcttgactcttcatctagtttctttagatgtagtcccatgatctttcaatgacgtacgacttctctccacatatcatttagaatcttcattagatacctggagactcctcctctatgcaacatcgattgaactcccttgaagtaaagtctcctcctttatcggtacaaaaggttttaatagacaagccgacttgcttctctaaaactcttgaaaagcttttgaaccgatcaaaacttgaatgaatatgtcaacaaggaaccatcttgttcttgttgactgattcaaactcctcttcacatctttcctccattaaagcacatctttagcctcttggctcattacttgttgaaagttgacgtctcttacttttaacataagcttggtggaacaatccataagttgtttcggactgcataacatagtcttcaaggtaccgcgactgacttatttgtcgacccgaccttctcagttgtggtactccttgaactacttcaccaacctcattatggtattttttagtgatatcctccatgccatcatcttcttcatgtacttctccaacatcttctctgtgaatcaactccaatatgatataaccgagcatgtcatgtccttgtagcttcagtagaaagtccatcgacaagtgatgttggataattcctaacttgaagagcaagatatctccttttagtagatggtagaagagatacaagaaaataaaatacaaataacgtcaagttggacataatttgtaactcttccttttcaaatcatgactaaactctaaatttagatgtaatttagcttagtggtaggtcagagcaaatggatttggtttatacgtttgcaattatgtaattccatggatgtagtttgaaagaccaaacttcattacaattatgtgtatcaatttattttgcttactcgtatctattttatcactagaatacaaagattttgctaactccaaatctattattttcagacaagcatatcctgtaaatcttcaatcatccaaaaagtgatgttgagtttagatccaactccaaaatgtatttatcttatttttaagtaaaaaactgaagaaatgagtttgcgaatcttttaaatagttattttgtataatgcatattagagaaagaacaaagataaatttttgtatcaaatatttaaactgagttaatggtggtttatgaagggtgttatagtgcattcactcccttatataatcgatatctctaatcccttggtaaaattaaattgttgtattgaatttttttatgaaagagtaaggtgagttgcaaattttgcttggcctcaaaaattcttctctctattttttcatttacatgtttgaagtgttactttttactttgctaagatatttcagtgttactttttaatctacatatttcattgttattttttaatttacatatatcaatgttatttttccactcagataaggtgaaatatttcagctaacttaaagtgattatgatcatcaacacctatttcatgtcaattttttgctaaaaaataaacaaattggtcataatgttcaaaaacttgacctcaccatcataatacttagtacttactggtcaaacaaacatatgttcagaacttttgtattgatggggaaggttacttttgtcgtaatgttacaaaaaaaaaattgttactgttgagaccattataaataatcatgtcatgttctttaattatcaactttgattgtcatttaattgtaaatttcgttagttaatctgtcctcttcttgtaattaaataaaaatttgtttcaataccaataaagttgtcctaaaaaaaaccacccctctaaatagggagtgagtgagagagagagtgatagtgagaacaaaaaaaaaacatcatttcttctcgcactcttcacctgctcca

SEQ ID NO: 7033 - DNA, 3000 bp, Unknown
  misc_feature (1)..( 3000): cDNA_ID_1816559_gDNA_ID_1621124_Annot_ID_56333 3000 nt of promoter + ATG
tggtgaggttgggaaacgcatgaaggtgagattttcagacagatttttcgatggttcggataagatgtgctagcgggtaatgattgttcatgtgtcgttgttgatatatctcactccatatattatatagttgcatgaaagatcagccactgatttagccttagagcatgtccattggttagtttcttaataggaatccctaacattttataatactaaattttgataattttatagtttaggattgttgatgaatcctttcagtttttaatctttaatggtggaatctttagatgagtttcttacaaatttaaaaaaatatttttgagataattaatttgataaaacttaataattattacaaataaaaattatcaaagtgccaaagcttttttgctgatgatgtggtaaatctctgctaacacagtttgaaatgctttctcgacatttgtggcttcaagagcagaagtttccaagatagagagaccttctgtctcagctggagtgtgaccatcttcctcagctactgatttcaagtggtttagattagctttgttcctagttatcatgatcacaatgttggaatccgtatggtctcttagttcacgtagccaccttaagacattgtcaaaggtctgtcttttggtgatgtcatagacaagaagtgctcccaccgttaaagtcgtggtcaacgaccctattaaaagaatagcacaaagccaaaataagcaacagaacacaacaaaagcagaaactagaaattgcgcaacacacctcattccaaaatccaaatcaatgtcactcaatatcttcgccattttagaccattcatgctctgattcatacaaacccgcaagtttttctctaataacaagtgtctgcaattacaccaaaacaaattgtaaaacaacattattaacatagtctcagctactcgaaaaagaacatccttagtaaacaaacatctcaaagtagctttcagagtagttttcaaacaccctaatgtatctttcagagtagcttaagtatcatcactatcatacaaaacagagaaccctaatgtatctttctcaaatcccaattcacaaaaccctaaacttgataacatttaaaaatataaccctaactaatcgtcgatctacagaggcaaacagaaagaatcataccttcaaaaagcagttggagtatggtttaaccttaacctccgatttgcttcatccaactctccgatttgtcgcagatgttgagcaccgtcggttgagatgatgataacggcggaagggagacgggtttcatcggtttactcttccgatttgatgatgcagatgccgaattctgcggatcgagctatcgttcctctgtatatcgtcgtcggattttataagagaaaatgaaaccaatcgataaatgaaaaaaacagacacaagagaactgaaaaaaaaagagatatgttggaaaataatacgtttttaaaacataatatgaaaagtagtacatatactattcacaattagtaatatagtcggttttgattgggtgagagagagagacatgtggggcatatttagtcggtcaagtttttaattttttttttttattacacattccctcaatgtttaataactaaaatgcttattagtaaattttatttttctaaaattgatcatataaataaaaatctatatttttctctatcatttgatatgcattttgtttaatgatttttaaattttatattataaagcattgtacagattagatcattgtacagatatagaccgctgtacaaatgtagactaatgtacagatatgcaccactgtacagatatagactattgtacaaatatagatcaatgtacaaatatagactattgtaaagaatgatgtatctgttaaacgaagtcataatttactgttaaacgaacaaatatttttctcaaagttttgatggtgtaaccgaagtccgtatgagtctttggttttgtatcttctaacaaggaaacactacttagacttttaagatccgtttgcggttctagttcttatactcaatcatacacatgacataaagtcatatttgtctccaaaacagtaaccgagcttctttatgcttcacaaatgttaaacgaacaaatatcttctgtacatatgcatcattttgtatagtggtttatatctgtacaatagtctatatctgtatattagtctatatctgtacataggtttatatctgtacagtgatctatatctgtacagtggtctatatttgtacagtgatctttctttacagtgctctataatataaaatgtaaaaatcattaaacaaactgcatatcaaatgatagagaaaaaaacataaatagttgaaaatgacatttgggcaggatcttttttattctgctacatctgattttcaactcagacttttgctgatgctcattaatggtctatatctgtacatatatatattactatattactaattgtgaataatatatatatattacttctatagttaagttttaaaaacgtattagtcttcaaacaaactctaatataaatgaccataacgttagctaaatgaatgggacacggaacttaaacctcgaaccaatataatttcataacatttaaattcttataaaatatattctatataaaatttgattaatatattgaatattagttatggttaaggaacatatattctcacgcagacatgtgcaggaaatgtataagagaaatatggtgccgtaaactcaaaagtgtttaatatttttttctatagagaataattcaattattgttttcttaattagaaaacaagacagcgaggtggagaacatggaggacatcaaatccaatgcaaatatacgtaacgagtttacttgaatctccatgcaagtcccatgcactcaaacccgtgtatataaacccctccaaggtcatcgtttaatcatcaccaaaagaagcacatcaataaagaaaatacaaaccatg

SEQ ID NO: 7034 - DNA, 3000 bp, Unknown
  misc_feature (1)..( 3000): cDNA_ID_1816550_gDNA_ID_1621124_Annot_ID_56336 3000 nt of promoter + ATG
ttgaacccattgttcagatctcttttcgtgctaatctcctagtttattgaagataaattgattcagacgaaaccaaaaaataaagtgattctagtcctagtaaagaagaaaatgtacttgagaaatctaaaatagacgagcactgtcattcacgggttttatctcagcattcctgtcttcctgaagttgatttattcttttatgacctgggctctgttggcagttgctaatattggtggttatcggtgtgaacatcatggtgcacatctgcaatgccacctgtgtcaaggaatgatgccctttagagccaatctccaagtgccgttacactgtaagttacagtacatgattctttattttgcattgttcactgtttaaataatctaacatctagctctcaagactggtttctgtacttttttcccgtcttgatattgtaagttcattgttgttgttactttcaattgctctacatcggaaaatttgtaccgagtgaatggatgctgttcctgttggtaaacatgttatgtaatgatatctaatatgtcgtctgcgaaactgggggaaaaaaatgtgatgctggtagaatacagagaataatatttgtatgtttcttagagctgggtattgcaaggttggactgataagagactaatatttaaacatgttcagtaggaaaggaatctctgacaattatatatatacacatttgactctagtttattgcaggcaagggatgcgataggccgttttgcggtgcttactggagttccgagaatgttacacaaggtgtatctggtccagtctgcgttcgcgaaacttttagacctgtaggttgagctatgattctccaatgtctacctatgctggttatgttgatactgctgtatgttatatgagtttagaatgatgtagttaagactgatatcttaaacctcttactttaacttagtttttcgtttctatctatgaggtattgtaatgtaaaatgtcactgtggttaggattacgatgatcaagatagttttgtttatttttgctttccatattcgacatttaccatgtggtttcccttctgctccagtggcttgcatgataatgttcataagatattttttctcattatttctcactaatatctgcagatctcggaacgcacaattacaaggattccattcataacccatgaaatgaatcgccatgaacaagatgtaaggagttttctttatcaggttattgtttcttattttctattggtgacattctctgtggactgtagataacgcaaagatgcattgcccatatggagaaaactgtgccggatgttgtagcagagtggctcaggcttttcaacaatagagaaataggtaatctcaagactctcagcttagctatatagcacattaagaaacagctgaacttgatttacctccttgagctctacaatgaggaaatagttcttatcattcttgatttgcttatgtattatctattgagttttgatgatgtctcttcatattcagaccgctcgagaatgcctctgaatcatgctgagacgataactgcatcaacacatgtttgcaagtaagttcatggtctagtgtgtatactcttgagatttaaggtctcttaagtttctttcgattgtgttttatacatgtagtgattgttatgataagctggtgggattccttttatactggttccggataacactgccgagaaatcatttgccagcggatgtagcggctagggaagattgttggtatggatacgcatgtaggacacaacaccacaacgaagatcatgctcgtaaacgtaaccatgtatgtcgccctaccagagggaaccatcacttttagtccgcttttcatcttttcttttgattatattttgggatattctgtatgagtagttagaaactgttccttgaatagttatcaaaatggattattttgtcatctgctatatagaagatggtgtcgggtcagacctttatttctgacataccaatcagatcaaccgttttcttagcaaatgtattaacaatcttatgaattagccattttgtgtgtttcaaaactttcaattgccaataaaaatttaactacaatatcaaaatgattcgttgcgttattaaaatgttgttatctcaaaaatctttaatactcttgggtctttttcattttggtcaaaatatttgggtctttgttattcaagtttatgtataatcaaaagccaatcgttaatgttgtatattacactaaagcagctcatttacggtccttttttccatattacccatgtgtcaaaatataatttggtaatcatcgtcagatgtgacaagcagataagttttctagtttgctaatgttaattctgtaatcatcgtcaaataatcagattcaagttcaaccagaaataaagcattaaacaaaaaaatcgatcttttatcatttcatggccaaatcaatgcggctagcaaattcagcttatcaattacaaccaattctataaagaacaaaaaaatcaaaaggtggctcagaagtgcttgaaaggtaatcacgagattaaaaaatctcaatcatgtgataaaaggtcattttttcttcatcatcaccaccatttttgttttcacagaaaaacttcaaatacaaaattgcaaataccgtaaaacaacaaactcaaggttgatcttaaaaggataacaaaaaccagaatctgtaagctttagctagctcgaaaagataattttgacaaacagagatttaaagatttgcagttctcaataacttctcagtgtatcagttgtattatatatatagtgaacccagaaattagggcaaaccctctgttaaaagaccaaaatagccctaacaatgttcaattatttcgaaaatactctcacagtttccttggtgtctccgccattactccaaaacttctgcttcttcgaaatttctaagccttaaagtttgataatttatctcgaaagacatg

SEQ ID NO: 7035 - DNA, 3000 bp, Unknown
  misc_feature (1)..( 3000): cDNA_ID_1816538_gDNA_ID_1621124_Annot_ID_56339 3000 nt of promoter + ATG
gaatcaatgcgttgttgtgtgaccttaaacagaaggagtttctggacaagtacgagagcttcgtgcagctcgtagccaaagtttatccgagtgaaaacgttcctggagtaactgaaatgagaggacttctggcttccatgtaaaaaaacaagtgatagaagtatagaaccataactgaaggcagttgttgttatatatccgccatcgccctttattactacgttcttggtcatttcacggatacaagtgatgttacaattattgtctgagcagattattaattctttctttctttctttctatttttccagttttataatttgagattacaagtgatgttacgactttctctctcttttctctcttaatattttagagagaggaaatcttctctgatgctccaatttggctctggcaatggccagtttcctcagtggtgttggtcggattttgtctagtgtcgttggctctcttagcagagtcggctagctctgtcttcatcgattcgctctcgatttggatggctaagtcccggcttttgttcggatttgttttttgttcattcttttctattttacttcgattttcttgggtttgattagatctttagatctgggtgtgtagttttttttttgtcgtcaacctgtttccttgattttggaaagagtacaagagtgaccaaaacccaattacacaacatcaaagcccaactataaacccaaccaaaatttacaactaaataaaatattaggattaattatcaaggacacgtgtgcttgtgcatgttaagattggaaagacgttagtgaatcatcaccgccgccgagttgaaatcgcccatgaaaattcatgatcaaaattcacctatctccaccatagattccgtcaacgaacaactaccttttttaatcactgactcaaatccttttgcccagtaattcgagtatgaggagtaaatccatgaaccatcagatctatgaaacgctggaactcgtgagaagacgagagttcagattggtcgcaaacacgctatcaactattctatgccggctagtagccaaactccactcaacacaattctcgattttaaagtgaagccttcaactacagccgattacggctccaataggagatgaatgacttattatcttcttggtcggaattgaacttccaatgatttcagagatttcgattatacactcggcataaattcttccttgctggaagaaaactaagagctgcaaaaggaacaaaaaaacttaacaaacaaaagccaagatagtttagaggatctcgcacataggcgagaaagagaaaaccggacatagccggaaacaaaatccgacatcatcatcgtcggaaaatgaaaggccaaaagctttctctctcaaaaacttttgagagagaagagagagaaaacctgcataacgttcagatttgttttgatctgggtgtgtagctttttgctcttcccttgctttaatgtttttttcctcaaatttttgttggtcctacaataatgagttgccacgttgttggaactacaataaggagttgtcacgtaaattcaaaccaatttactgaaatgggaacaaaaaagtcgtaatggtggacggagtgcaatcttatgtaggcagaagaccactctttttggctacataatgtgtttgaaattgataaatctacgtatataattttagtagcctttttgaccaaaaatctctttattatttattattaacatttagatctttacaaattatatctcaactaaatattgtattattaaaaacttataatttattagtttgcactaaatacttgaattaacttattcttttattacatatttagtctctacaaaatctatcttaaaacatatttgtctaaatttatatttttaattaaatcttatcattattgaactacattcaattaattactaattttctaaaatttctgtatctatattaaatataaatatatgatttttcttttacttttatttgttattacatctaatttatttgattttatataaaatacatatagttaataaaatattagatttgttgttgcatatcatgtaattcaaatttttaaaaacaaacatatataactcaatcgataaagaaaaaaaaatgtataaaatgtcccacattacttaagaaattgggcaatgattcaaaatcttactataaaaagaaccaaaagtttgaatacgaataagtcgaaagcttgatttatgaagcatccaaaattaaaaatgttatccggtttactctgaatcattattttaaagaactgaatttttaaaaatttaaaaatattaaaaatattaaaaatttgaaaacttttaaaaagttatactataaaacgttttaaatatttataataatattaatacgagacagtatattacgagtgaaattctaaatattacaataaaaatataattataaagtttagatcgttgttattatttttttgaaatttcaaatattataaatatttaaatttttcaaaaaaagataaaataatatttaatttcacgtgatagggttacatggtaaaataagttttagttgatattaatatagaatgatatataactatacgcaaaatcttaaaatttgaagacaaaattcatttttgttgataaaaaaatatacgcatgtggtataaatatatatataaataatattaattaaaataaaatatttcactttctaatgaaaacttcaacccaccgccggtcaatctctggtgcattagattattgtaatgagtttgattgcgctcgtttcctttttgaaattgtgaacatgtcgttgttactatcatgaatcattcaaacaaaagaaaagaaatgggaacaaaagagagattcaacctttcttggcactacaataaggcttattgccacgttgttggcactatttttctcttctctcttctaccggtcatcacctccttgctggatccgcaacaacaacaatg

SEQ ID NO: 7036 - DNA, 3000 bp, Unknown
  misc_feature (1)..( 3000): cDNA_ID_3022241_gDNA_ID_1621124_Annot_ID_172219 3000 nt of promoter + ATG
cgtttctttcgaattaaaaacgtttcggtgatggtcatttctccctttccatagcccgatatcagtctcatcattttgttgtgcaggtttctggcttttgatagcgttttcaaccgtatttaagaggtcctgcctatgtttctttcttcgattcatggacattacctcccccacagttgcagtaactcagattcccaagtcaatacatcctcttatcccaagtttttcatatagacagcctatattactccattcatcaaaccaaaatgaggtcgtttctccatttttgacctctactctatagaactgttgtgctatccctctatattccatatccaagaaccgcaagttgtagtgtcttttactgccgagaaggagccttttcttatgaaatatttctttacccattcaacccacaaagatcctttagccgacagtatacgccatatcaactttaatacacttactttgtttgcttcttcaatcgaccgcagccctagtccaccttcattctttggtgtgcagacctcagtccatgccacttttacctttcaagggttcatcgatggtcttgaccacagagaacttgaacacagtttatctatttcttgaaagcatgctttgggcagccggaaagcagctatccaaaaatttgtaagactgaagatcaacaaaaatttcttcacatgttgattttcaaatttggaaaactctatacaattgtttctagcagacaagataaatgtaaattttccacgttctatgacttttcagtacctcattgattcacttcaacagactactgtcatcattagtcgataacgtcaccatgtgaaattaatttgctcgtgcaacataacatatgttgttcaacaagtatatttattcatccatgatcctcgtcccaagaaagtcatgctatggcacttgtaaatgcatccaacgttacgttcgatgtattttaatctcctcgatcatggccgtgctatctttttttattatttgttttggccatgcaaaaatattgctacttcatttttgtaattttatcacatatataaatgtttgaactatgaaattctattaatttataaaagtattaatttatcgataaattaataattattaatttgtagagattttagactaattttgtaatttaaaaaaaaatattatgtctgaattttttcttcttctttataatcattatatttttaactttacgatggtaacgttaaacctcaaataataataaattattaactttagaaaataaaaaaaagaacgttttcgatgtagtaaaaagatattaaataaactttaccaagaattaatataaataaaaataaaaatattagcaaattcatatttcactatttttcttccgtataacatatatatatttaaaaaaacttttacaattattaatttatgatattaatgagaccatatatttacataaaattttcaaaaatttattatttaattaatatatcgatttgtgttattttttacattgatcttaactcttatacgataatctgaaaacaatttaggctcttattggtaacacacataatgcagaaaatttgccaataaaaaaaatctgcataattgtattagaaaacgcaaaaacgtaagatttgtatttttgttttaagtaaaaattcattatgccaaaaagtgtgtatataattatttatttgcataatataatcttattattctatgcatacaaatattagcaattgtaaaaaaaaaagtatcatagtttacacaaaattatatcattagtaatacaaaaaaacattttcataactttttaataaattttaattatcttacatttttagtatcgaaaattactcaaatatactaatttgttttaaacattattttttattaagtttatatatatatatatatatctacatatatattgttaatataatattttttttttaacaacttcaactttattaaattgtataaggttgatacaaataagaaagtaagaaacgaggagggacaataaagaactgatacagagtagtagtagacagaacgtattgagccatcttatctgcagcactatttcgttcacgattgacatggagtagagatacgttggatagtttggccatccaatgacgaatatcgtaaagaagagcccctatcagagaatgatcatcaccattattgatagttgctataagttcttggttgtctccatcaaaacaaacattttttattccacaagcccaaactacttgaaggacatgtaacaacccggtagcttccgcctgtaaaggtgaattagtcgatggtagttttcaacagcctgtaattaaaacctttccttcatcgtcccttatcaaccatcccgtatttgtaaaggatcgtcccagcataaagccactgtcaaaattacacttcacccatcctcttggtggtggtcgccattgagaacctctgtcatgaaccgtattcttgtttgtttgactacctcttgtgccttcagtataactgtttgcttccagccattcatttgcctcgtgtcgtcctatgtgttcttcggtttgtggcagtctcatgatcttcttgaaatatttatttgtcattttgcaaaatatatccaattaatatattttaaaattagtttcattcgacgattttttagtttgcaaattttcattctgcgaaatttttattctacaatttatgtcattatgctattatgcaattttagcaatcggaaccttaaggaaaaaaaccgacaagcgaaccgttctgtatgtatttcggttattttcagccagccctatttatttggttaagcttagattaaaaagtttcggtttggttcaatttgatatggtttggaggtcaacaacaaaatcaacgaactgaataaagcgatcgcgttggttctcttcttcaaaacaagctctctctgtccctctctgtctctctctttgggtaatcggaaaaatcagaaaa

SEQ ID NO: 7037 - DNA, 3000 bp, Unknown
  misc_feature (1)..( 3000): cDNA_ID_3049604_gDNA_ID_1621124_Annot_ID_172210 3000 nt of promoter + ATG
gaccggagcaccaatcttgctccctactctaaagacacattcgttccatgtttgtttgctctttggaatgcctttagatgctttatttttatactcatatgtggcgaatatgagtttaaccaatccgagatggcaatcttttccgatcttcaatatatcacgacaacattcatctgtaattggcactgtctcatctaacatgttcttgaaaacctcatttccgcattttgagcttggcttttcagagcaagcctcaagaaaatcgagctgtttatgcgagtaatggtgagcaagctccctatcatattccattgcgggtgaatcagcttcttcgaatggagcttcaccaggagcttcgacgtaaatatcaaactttgaagatggagatatggccacatcttttggcacctcctgtgaatatggatcaatttcttgggagaaaattggacgagccatgtaaaacattacaatagacacgagcgttaccatgagtagagattttgtcattttttttatggatgtaagaatacttttagtattgaatgtaagattgatgacatgaaacaagaaaacaagagattttataggttaatcactaaaagatatttgttcattaattaatagttatatgttactaacttcaacatttaataattttgtttaagatacgtttatattaaagactatgctaattttacaaagttgtaactttaaagataacaacactctctttaaagactatgatcgaacattactgtagattttgggcaaacttaaagataacaacactctcttttttcttcaaattattacaaatcaaaaatactatattagacacaatacgattacatgcattgttttcacgcctgatccggaccgtccggtccgacatggtaatccgctacccggacatttttcctatttgggtttagaactaatactcgacaatctaaaaccagaaaaatccacaaaaaaacccttcattaacttgcgatctggtgaagcgattaaaacaggccggctatgggttttaaaattttcatttgattttggaatagaatctagggtttcaaactatattcacttatttttagaactttttcatcatttaatgttttagatttggtgaagacttcacaatcccgcttttaaagaatgaatagaattgtgagagagaaaaaacaaaattcattattttaaattcgtgatgttttcttagtttattttcgtcatcaatgatctctagtatttctgttatggttttagattttagttggacttaaaaataataaataaaattttaattgattattattgttagactaaaatgacgatcgaatattacaatgatttagtattcatcaaatttaattaaaatttagttgtttattattgttagacttttgttaaacttggtattactatttttatttttatttaatataaactatataacttttctaaatattaaatatattaaataatttttttttaattgacttgtggtcaaacccggttgacacaatggccaagtggccccaaaaggcagtccgattcttcgtgtgggttgggtttaagaaccatgttattattttattttgttatcgaaattaatcgaactttttggttttctggtcaaaattgagttaaataggggtaaatttagttgattgggttcggttagtttgaaaataattaattaaaaaaaatgaaaaacaaaaagggtcgagagaggttaaaatggtcgagagaggttaaaatgatgaagacggtagcgttgcgtgagcacaagtcgaggatggttgtttttaatgcattgtatttttattttttaaataacgtttagctgtctgaaaaaacagaatgacatacaaagagtccatcatctataatctctctacaacttctgtggattatgtatcaatttgaccatgtttgaccatctgaataaaaaggagatttgtggaaaaaaattcttgtagtcgtctatttttataactttatccttcatcttaaaagaatacaaaataattttttgaagtaaaaaataattcacaatatttgcagaataattttataaagtaaaaaataatacataatattgctattgttaagttttctcatattttttaaaatttgataagtaatatatcaattcaaagaactcgagacgaaaagttcaacttacctttctatttttgaaaatcaaatgtatgtgaacgaaaaaacgtttataatatatgtataaagcctaaattgcatattattttttactttgaaaaattatttcgcatttttcaaaaatagagagtaatgttacaaaaataaacgactttaaagctttttttgcaccaaaccctaaagaaaatcattgtattgtatctaaatgaattccttgagaactaccaagataataagaatattgtatgtggtccatcactctatgttattgtaagtgtctatacatataatttgcaaaaagtgatcctcgtatgattcatatccgagtgtagactataaaactcatgaaactgtagtctcgtagaaattacaataatatatctagaaggtgataagttatttatgttgtggtacagtggggaacctatatttgcatgccccaaaggtaccaaattcaatccttttaactacactattttttttttttcttacccttttgattaataggctaaaatttcacaattaaacctgaatattatatttgtacctaaaaaacaaaaaaatgaatattatatagttttcgattggttggtggcatcattaaattttagttagaaagatcaaacacgttgatcactcgagtcacctaatcaaaacaagttaaacacgaatattttattagtctcaatctatcattatttcaatgctggtaccgaaaatcatcatttaaacaaaaagtcttatattggctctctcttcaacttttaattttctaccaaacatatacatcaaagcttgactctctttttctctcccatg

SEQ ID NO: 7038 - DNA, 3000 bp, Unknown
  misc_feature (1)..( 3000): cDNA_ID_1816519_gDNA_ID_1621124_Annot_ID_172202 3000 nt of promoter + ATG
ttctccgtcttgtttcagttggattctcaacttcatcaagtgatgcttctttgcatgcttgaacttcaccaagacattgttgaacaaagtttcagaattctccttccacaactccaaatcctcatccatttctcccttgcctttagagaagctttcctatcttcttcatccctttttggagccttcctcttgaaggtacgatatgtgaaactgtttgtaattgattgtactctctcctattcttttcttcctttttttgtttcttcttcttctactttttatttttctttttttctcttcggtttctcaccgttgatttgttgtctccttctttctcttcttctcacagcggaattcttgttatccattttttacttggacatgctccaagaccaagataagctttgataccatgttggaatattgagagaaaaagaaaaaattgagtaagagataaatatctcttctcttgtgaagaagacaagaacgaaaatagaaaacttttaatgaacctgaaacttattagttatttacatgacgatacaatgagtatatataggaaacaagtagactcaacaacacaatgagttgtgtctcttcatacttgtgtctcttcctacttgtgtctcttgacaaataactaccttaatacataaaattttaaatcagaaactcaattatcgaccaacactctgacccaccaatccagtacaaacctccgaaaaggagtagctattcgacaaccgacgtgtccgtcttccaatctcgttcctagcaaccagacgaactcagatttatcctctttttctccgatccgattaggaggaagcgaattgtgggagaaaccaaggttgatggctcaagcaagtactgagaatccaaaatccacaaaagctttctaaaatcaaagtggatctacaattaacctccatgacgagtagtagtgaaagcaagattttttggttgtttggagatagtttctaatgatctatattaacattttagaaatacattttaaggaatccaatcgggtgagttggatcttgcctaatttctacaaaaacagaagatacttactataaattaatgatagttcaaaatcaaagtgtaatatttagtttgtctttcaataagttttaatcagttagaataaatttttaaattgactcgaattacatatattttaaataaaaatattattataaaaaagaacaaaatgatgtttagttattatgggatgggttattattgtgagataggtttagatgagacatgtttttaagacgggatggatttagatgagacagttttttttttttttttttaacatcttcttttccattgttattatgatcaaaagttttccagctgtaaggctgaagaaattacaatcggaatgtaatcataaaatttaaattgttcattctggggtaagtgactcttggcaagaatatccgccggtttgttctgttttcggttgatccatgtgaatctgcattcctgaaaccgttgcttccaagcttgaacatctcttatccaattaaaggtatcaaaacgtgattttctcctattgaggatttccatcacctccctgttatctccttcaaaccagatttttctatgaccgtggctccaacagctttgcattgcgataagaagagcttgaaactcgctttctagagcattagaagtgtggttccctgtcgcttgacctgcacctacaaattggcccgactcatctcgaattacccatccagccttacttggcatctcccgattgtacgatccatcatagtacaacaacaacttaacaaactatctgcaacaactcccgctatggatcttttggcgcttatggaagagtcgaaatattctaacttttcagaaaaggtgcattccatgggacgataatcttcgattagcaaagagagacgcttctgaatggcaggacattgcggatcacccccaactatcagcaccatcccaccggcgacaacatgatgatcagagaacaagctgttggacaagaccaccccacggctgaaagaaggagacaggtttatatggcgggatgagttttgatcgatattaatatgagacatctcaataaaattcaatattatagtatatcaaaataaatgctaatcttttttgacacatctaaatgtgtatttgtaatacaaagttactaaattacgtatgttctacgagttaaatctaaaagcatcgaaaatttaaattatataattttaatacaaaattaataaatagaaaataaaatattgtcatgtggtatacttttggtcaagtcctaaaaaataaaaaaatatgaaacttattaatatcgtaaacttacgactcattaaaaaccatacacaaacttatcaaaaattattaaccaacacaaataaccataatctaatatataacaaattctaattttataaaaattaaaaaataaataaaatatttaacatgcagtgtatttcagattatatcctaatttgttatcaatagacgaagaaattgttatgtttcaaaaaaaaatctttagcaaataaaaaaaggaagctgaaaaataagttagaagtccaaattaataagccggttgcatgaaaaaagaagtcagaaaaaaaggaaagtacaacatcggagagaatctaaaaacaaacactcataatagcagtatataacaaacaaacaaaaaaaaaaaaaaacggttaagatctaaactctctccgtacaatccaacggttgtcactaaactaggatggctttaaacctagtaactcacataaacccaaaaaccggacccgtatttgccagttaccaccgaaaccgaatcaaaaacccttaatttcgacctaaactttgccatattaatacaactctcaaaacacaactctcaaaacttcccctgtttggtccgaaaccgaaactactaaccctaatctctcacatcacataaacaatcacttcacatagccgcaaaatttaatg

SEQ ID NO: 7039 - DNA, 3000 bp, Unknown
  misc_feature (1)..( 3000): cDNA_ID_2993312_gDNA_ID_1621124_Annot_ID_172201 3000 nt of promoter + ATG
cgacgaagaccgaagcgtcacttaacgcctagctagaatcctacaaaaaagcaacacaaacataatttatttataactaattaacaataaaataaacactatagtgagccacttgaaccatgaacttcaacgaccaacagcaacacaaacttgtggacaagaataatttatttatatgtaatatgtggacgtgaattatttgttgaacctccaagactagtgataagaacattttactagtaattctgaccttaagaagttcatttcaccacaaacgacataaaatctaatataatttggttaaatgtaacatacagtatgtaactatgggttaggaatggtttacgcttaccaaaccaatttagtcaactgacagttctgtgaggtttattcccaataacttcactagaaccactcatttctcactagaaattcttttgttgcgggctataaaagggataatgctagagaaattaaagcacatatacaagaacaaaaataattctataaagaataaaacgtttagagtaagtaagcttgtagaagtaaacaaaaaaggttggtaatttccgccacctgaattcgagtagcattagccatcagagttcgagtaaaacgtttagagtaagtaagcttgtaaaagtaaatagaaagggaggtaattccgccatctaagttcgagtagcattggccatcagagttcgagtaatttaacatggtttctccagacttcaaaattagtctttagagcatggtcataggtgatactcataaagtatcattaagaactttttagtattatttataatgtttgtttaataaatatattttatttctttttagcaaatgcgacaaattaagagatgacatgtcagatgatactggtatcaaaaatatcactaagctgatactgatcaaacttattttaattatttatcaatataaaaataatttttggacttatgatattttagaaatattacccgtatatatggtattaggtatataaaatttttacgatcacctaaattataaaaagaaaaaacaaaacaaaacaaaaagtaaaccgaaaagggtcttgaacggtaaaaattatctctttccttgccttaaggtccaattccagattaaatccgagccaaaatccatcacaaaactggattaattaaggcatgtgctcgatttagcgtttctgaattaaactcttacgtgtatgatatttggatgtgtatataatgtctggggtgagtaaaggaaaccgaagttgaaaaaacaaacaaacttgacaaaagttaattagtttaatggttaaatcatgaaatgtcaccaccgaccacttgatctcccatgctgtagttgaagaagtttgcctcagaccactttagtagcatacaaaaaagaaaataaataagagggtgttattcagttatggatttttctagaattgaaatgcaacactaaaataaacttttaactcaaccgatccatatatgtagatgagttcaaaaccaacaaaaactaaaaaaaaaactatagataaattggtcgcatattaaaagattaaaaaaacatggtgaattaagtatttatctacaaattatactaaatacaacattttttatgttcaaaaaaaattggactgtcattttatctgttatatatatcggaaccacgatatgtaaaaatttaataaaatatcaatttatttttaaattatactttttcttaaaataaaataatcaatcatgaattattctattctcggagtctaaaaaagtaaaatttaaaacaatttaatttatgtagaataatgttttgtatgaaactaattttgttgtctataattaacaagatcgtttatgtttgcaaaaacaaaggaaattttttttttttttttttttaatatctcgaagttcaagccgaaaggcctacatctccgagatgcaggatccacaccagattttcaacaatggaggaatataaaatatcaaaacgacattcatattaagctatgtattatttaagtttataattaatgattttagttaaccaaatacagttgatttatataaaatttggattatcctattgaaaattatgcatgtccaaaacttcttatgagatttatatgtataagtttatataagggtttatataattattaattattttttacataaaagcctaaccagagacaaacattttttttcttctaaataatctatcaattattaatttctagaggttaaactaatgtatatacataatgtgggtgtgaatttttgttggttttgttacattcgtttatttctgttttctttatttttttcagttaagctagattgctaaggaataaaatttgaaattagtttagctcatttaaacaaaatatcggttagattcagacagttcaacctattttgaaaatctattcagttttttttttttataaaatgaaaaatccgaagctcatttctcagtattatagtagagaagtgattttttttgtttaaattagtttagcataagcacacacaaaattgttttacattacatcacatgtgatgatgatgtggataagtgtatcgatcatccgccaatatttactgattactgtaatataaacattaaaatttcttcaaaaatcaaagattctattgtacctttctatttcctctagagatttcctaatgaagaaaaaaccagcaaagtcattatcaaattcgaccgtccattcgaagacgtacacgtctttgtagtcaacaccatttacctaacttcctagaaaaccacgtaacattgcatgtgcctagtttctcttatataaccccaatcaatatatatatatatgaatattgaagataacatcgttaaattgcttttaggttctcattatatcatttctctttaacttcgcaaacttctcctcgataaaatttctctctctaaaaaaaaacaattagaatcttgccttttacagagtaacactacatgccgaca

SEQ ID NO: 7040 - DNA, 3000 bp, Unknown
  misc_feature (1)..( 3000): cDNA_ID_3049617_gDNA_ID_1621124_Annot_ID_172196 3000 nt of promoter + ATG
tttttagtgccaaaatttacttttcccgccaaaacaaaattccgccaaacttttttcctgccaaaaagaaaatttcccgccaaaatgtttttcccgtaacaaattttttctcaaccaaaataatccttttaaaaatccttagaaagttttttaaaagctttgatagttattaaaaacccttataaatcattttaaaatctttataaagtctttaaaaacatatgtaaatactttaaaaatcccttttaaacctttgtgaatcattttaaaccttttacaatagttttaaaaggatttacaaggatttacaatgatttttaaacctttgtaaatccttttaaaatcttcttaaaactcttataaagtcttcacaatcattttttaactcttagaaacaaatttgttagtattttaaaacatttattattctttttgaaccattttaaaactcttgtgaacctttacaaaaggttttaaaaaaacttacaagagtttttaaaggattttaaaactcttgtaaatattttaatttttttttaaactattgtaaatcctttaaaacccttgtaaacccttgtaaaccatttaaaaatctttttaaaactcttgtaaacccttttaataattttgaaccattttaaactcttgtgaacctttacaaaaggttttaaaaagatttataagagtttttaaagagttttcttttaaattctttaaaaatcttttaaaaacccttgtaaatattttaaacgccttaaaaattccttgtaaatcttttaaaacacttttaaaccctttaaaaatcttttaaaaccctttaaaaatcccttgtaaatattttaaaacccttttaaaccctttaaagatcttttaaaatcccttgtaaatctatttccagccaaaaaaatatttttgcgggaaaaatgtttttgagaaaaaaactttgatggaaatttttttttcgaaattttttggtgggaaatttattttggaatattttaggcgaaaaaatattaatatttcattttgttaacctaaaacaatttcgaaatatgagtaaaatggtcattaaaaatttaaagaggtataaatgaaaatggcaaataagaaaaggtagaattgaaaaggggtagtgtggaaaggacattctgagcaattattcaatattgtatgactactaaattctcatatgcaaatgtgaaatcaaatttgtattcaatcacttgtttatataatgtctggttctttagatattagctcacttcaggtaagaaaacaaaatgtggtagcctcattacttcattagtgcaaagaaagtgattctttgggataaatttggataattttgaatcaaagctgtagtaggacaatacacttttatagtattttttattaaagggaaaactcaacatctaaaggcaaggaatatccaacagtttgaacgctaaacaatcaagggacaagcagagcgttttctaaataaagttgccgttctttgagagccgagctcgaaccgtaatctggcttcatcacacacatagttcatcttcccggtcgtcccatctctgcaatcaggaaaatgcaacctcgatccaaacctcatatcacctctttccttaatattctccataatatctttcacaatcacaccatccatatctccttcagaggcaatcgatgtaaccttaagcagcttaggccaccacggtttgatattgtaactaaatactcacaagagttaatctatgttagttttcgaaacaaaagaaatatgtgaacaaaactaacaaccaaggagtgaaatcttttgagtccacatgcaatatgtgatacaacgaggattcatccctctcagtatagactagttattctgaaacatagcttcctcactaccgcaagaatcccatgatacaacaactacgctcttacaacaatggttaatttgatcacgattcaataatcatctaccatgattcactctctttttggttaaagttcaaagtaatattttcgcatttctttgatataaaacgatgtcgattatttggttcatgactttttatttctcttagtttcacaacaacttcgctctcacaacaatggttaatttgagcactaaccaatgaccaattgaccatgcatgattcactctccttttggttaagttcagacagtgtaaaagcttttcttgttacaaaatgctgtcgattttttggttcatcaattttattaatttcttttgcactttcaccaacacctaatattaaaaagaaaataaaaacaagatccaccaattcaatgcgatagggtaagtgactaaatgttcattgccgttgtcaccctttgaacccaatttaggactcaaagagccgtctgattatatttaaccttggtcgaagtatttctaacgagctggtaagtcctcattggtccattatattcactgtccacaataattttaattacttgtacgactcggttaactccttctaggaaaaactaaagtgtacctacctagtacatacgtacttcttcatattaccacaagtttttttttttttttcttgcattcaactacgtgtttaaagtttcggccccaaacttcggcccaaaaacaaaaaccaaataaactattacaaaaatctttgttatcatatcacactatcatttcaagttttcaaccaatccatactcttaacaatcccattaaattgagatttattcatattaagaaattatgctgataatatttaactaccaaattaggccgattcataccaaaactatagaatatgtactaaataattccattaccttcgtttagtcatttttggcggtttatttcttttggatagatctcatgtcagacctttttagactattcattatggcacctaccacactagtgtgtctccatcttctgtatttatatacatatatcataagtcagaacaaagagaaagcaaagaagagaaactaaaacagagcttttttcacatg

SEQ ID NO: 7041 - DNA, 3000 bp, Unknown
  misc_feature (1)..( 3000): cDNA_ID_3049621_gDNA_ID_1621124_Annot_ID_172194 3000 nt of promoter + ATG
ttgagaaaattgtttatcggagaacaacatcatctctttttgttttttgatatgcttaaagttaacgagtctctcagtgattgttagaggggtacggtttgttatgtgttagacttatgttagattctaggatggttgttgctaagccaaagttcttgattaattttaagtatgagatttaatcttcataagcttgttgatccttcgtttttattttaatggtcagacttgatccaatgtttatgttcatttgaaggcgaagatcttaccgtttgtcaaacatagctaattagtggtggtattagcaacagatctttaggactgtcgttgatctgttgcaactcagtcactaaaaattaacaaatcttatataaacaagaggaatattaaaaagaaaaaaagaagatgaaaatgaatatcaaaatagttgtgtgacgatacaatatattagagatggactacaacaattcatgaatcagggtcacagactaaccgttaaagcagtaaatttgtctgcccatctcataagtgtttgaattaaaatttaggtcagtcgagagctgtgtgctatatactagatagtctacccttaattactatgtttggttttcgcatggagatttactataaatacacaaacaagtaatagtgctcaaattgtgaatcaacccatgcactaatccttttcatcaattcggtcacggttaggataatggattccgtaatatggtaacaaatgcattttctgaaatatcaaactaacatcatttaatgattatattgtttgatacattttatgatatatcaaactctgtaaatcaaccaatatatatacaattacagtctaacttatcttttttttttttaatctgtgaatggtttagatttgcatggatttaaggacataactaattaataatggtttagcgtcttgttgttttcctgtttgggcatgcgtgcttctcttgagtcttttgaccttgtaatctctattattggaaatttatgaagaaaaaaaagagtacttgtcaaaagataatcttatagttgggttttactgtaagatattgaagtttcgatgttttacttatatctgaaacgattgatatttgcaataataatagtacgatttttttttgaaatattatgaaaatctacaagagctccgattttgtggtaagtcaagatcgtaaataaagacaaaattaactcgagtctcatgcaatgttgtatatggtatacaatacatcaataacctattaattaaactttgtaaagatagtaaaaatgattattttggtttacgctatcgttcccttttttctatttgacatgtgcatttttacggaaagatcgaagtcgcaaatatagtcattaatttagtcaaaagatgacatgcatattaagttcttaacacaagcaaagtcttgtatttcatattattttctttatttcgcttattcattattatattgttacttggaccatttaccttgatttgttacacaaaccatgacacatgcaagattcaaatacgacttagagtttgatcagagggttcctcgctgcagaagttgcataagcatttaacaccaatagcgttgttctcttcccaacggcatactccacctttcgcgcccttgttcttacggcagttctgatcacagaacgtcgggaatattcgaggtgcacagtagctgaaacccacatcgccgccgtattctttcaggcacttcctatcatacgcttctatctcaggagtttctgcttatatttgtattcatatagataggttaaaaagcaaataaaaaaacgatgtataacgaaacttgcttcgataacggagaaaaataatctctggaaccctatgatgaatcacaaattttaacaaatatgaagtgagttagtttaccaaagatagccaaaacgaggatgaaaaagatggcgaaggtagaaactgacttcgttgccatggccaacttctttgtctctgtctttttctctgtctctactctctaatatttatatttcactcggagttaatatgtatgcgtaaatggatttgcatgcttaacacttgttgaggtgcaatactattttatatttatcgcttggacaaactattatcacgacttcacgagaaccacaaattcattacttagttttcatcactctatgaaaaaaaaaaagtatatttacaaagcaaaccaaaaatgaagtgggaaaaatggtaagacttcaagaggttatttaatactttatttttctcatttcgggatcaacatttaaattgaggttcaaccagtttcatcttatgctatgtgtttcaagctaccatagtaccatccactctctttgacgagcacgacaagcccccaagctcatccgctcaattgataagtttcatcggcaaaaatagtctaatccgcatacaaatttgtatgtaccaactaccgaaactattggaactaggcctcaatcgagtatttgatttggtttcattcagttctggttctttctgttgtagagtttatgatccatataggaaccaaatttttggttattttcagatatttttagacatttacgattattttctaaatattttttgatatttttttatgattatgatatttttggttattctatctaaaaataattaatattttggttattcatctttcagatatttttggttatttcagttcggattctaaaatttaaaatccatataagtatttttaattttggttcggttgttgttcggttcaattatggttcggttctttcgattcttttgtccaggcttcagttttttaattaacgtttttttttccttcaaattttttgttggcactacaataatgaatgacttgccacgtaaattcggaaccaatttactgaaatgggaataaaatagagattcaactttcttaatccgtaagcttaattttctcttctctcttttacctccttgctggatccgcaacaacaacaatg

SEQ ID NO: 7042 - DNA, 3000 bp, Unknown; identical to SEQ ID NO: 7041
  misc_feature (1)..( 3000): cDNA_ID_1839118_gDNA_ID_1621124_Annot_ID_56340 3000 nt of promoter + ATG

SEQ ID NO: 7043 - DNA, 3000 bp, Unknown; identical to SEQ ID NO: 7040
  misc_feature (1)..( 3000): cDNA_ID_1816531_gDNA_ID_1621124_Annot_ID_56342 3000 nt of promoter + ATG

SEQ ID NO: 7044 - DNA, 3000 bp, Unknown; identical to SEQ ID NO: 7039
  misc_feature (1)..( 3000): cDNA_ID_2993312_gDNA_ID_1621124_Annot_ID_56344 3000 nt of promoter + ATG

SEQ ID NO: 7045 - DNA, 3000 bp, Unknown; identical to SEQ ID NO: 7038
  misc_feature (1)..( 3000): cDNA_ID_1816519_gDNA_ID_1621124_Annot_ID_56345 3000 nt of promoter + ATG

SEQ ID NO: 7046 - DNA, 3000 bp, Unknown
  misc_feature (1)..( 3000): cDNA_ID_2056932_gDNA_ID_1621124_Annot_ID_56346 3000 nt of promoter + ATG
aataaagcctctcttgcctccaatatatctctgaatgctcgtcttaaattaaaaattcctatattctatctgtttctaaataaaaacatttgttagagttttcacatatattaagaaaatatattaaaagctgactataaatatatatatatatatatattttttatgatttacagttttaaattatttaaaccgataatattcaaatattttttttgaagtttacatttcatcaaaataactaataaatattgcgtagataacctaaaaactttattttaaaaaacaaatatttttgaaaaacaagataaaaaatctattatttagtaacagacagagtagcatattaagttcctagggagcttcacacacattggtcctgaataatatgatccaaataaacatgaaataaactgagcatgtaaatgcatgggccatgtatacaatacagagcagacatggaaagttggaaacatatggaagtatgaatcacctggattacataatatactcagacatcataaaacatcatcattccatttttgaagtaaaaaatttccccacattttagattttatttaagacaaatgctcttctcttgtattttctatataaatatcgaaaatcacattcttctagtttccacaccttatgttctccaatccaacacatatattttctttcacaaaaaaagacatattttaccttgttttgttttacatattcttatattttatcgatttgtctttgtccccggctcatgggaatgtcgaataggtcagtttctacatccatttttttccttgcattggtggttttgcatggaattcaggacacagaagagagacatttgaaaactacttcgttagagattgagggaatttataaaaaaactgaggccgagcatcctagcattgtggtcacatatacacggcgtggtgtccttcagaaggaggtcattgcccaccccacagactttaggccaacaaatcccggaaacagcccaggcgttggacactctaacgggcgacattgattcgatcatatcatacgtcataatcttatatcatatagaaaattacatgtattttcattcagacttgtcttctaatgctaaaggggtgtttggacatcactttatcatttcaatgttttgacagtactatgatcattatgtctttgtcgtgggtttgttacactgtcacgtattgtaagattatataatgaatgaattgcttttaaaaattaatatatacattaatgataaatcccttgctaaactgtctatgattgctagttgatcaatgggtttcattaaatatagacctaactgaaaacactttaagaagaagtttagtaggaaatatttacttatcacgctttgttttgggtcaatggttaaattatttctaaatacgaattcttagacgatatagaataacagagttaaaatattcaaaatgtttatggactaacgatatgctcattgagatgaagcttttattaattaatacccaatctcagtcttttaggtccctcgttttttttccttgctttaccatctttgtttatcttcttttcttttatatttttatttttggtatcaatgctaagtatttatacaattttcaaaaaatttaacagaaaatacacgaatatcggaaaagactgagaagctaacaaaaagaatgaaaactacaataaaacgcaacaaggaaaaaacacaagcgataacccatctagttgattctaagaagattcatgattgtctcagtttcaaagaactcgactccgcatcgctgttgccatgagcaaactcttccctaggcaagccttcaaatcctcatctttccaaatataaggttctccttcaagagccaactcttaagtatatttattttgttgatttgagaatagtacttggaaagaagattactgattggttcatggtaaagttattaagtactctcatatctgccatcggcgaggaactcacatatgggaggttgacattaacggagctgcatattctattttcatattttttaacatggatgcgaatgttacataagaaatgaacggttttgttttaccaaaaatctttagaggcattttgtttcatttccaaaaaataagaatgaaaggttttgtttaccaaaaattatattactctaccctttactttagatattcaaattcatgacattgaagatttttgtttggcaattaattagtcactaactaaactacctacatcgtctttaactctttatgaaaacaaaacaaaaactatcaacatcgcacataataattgattttttttaaaactcttttgttaattaattactactctaattaagttatctacgtcgcactaaacttgggttagttaaaaaaaaaattacaagttaaaaggttcctaaatcaacaatcttaaaatgttagttttctctaatcccatttctcaaatgttagttttgcagcaacaatctttatgtagatattttgtttcacaatttttttctttttcctctatttaaaaactagaaagtaaaaccaaaaaataagttaagaaaataataaacaaaaaaggaaaaaagaaaagcagaaaaagaaaagtacaacatacgagagaatctaaaaaacaaacactcataatagaaacaaaacaaacaatcatcaaaaacctacggtcaagatctaactctctccgtacaatccaacggttttcactaaactaggtcagaactaaaccgtatctttaaaacctagcagaacacacacagaaacccataaacccgacccgtatttgccagttaccacaataaccggattaaaacccctaatttcgacctaaactttgccattaatagatatctcaaacacaactctcaaaacttgccctgtttggtccgaaaccgaaactaaccctaatctcacatcacatcacatagcaatcacttcacatcacaaaacacctcatagccgcaaaatttaatg

SEQ ID NO: 7047 - DNA, 3000 bp, Unknown; identical to SEQ ID NO: 7037
  misc_feature (1)..( 3000): cDNA_ID_3049604_gDNA_ID_1621124_Annot_ID_56347 3000 nt of promoter + ATG

SEQ ID NO: 7048 - DNA, 3000 bp, Unknown; identical to SEQ ID NO: 7036
  misc_feature (1)..( 3000): cDNA_ID_3022241_gDNA_ID_1621124_Annot_ID_56348 3000 nt of promoter + ATG

SEQ ID NO: 7049 - DNA, 337 bp, Unknown
  misc_feature (1)..( 337): cDNA_ID_3022237_gDNA_ID_1621124_Annot_ID_56349 3000 nt of promoter + ATG
ttcgtaaagttgttttctatttacttaaccctgatttgtcttaatatccggaagcctaattaggatgattttgtactttcagaatctaatcttggtcaatggtcgtaatatttctttaattgttcatcagataataaacagtagaaaggtatgaaaacgaaagtggtgttgcgtgcattgaaaagaacacaagtgatgttagataaactgtcattgtgcagctcagttttgtctataaatcctaaactcagaaattatctagagatttcaacctttcactcatttgtattctattacaaatcattgagtttagaaataaaatttgcagctgagaatg

SEQ ID NO: 7050 - DNA, 3000 bp, Unknown; identical to SEQ ID NO: 7035
  misc_feature (1)..( 3000): cDNA_ID_3049625_gDNA_ID_1621124_Annot_ID_172192 3000 nt of promoter + ATG

SEQ ID NO: 7051 - DNA, 3000 bp, Unknown
  misc_feature (1)..( 3000): cDNA_ID_3049629_gDNA_ID_1621124_Annot_ID_172191 3000 nt of promoter + ATG
caatgacgatggtaatgataatgatgatttggggatcatggacattgatgaagctgacaagaaacctggtaaacttaaactgcttgccatcagtaaagcattcgctacatattataaggtctaatggttctgaaagcaaaacaatattccaatttttgcaggtaaaaactctccagacctgacggcattgaatgaatctcttcaagatttacttgatggtattcaggtaagatgtcccccaaaataaggtttctatgtgaaaacctagaggtagcgttcatttgtcttactaaataagagatttgtgttcttgtcatcgcaggaggatttctatgctgttgttgactgggcatataaaatagaccccctacggtctatatcaatgcatggtataaccgaacgttatctatctggtcagaaagctgatgctgcaggatttgttcgccttttgcttggagatctggagtcgagaatttctatgcaattcagccatgtagtccgtctactcagagattgtttagtttttgttcctggcataccattcctactaatcaattcaagttgactttaactgcagtttgtggatgaagcttgtcaccaaattgaaaaaaatgaacgtaatgtaagacagatgggtgtcttgccatatattccaaggtaatcaagaagtccatacattgaagtgccatgtgaatacttatttatgtccccaccagttagtacttccgtccaccctgtttataatttcagtcaattttgtggttctgaactatttctcccatttagattgttgttcaggttgactataggtgatccaagaacccgttatagtattaacatgaggctttcctaatattgttatctcattttcatagatttgcagcacttgctactcgtatggaacagtacatacaagggcaatctagaaatttggttgatcaggcgtacacaaaatttgtgagtacagctatttttatgagtttatagaacatgactaatgaaattacacaaaccatgtaagcaataatagacagtctctgattgcatatgatcttagttcacttacaatgtataaacccaccattagctcatgacttcattcttaacaacaacatataagtaaagtatatctcagattgtctctgcatttactatcgtcaatttcttttgtttctttccttgtttagctgatagagtctgactcctaatgttttataggtgagcatactgtttgtgaccctcgagaaaattgcccaacaagatcctaaatatgcagatattctccttttggaaaactatgctgcttttcaaacttggtaggtccttttctaactctctctctcttggtttgtcttcttattccctaaccttgtacattttgtttgtgcagcctgtttgacctggctaatgttgtgccgactttagccaagttctatgaccaggcaatggaagcatatgaacaagcttgtacgcgccacattagcatgataatttactatgtaagtggttctccccatttgcagctaatagcataactcccgtttttttccattcttttcgatttattgttaagggtacacccgtttgtgtttgcttcatgtgttctctcgtccctgcagcaattcgaaagacttttcctgtttgataaaaagattaaggatctcatgtatactatcacccctgaagaggttagttgttgttagttaactagttataccattgtttcactttctcattgtgtaaactatgtattggcgtgttactctaggtttctagggtaaaaacaaaataaaactgatacattatctctatatttcagataccattccagcttggtttatcaaaagtggaactccggaagatgttaaaatcaagcctgtcaggggtaagcaaatgttcattaagagtgtattaattgttcacagaccttttcgtagatcattttccaattcttctctttgtgtgtaggtggacaaatcgattgcagcaatgtataaaaagttgcagaagaatttagcatcagaggagttgctaccatcgttgtgggataaatgcaaggtacccatttaaactgaaaagttgaggagagtaataaataacagtgcattattagctcagtgtttgaatcaatgcgttgttgtgtgaccttaaacagaaggagtttctggacaagtacgagagcttcgtgcagctcgtagccaaagtttacccgagtgaaaacgttcctggggtaactgaaatgagaggacttctggcttccatgtaaaaaaaacaagtgattgaaccaaaactgaaggcagttgttgttatatatccgccatcgccctttattactacgttcttggtcatttcacggatacaagtgatgttacaattattgtatgagcagattattaattctttctttctttctatttttccagttttataatttgagatactaaaacttgccattgactgctccttcaccatggtagtaggataaaattcattaagatacctgaatattaacttcccgctattaggcttattgatgactttgttaagtcctgcttgataaaccatggtagtaggatctagagatgtcatgcgcagtaacagctgatatgggaagaagaatgaagtgagacacgtggacgaatgagattagaagttgaggaacggtcaggattaagacaccaaaaacagagtcagcgtttaaatgaagctgagaatgaagattttacataatcgtgaaaattgttgaagtttgttgttcttctctttgaagtttctgggtttcgaatattatgattcatcctctgtgaagaacattgttcttacaaggtgaatctagagtctcccctattttatgaacattggagctcattgttatccttgaatattaatcggaagtgttattttggttgattgatcgattgtttgtgattgaagaaacagatcctagtttttctgtatcaaaggtatcagagcgaagacgattctcggtcttcaacaatg

SEQ ID NO: 7052 - DNA, 3000 bp, Unknown; identical to SEQ ID NO: 7034
  misc_feature (1)..( 3000): cDNA_ID_1816550_gDNA_ID_1621124_Annot_ID_172187 3000 nt of promoter + ATG

SEQ ID NO: 7053 - DNA, 3000 bp, Unknown
  misc_feature (1)..( 3000): cDNA_ID_2041665_gDNA_ID_1621124_Annot_ID_172185 3000 nt of promoter + ATG
gctgatttaaagtgatccaaaatttgaccctgtctccgaatctttggaatagaagctcagcgtagtttgtgtagtcctccctattcacgtatcgcacatattatagatttgatagcagtgttacatagcctaaacaaaagaagaagaaaaaaacccaaaaaactttgaatcaaaatcgttaatgcacttacactatacgtgtgcttaagaaacctccatattcgtcttctaaagtttggggaacatcccaatgaaatatagtaacatatggttctatgcctgtattcatgtaagttaaatgttaaataaaaaatataataaaattatgaaaaatgtatggttaagtacaagtatatatcgaatttaccatttgctttcaactcgttaatgagattgttgtagtatgttatcccattctcgtccactcccccagtcagtcttccctctgattaaggatataatcacaaaaattctgggtcattgaattttaaatttaattaactagttcttttgttaatataagatgaaatcatgaagactatatgagatgtgtgttttctggtttttgtatttacttggtaagacccttgaccatgctatcgagagtctgtaagcttgaacattcattctttttagtagtttgacatcatcctgttcaaggttaagtgaaagttgtaaaattagattgaaattacaaaagtactgaaaaagtatcatatctacaacacattcatcaataatgatagcctcttctcaccttataaagatcatacgaatcacaagcaagatctcctgaactacgatccggtactttttctgtatataaataacaaaaaacatgagtcatgaccatgcatgaataactctttttaacatctaaatataggtattattttctccacattgaagaccatgggaaaaaataatatgttagatgacctggatatctatgcgtgaaatagtcccatccattaagtgctctatgtgctgcaccttcaatctggtagaacaaattaagtcatgttggataaattgtaacaaaatactaataatgaaaaatcctatatatagctaaaaatcaattcccagaagccaagatatatatacttgataagccgaagtagctgcaccaaaagtgaaatttctgggaaatcccgtacggttgaatgcatgagtattatcgcagtggaagggttctttggccttgcattctggattgcaaaccttttggctactcgaaacgacgacaaagagaaggacaagaacagctaaagagtagtgagcttttggaattgccatggtttgtattttctttattgatgtgcttcttttggtgatgattaaacgatgaccttggaggggtttatatacacgggtttgagtgcatgggacttgcatggagattcaagtaaactcgttacgtatatttgcattggatttgatgtcctccatgttctccacctcgctgtcttgttttctaattaagaaaacaataattgaattattctctatagaaaaaaatattaaacacttttgagtttacggcaccatatttctcttatacatttcctgcacatgtctgcgtgagaatatatgttccttaaccataactaatattcaatatattaatcaaattttatatagaatatattttataagaatttaaatgttatgaaattatattggttcgaggtttaagttccgtgtcccattcatttagctaacgttatggtcatttatattagagtttgtttgaagactaatacgtttttaaaacttaactatagaagtaatatatatatattattcacaattagtaatatagtaatatatatatgtacagatatagaccattaatgagcatcagcaaaagtctgagttgaaaatcagatgtagcagaataaaaaagatcctgcccaaatgtcattttcaactatttatgtttttttctctatcatttgatatgcagtttgtttaatgatttttacattttatattatagagcactgtaaagaaagatcactgtacaaatatagaccactgtacagatatagatcactgtacagatataaacctatgtacagatatagactaatatacagatatagactattgtacagatataaaccactatacaaaatgatgcatatgtacagaagatatttgttcgtttaacatttgtgaagcataaagaagctcggttactgttttggagacaaatatgactttatgtcatgtgtatgattgagtataagaactagaaccgcaaacggatcttaaaagtctaagtagtgtttccttgttagaagatacaaaaccaaagactcatacggacttcggttacaccatcaaaactttgagaaaaatatttgttcgtttaacagtaaattatgacttcgtttaacagatacatcattctttacaatagtctatatttgtacattgatctatatttgtacaatagtctatatctgtacagtggtgcatatctgtacattagtctacatttgtacagcggtctatatctgtacaatgatctaatctgtacaatgctttataatataaaatttaaaaatcattaaacaaaatgcatatcaaatgatagagaaaaatatagatttttatttatatgatcaattttagaaaaataaaatttactaataagcattttagttattaaacattgagggaatgtgtaataaaaaaaaaaaattaaaaacttgaccgactaaatatgccccacatgtctctctctctcacccaatcaaaaccgactatattactaattgtgaatagtatatgtactacttttcatattatgttttaaaaacgtattattttccaacatatctctttttttttcagttctcttgtgtctgtttttttcatttatcgattggtttcattttctcttataaaatccgacgacgatatacagaggaacgatagctcgatccgcagaattcggcatctgcatcatcaaatcggaagagtaaaccg

SEQ ID NO: 7054 - DNA, 3000 bp, Unknown; identical to SEQ ID NO: 7033
  misc_feature (1)..( 3000): cDNA_ID_3049633_gDNA_ID_1621124_Annot_ID_172184 3000 nt of promoter + ATG

SEQ ID NO: 7055 - DNA, 3000 bp, Unknown
  misc_feature (1)..( 3000): cDNA_ID_2041710_gDNA_ID_1621124_Annot_ID_172171 3000 nt of promoter + ATG
ccttctacgtgatacatatgcaacttcttctaaacgttattttttttaacgcgcacacaagttactattccaagtctaacttttacgagtaacacttgtcatccccacatcgtctccctggcgaggagttcgattctaaaacgcgttcccacatggatgcagtggtgctcgtcggacaggtctaaaaacctatttccgaagaaataatccacatctttacttaagtaagctaaaacttacacttaaagatttaaagccgacccagattcgcaccaaataagctgatagtaaggcagaacaatataagccgagtccgctcgcacgttctcactgacctagaggcatccgcagggtaagccggacaccagcgccgcacctataaagtacgacgagtcagtctcgcatacttcatacgtaagccttgtgattcgagttcaacgtatacaggataagtcaagggacgccttgccccataatacgtttcgaaaccaagcttaaacgccaaggaaaacctcgcagaatataagccgaggataaccttgcacaaaaaactcaagaacaagcttcaagtcatcactaaattctccgtctagctcatcattgtcacttcgtctctaagacaaactcctattgcgtatttagataggataagccgagctgcagatcgcaccgaatctaaatttcacagcataagccaagcccaaccttgcattcataatctgaagtcaagcttagtctcgctcccaaataacaaacaatatcaagctgaatcaaactaccagttacggttaagccaagctcgatctcgcacatacaaagatcatttcctaaaacgcatgacaaagacacgatccacgacataacttaaagtcgtgccgatctccccatgcctagaagaagatccgcaaaatcaacatcatcactcagtcttacgtcatctcctcgctcgccaaaacaagtttgtcgcactcacggccataacaatccattgtaatgccaaccaagtttggtaccacgcaaaatcaatcaacattcacactgatcgatttcgacgattgtgctaagcggacttacttcctcgctactcgacacggatccacgaaaacctaatgtcaatctccataaatttatatccacaaagcaagtgttcccagccaagcgttccttgcagagcattactcaccaagcgttctttattaacaaaactatcaaacgttcctagctcaaaaacctccaacgttcaatccttgcctaacaggcgagcgttacttaccaagcgttcatcgcagaaccaacaagcgtttctagctctaaaatacggagcgttcagtcctcagcgaactacaaagcattcccatccccgaagcaaacgattgagcgttcttcactaagctacaaagtaatcctcatcaaatcgccgaactaatctccaatcttgctaagcatcaataatcgcatcgagctacacctttggcgatgccacactacatctatcacttacaaaacgttcagcctccaccgaaccttctcactagacgaagccatcacatggaacagaaccatcttgttgacctgatccatcgcatcaaacaaaacttatccccgatcgttctccacccaacgctaggcattcccataaacatgcaaaagatctaactagggaacttcgcaaactcccagcatatcgttgctaggcatcttagcaaactcgtagtggatcagagatacacagctcgacaaactcccagcatatcgttgctatgcatctttgcagactcgcagtggatcagagctacacagctcggcaaactcacagcatttcggtgctaggcatcttagcaaactcgtagagaatcagagctacacagctcgacaaactcctagaagcatgaagctaggcatctcaacaaattcgtagaatatcagagctacatagctcgtcaaactcctagaagaacaaatgttgacagctcgacaaactcccaccaaatcagagtcaagcattcccgcaaacctgtagaagaacaaagctaggctgtctcgcaaacttgcaacatatcggagtaaatctcgcaacgattctccctgaactcattgccgacctcattcaccgactcctttcccgccgaactcccttagcgattcaaactcatagcccatgtaagaactagatcacctgcctacctcgacgcaagattcttgccgagaatacacgcgttgtgccgacctcgactcacattgcgcacgatccaacatgcaccgacctcgacgcatatcatgcgaccttgacgcaattcgtgccggcctcaacggaaaattgtagccaagctcaaatacctcgtgctcacatttacgcatttcacatcgatctcgcctaaacatctctacggccgacctcttttatctttcatgctcctcacactaatctcaccaagtacaccttcaaaattgacctcattgaactcttttatacaagaccagcacgccttgcatcgattttagtatcttcaccgagacgttcctcgttcaaacaactttgctcttgcacaaacacctaactcttcaaaagcgcttatctccaaaaatcatcaagctctcccgcgagctcctatctcaaaagatcttttagctcccccacgagcgcacatctcgaaagatcttctacctctccaacgagcgcatatctccaagataatcaagctctcccacgagcgcatgtctcctaagatcgtcaagctcgcacacgagcgtctatctccaaagatcatcaacctctccaacgagcgcatatctcagagatcttctagctcgcccacgagcgcctatctctgagatcctcaagctctcacacaagcgcctatctctaaaattttcaagctctcacacgagtgcctatctccgaaattgtcaagctctcacacgagcgcctatctccaagatcgtcaagctctccctcgagcacctatctccaaagatcttctagctctcccacgagcgcct

SEQ ID NO: 7056 - DNA, 3000 bp, Unknown
  misc_feature (1)..( 3000): cDNA_ID_2041716_gDNA_ID_1621124_Annot_ID_172169 3000 nt of promoter + ATG
aaggggtttggggagaacggagtagcttctttattaatgacgaacgaaaagacaataattaacagaacggaaaaccgtaagtacagaacggagaaccgaaagtacaggtcggaaaatcgatattaatggtcggaaaaccagaaaatacagaacggaaaaccagaaaataagagataaagagctaggcagcaattctctcttaaatcctctgagtggtgacttaggttctggatccctcttcttagtagtgtctcctcttatttataggcaagaagctgatctagggttctcttagtctctcttgcgatttctccgttttgcccttctaaatttatcgggctgggccaagccgtgatgggctgagctgtgatgggccgagcagtcattctgatgggccgttgttttgatgggccgttcttccttgttagtagctttcttgacttgttctatttgtgtttgggccgaattgggcatggagggcaaagcccgtatcccacaattagtcccccccgagttcggcgagagaaggttgcttgcgatcggcgaacattttcctgaaaccggaactatgccaatttggcccgaaccaaggaaaaattctttgtttgagcaagtgtggatttttgcaagagtcagagaatcgcaagaggtggaaagatatatgctcgtttgagagctcgacgatcttcgaagatagatgattgtaggagagcttgattatcttcgatgataggcgctcgtgggagagctggaagatctttgaagataggcgcttgcgggagagcttgacgatcatgaagagaggtgctcatgggagaaattgatgagtttggagatagtcgctcgtgggagagctataagatcttctgagataggcgctagcaggagagcctgacgatcttggagataggcgtccgtggaagagctttaagatctttggatgtatgtgctcgtaggagacggaagagctcgacgatcttggacataggcgctcgtgggagagctagaagatctttggagataggtgctcgagggagagcttgacgatcttggagataggcgctcgtgtgagagcttgacaatttcggagataggcactcgtgtgagagcttgaaaattttagagataggcgcttgtgtgagagcttgaggatctcagagataggcgctcgtgggcgagctagaagatctctgagatatgcgctcgttggagaggttgatgatctttggagatagacgctcgtgtgcgagcttgacgatcttaggagacatgcgctcgtgggagagcttgattatcttggagatatgcgctcgttggagaggtagaagatctttcgagatgtgcgctcgtgggggagctaaaagatcttttgagataggagctcgcgggagagcttgatgatttttggagataagcgcttttgaagagttaggtgtttgtgcaagagcaaagttgtttgaacgaggaacgtctcggtgaagatactaaaatcgatgcaaggcgtgctggtcttgtataaaagagttcaatgaggtcaattttgaaggtgtacttggtgagattagtgtgaggagcatgaaagataaaagaggtcggccgtagagatgtttaggcgagatcgatgtgaaatgcgtaaatgtgagcacgaggtatttgagcttggctacaattttccgttgaggccggcacgaattgcgtcaaggtcgcatgatatgcgtcgaggtcggtgcatgttggatcgtgcgcaatgtgagtcgaggtcggcacaacgcgtgtattctcggcaagaatcttgcgtcgaggtaggcaggtgatctagttcttacatgggctatgagtttgaatcgctaagggagttcggcgggaaaggagtcggtgaatgaggtcggcaatgagttcagggagaatcgttgcgagatttactccgatatgttgcaagtttgcgagacagcctagctttgttcttctacaggtttgcgggaatgcttgactctgatttggtgggagtttgtcgagctgtcaacatttgttcttctaggagtttgacgagctatgtagctctgatattctacgaatttgttgagatgcctagcttcatgcttctaggagtttgtcgagctgtgtagctctgattctctacgagtttgctaagatgcctagcaccgaaatgctgtgagtttgccgagctgtgtagctctgatccactgcgagtctgcaaagatgcatagcaacgatatgctgggagtttgtcgagctgtgtatctctgatccactacgagtttgctaagatgcctagcaacgatatgctgggagtttgcgaagttccctagttagatcttttgcatgtttatgggaatgcctagcgttgggtggagaacgatcggggataagttttgtttgatgcgatggatcaggtcaacaagatggttctgttccatgtgatggcttcgtctagtgagaaggttcggtggaggctgaacgttttgtaagtgatagatgtagtgtggcatcgccaaaggtgtagctcgatgcgattattgatgcttagcaagattggagattagttcggcgatttgatgaggattactttgtagcttagtgaagaacgctcaatcgtttgcttcggggatgggaatgctttgtagttcgctgaggactgaacgctccgtattttagagctagaaacgcttgttggttctgcgatgaacgcttggtaagtaacgctcgcctgttaggcaaggattgaacgttggaggtttttgagctaggaacgtttgatagttttgttaataaagaacgcttggtgagtaatgctctgcaaggaacgcttggctgggaacacttgctttgtggatataaatttatggagattgacattaggttttcgtggatccgtgtcgagtagcgaggaagtaagtccgcttagcacaatcgtcgaaatcgatcagtgtgaatgttgattgattttgcgtggtaccaaacttggttggcattacaatg

SEQ ID NO: 7057 - DNA, 3000 bp, Unknown; identical to SEQ ID NO: 7032
  misc_feature (1)..( 3000): cDNA_ID_3049650_gDNA_ID_1621124_Annot_ID_172167 3000 nt of promoter + ATG

SEQ ID NO: 7058 - DNA, 3000 bp, Unknown; identical to SEQ ID NO: 7031
  misc_feature (1)..( 3000): cDNA_ID_1816574_gDNA_ID_1621124_Annot_ID_172157 3000 nt of promoter + ATG

SEQ ID NO: 7059 - DNA, 3000 bp, Unknown
  misc_feature (1)..( 3000): cDNA_ID_2029027_gDNA_ID_1621125_Annot_ID_172233 3000 nt of promoter + ATG
agcggtgatacagactcggtggttccagtgaccgcgacacggttttccctcagccatcttaatctcccggtgaaaactcgttggtatccttggtacactgataaccaggtacgatatacatacacatactgcatatatatatgtacatggatatgtattatgtaaaaggtattgatgtttacctgtggtcacaggtgggaggatggacagaggtttacaagggactgacctttgcaacggtacgaggggcaggccacgaggtgcctttatttgaaccaaagcgtgctctcattcttttcagatcattcttggccgggaaggaactcccaagatcttattagctactttaataacctaaacatagagtaagagaaaatgtcccgaaggacaatttggctaccagattaggaacctattccgagtaaactcggtattcttctacttttttttctgttaaaagctcgattcatttccacaatttggaaactacaaaactatttgggagagcatttgagtaattgttgataatcaaaagaagacaaaggttcaaatatctctctctgattcagtagaacagagctctatttctctctgcctgatcgatatacaacaaaaagaactggacttctcatacctataagttgaaagaaatcacaaaaaagattaagttttgttactttaatccatcaaggcctggtggcatccctaagctctgcgcaagatcactcattctttctttcatagcctgtgaaattcaaaaggttctataagcaagagatgaaagaaaatgaacacttatagttgtatcgtaaaatatagtatgcgaagtctttaccagtacactctttgaatgtgcgtctttgtatgcttctgtgaccagcagtgaaagtttctgccaaaggaagacaagaaacatgagaagctgaacatagctttgatcattcctatgtagaagcaagtgcaagagaaagtaaaggtgaaggttactcacttcagaacctaactccattgctgcatcagtgatatcagtgcgaattggttgctggttacctgataatgtaacctgatacacaagttcaaagcttttggtcacttaactagtaagagatagaaaaacaaactaaaaatagcatcattgtgtaaattatccacagtagtattgaatcagacagcacatgtctcacatccatgaaacatgatcccgagtcagtaatctaataataccttgacaagctcgccttgacaataaccatcaaattcagcactgaaaaaaagagaatcaaaacattgatgaatgaaactcataaagatagaagaaacttaaagaatatagtaatgcaaatgggttaggttaatggtgtggggacatacacagcaagctccttctgcactctaacagcctctacttgaacaaccatttgagctttcttcactgtctcatacaaattctgcatgttacctagaattcctgcctaccacaaatagaagaaagcaataagaaacacaacagcttctgagaaaaacaggacacaactgtagaattgtgttgttaagactattgaacatgaaccctaaaaacatgtacctttgattgtccatcctctttattgtccttttttccgcctccgaataatccattaacacgaagagatctgttattatttccagattgcttccgatttaaccaaacaatgttctgtctactacttcgttgcgccgcattccctgaaattgcaatcccggaaaataaaacatcagagacgtagatgatcaaacactatacgaatctagattagtctaattgagacaagctcgcatggtaatcacacttgttcttctccaaattcaaattcacacacaaactcaatcacatacttatggaaataaaccgagagaatgagagagagaattttaagaaactaaccatttgagaaaggagaaagcaaagtcttgaagaaatcagtgttcgtagccgtcgaagccattgttctcctgaaacagagaagtgtgcttcgacaagataaacagaaagaacgagatatgtttcttaaagactaataagattgtgccacgtggaaaagcttgaggatcccttaattgggtttaatgggcttttaaaattgatgcttatatgagaaaaagcccaaagaagagattattttcacaggatttgggtccaataataatatgagaaattgagaattatgcaaaaacatgtatttgactaaaagaataaataaaagtacatcatatatacacacattatacacaccagtcaccaatcatctctcttgtcaaatctccatagttgcttcttctcctgtttcactgtttgtctcaaccaaactcttatttttttttgctctctttctctctataccccaatttctttacatacatatccaacaatattaactctttcatctcttcaataacccagatgtgctttttaattcaaattctttacaatttatcaaacccacctcacaaagacatgaacccaatcatcaacaaacacaataaaaggaagaaccttttttttgggttaagtggtcagcatttcaataccccttctgcaacttccaaaaggacacacatagaaataataagtgaaaaagaaagaaagaaatgagaaaaaatcaaaactttttctttctttctttcctctctttaccatctttgatcactagtcctagttttctgctacttgtctcatagacttctcacacacaaaaagaagagaaaaggaaaatccaaaatttttaattttttcaatatcaattttgtttgtaatgggcacccaaaggaaaatcaatcaattatgtggtttcttaagtcttttggtcagagggtttcatacatggaataagactctcaccattaaaacctaatcatcccctttaccttcgcttccttctttctccttcacacctccctctttctcgcttgcttgctgtctttccaatctgcgattcctaaattcactgaacggatccgatg

SEQ ID NO: 7060 - DNA, 3000 bp, Unknown
  misc_feature (1)..( 3000): cDNA_ID_2990739_gDNA_ID_1621125_Annot_ID_172241 3000 nt of promoter + ATG
gtagacatcgtttttgcttttaagaaaattgtaaaaggtcaaagattacataaatagatagtccgttacgttacatttttaaaattacgtgttttcctagttcctactatcggaccattctttgtgtaatcgtttgacacattttcaagtttatagaaattaaagtcatttatattcaaaaacagattagtcttttattttataagatgtaaaagaaaaaattggaaagatttagaaagaattagtatcttgaatattatggactagttatttttttttcttcaaaaggatgaaaacaaaaaattacgatcaactcatagtcatagtggttcaatagttaaattttctttttgtgattttaaacatcgttgagtactttaaaaacttttcaacatttcctatttgtaaattggaaaattatatatattcttaagtttcaatgtttttcccaaactgactactttaccttacgtttatatgatgatcagaagttcagaactactattcgaatattattttaaaaatatttaagaaaattatagcagaaatatgtgtgataatttattagttaactaaacacatatcaagagttagtttattttgaaacaattaataataaatctaataattcatttagctttaaacagtaaattattttggaaatcaaatctatatttaacgtagacaactcatagcaatttattaagaaatcaatccaaattaaagatttttttaattttaaactgaaacatattgtttttgtaataaaaagtaaacaaaaacggacattaatttagcaaatcagagagagattactcttgaatactcggttaggaaatcccaaacctagctccgaacccccaagaaacaagatttagctccaaaccacaatgactatataaacaccacatcaccatctcatattttattcacagagaaaacaaaaacaaacgagagacaaaactcaatccaaaacaaaacaaaagccaagttttttgtagtaagtaaaaaatccaaattatgggaatcatagttccagttttgacccttgtcttcctcttgtttgctaaagtgagccatggtgcctccaatcctagggtgattctagttggtggatctgtgggatcatggaaggttcctgattctcctaacaacactctcaatcactgggccgagaacaaccgtttcaaagtcggcgacttcatcggtactcgatatatatctctctctatctctttacttctgatatatttatatgctttgattctcttgtgatcatatgttcataaaaatttatatgcatggttgaatatttgatatatatttgttgtgcatgtgaaatagtgtggaagtacgacatgaaagtagattcggtactacaagtgacaaaagaagattacgagagctgtaacacagcaaatcccttgaagcaatacaatgatggaaacactaaggttgcgcttgacaaatctggcccttacttcttcattagtggtgctcctggtaactgcgctaaaggcgaaaagattacccttgttgttttggctgaacgcaaatccggtggtggcagcagcagcggtgacgctcctaaggtttctcctgttagtcctacggctcaaactccagctccagctcccggtccagctgcagcccataacgctgcggtggggttgaaggttgcaagcggttggttcttgaccgcagtcgtggttggtttggctatggcttagagcttagaggggtttggtcgagagaatgtagtttttattgagttcactttttagcaagatttagttttatttttccagattgttgacgtttcttttgttcccttagtttttcattataaaagatctctctttctgttttttgttatgtgtttgggatattatattcactcttaaagcttataatctatagtttgttcttgccattttgaatctaaaatttcaaaacctcaacaaggcaactacttgccgaccatcgatgaactgatcggattaatcaaccaaagtttaacaattttcattttttctatgagatatgttgactcaataattaatacaaagagattcagtcgactctatcttaatggtaataggattcatttgtagaaactaaatatatttatttaccaaaatgaccattgtgaaagtggtaattaaaaaacaaaactatatatggtgtccaagagattcttctatctctaaaataaaagagaatatatatgctacgttatggaaactacattttgaaatctgccttgcatgtactgattgatattctaagattgttcttgattttgttggtaacgccattgtgcgtggtaataaataagacgaggccaagtggataatgtgctaatctaattccattacttacacatatagtacatctttgacttttaagtaatctatcgttactaattaataattatgataattaaattacccgtttcacttatatcatggcaacgtttctgaagaaaactatactacacatttacgctaacagccgtataggagattaaattctaagaattgtacgttcaaagtctgaattaattcagagaattttgtttttgttttcaaaatttaaaagttggtatatattgatgaaattagttcaatgtagaagaaaacagtggtgaatggattttgcgatgaaaggaaaaaatggatttagtgattaatttaattcaacgtataaaaatgcttaagtttgataatgggtcactaaaagaccattagttcaaatgggccattgttcaacgacttcaaaggccttgtacaatagtttgctggcttcacttacaaaaacggcatgcaatctacgtcacaaactagaaaatgcaatccgccgctttttcaaagtaaaacgacacacagttgatgtttagaaagtgaaaacagtagagcagggaacccctgagagataagcctgaagatgacacaaattacatgagcaaatcccacgcatgtttttgctccagattccgcc

SEQ ID NO: 7061 - DNA, 3000 bp, Unknown
  misc_feature (1)..( 3000): cDNA_ID_3092564_gDNA_ID_1621125_Annot_ID_172242 3000 nt of promoter + ATG
aattgtacgttcaaagtctgaattaattcagagaattttgtttttgttttcaaaatttaaaagttggtatatattgatgaaattagttcaatgtagaagaaaacagtggtgaatggattttgcgatgaaaggaaaaaatggatttagtgattaatttaattcaacgtataaaaatgcttaagtttgataatgggtcactaaaagaccattagttcaaatgggccattgttcaacgacttcaaaggccttgtacaatagtttgctggcttcacttacaaaaacggcatgcaatctacgtcacaaactagaaaatgcaatccgccgctttttcaaagtaaaacgacacacagttgatgtttagaaagtgaaaacagtagagcagggaacccctgagagataagcctgaagatgacacaaattacatgagcaaatcccacgcatgtttttgctccagattccgccatggatgtcgcttctgctcggagcatctcttcacatccttcatgtaattgcaagtttcggattgtagcttattttgtcaataaagtaacttcaatatcttcgggataactttttcttaattatgttcgcagattatggaaaaccgatttgttcatcacaatcatcgttgattcgggtaaattttcgttttatttggatttttttactctttattgattgattcgcctttcgtttctgagaaaatgatggaacgtaatctgcaatggaagcttaattagaatttttacttggtgatgttaagtgaagtatcaagcttttagttattttcattaaacatattctggctctgttgagattttgatgtggatttggatagttggacatagttgaacaatgaacatgaagctctcttctaattgttcttattctatgaaatcattggagatgcagatttcgagggataaagtttgttgctttggtcgcatttctaatggcatgacgagctttactacttcccttcatggtaaggcaatcaaactatagttttaattgtcccttgatgcggttttgttgctggtcggggcgttacaatatcatttcaatcattccttgctatatataaagacttgtaattttatataggatctactcattttgtttttgagatctgatcgagttacttatccatatatctatttcgacgtgagatactgagatgaatcttttaaatccttacttgcttcgctttccatgtttcttctttagctgtcccgagtgaaaaatttatgggcgaaacaagacgtactggcattcaatggtctaaccgctctttaagacatgatccttacagatttcttgataagaaatcacctagatcaagtcaattggcaagagatatcactgtgagagcagatctttcaggagctgcaacccctgactcttcttttcctgaaccaggttttttttggctaaacctttgtgaacaaatttcatctgttttggtagattacaacctacatcgttctttttgtttgttagtttctgtctctatacacaatcctttcttgttctttcaactttgaagtgcagagattaagttgagctcaagactcagagggatattcttttgtgttgttgctggcatttcggctacttttctcattgtcctgatgattattgggcatccgttcgtccttctcttcgatccctataggagaaaattccaccacttcattgctaaactttgggcttccataagcatttatccgttttacaaaatcaacatcgagggtttggagaatctgccatcatcagacactcctgctgtatatgtttcaaaccaccaaagttttctggatatctacacacttcttagtcttggaaaaagctttaagttcatcagcaagacagggatattcgtaattcccatcatcggttgggccatgtccatgatgggtgtcgttcccttgaagcggatggacccaagaagccaagtggtatgttactctttgtttctcccacatttttcaagtgttttgcttttaaacaatcttcaaagtgttttaactcttgtgcaaattataggattgcttaaaacgctgcatggaacttttaaagaagggagcatctgtgtttttcttcccagaaggaacacggagtaaggatggtcggttaggttctttcaaggtaaacacagtctcaagattcttcttgatcatgttttggtatgtgtgttaacataagaggctggcttgtgatattacagaaaggcgcatttacagtggctgcgaagaccggagttgcagtagttccaataacgctaatgggaacaggcaaaatcatgccaacgggtagtgaaggtatactgaaccatgggaatgtgagagttatcatccataaaccaatacatggaagcaaagcggatgttctttgcaacgaggccagaagcaagattgcagaatcaatggatctctaagctgatctcagaagttgtcttttgctgcgtctctgatgaacattgagaagctttaatttttacatgtggaagaattaaatgttgagatcttttttagtcaaaaattgtgatgctccctttaatgacatttaaaagaaactatcagtttttggtttattataaaattttgtatatttcgttgtatctcgcgaattatcgtacgtatcacagtcttggccgcattgtcacgcctcccaggaaacagagtccttcccagtccgtacgtgatttccgacttgtaatcccagaagacgtctccttccaaattccaaatctcatgtgagttttattgtatctcttttgttgaactgtgtaatttcggtctgttgaatgtatcgagttgaatcagagattcctgtgttctcagtgaaactgaagcaatatatactgaaatagttgtgcttataattcttgttgattctcccatagatgacagtagatcatctggttatatttatgcagaattgaaggctcttattctagttggaggattcggaaccagattgaggccacttaccttgagc

SEQ ID NO: 7062 - DNA, 3000 bp, Unknown
  misc_feature (1)..( 3000): cDNA_ID_2172861_gDNA_ID_1621125_Annot_ID_172239 3000 nt of promoter + ATG
gcattaaccagtgtatactctacaactatttgttcagattttcaaaaatgttataaaaatttgatataatgaaaatatgcatttgagtttgtgtacagaggaaatactacattgctaatatttgaaggcaaatgtggatcttgaatcagaagaagatatgatttagaatcagaagagaattaaagccataaatgcaatattgcacaatgattattttatcttatgttatcatcctctaatatgcatgtaaatgctaacatgcatattctttattatttacatggtaattactaattagcgtaatttgatgatacacaatcattttttttttgtcatcgatacataatcattcctatccatatatctcaacattaacttttaggtaaaaaaattggaaatcatttgactgtgtcttgattataataaagacataatatatccataaatgctgattggtgatcaactaggtgacattaaagtcaaaaactctattcgtgataatccaaacaaaggaaaaatacagaaaagaaaggtgtacttaccacaagataaccaaagaaacaaacaaaccgaaattttttctataatactttgtatatatcgcatccaaaattgttttataccgcatgttttcattaggaacttaagtggcttatgagctgacaacatatcatgaattttaaaaatatatcagttcgattactatagtaatattttaggtagacaacaaataacattataaaatttcaaacacttaaaagatcaaatttacttaaatttgcaatgtacaacacaattgacaattttaaatggagacgtaagatgtatgacacctaaatttgcatatactgatatatatacatatctaaatttgttcctcaccatgttactataaagattttctttgttcctcaccatgtattggtcaaacgaaccttcatagcttctgtcatattttgagagttttattcaatattcataatccgagttgtggtcaacacaagttgttaagcatcacttctccaccagaccgattaaacttctttctttattcaataatcaaatcttctgataactagtatacaaaaagttataaacttaaatagttctccatctgtcatgtaatgttaccaagagactattactaacagtaccattgcaaaaggctttcaattccgttgtgtagtaaaaatgataggtccaaatcggtgcccaaaaagctggtagacaatgttggatatatatgtaaatatatttctcagaagattaaaaatacttgtaattctcttccttttttctcttataattgatgtttgcattcagctgttgcctgatgatatgacttcacattgttattgtattggtttacaaatggttttaaaaagcgaaatgttgtagttagtgaagataaaattacaaaatttctagataaattatacaaaacgtatgagtagattgtttccaattacaattcttgtgctttatataaacaactacaattattgatttatgtaaatttttacgaactatttatgtatatatgatttgtagacttgtagtcttctttctctctaaacgaggttcaaactcggagataacttataaaatgtttctatatgcataaaatcgagtttgattatgttataaatcacaccgcaagtgtatttatgaaacaatggggattgcgaccctaattctattcctaacaagtagacctttaaccatcgaagtcaaaacaataaaaagtgctggcgtaatgatcggcagatccgaaggaattgcgatcattaatggttgaattttatgcaacatgcacgatctatatttatggggatttgatgcaaattattttaatttcacttatgactacggtcgattaagatttaacgaaaccatttacattactatacattataatagtcgaataaaggcctttgtaaaaacgtccatgggcttttgtaaagaaaactaaatggagaaatgtgctgaagctaaacgaatccaccacattaattttcctacacgagtttctcctattttatttcctcacctacatgaatcaataaacttaacactatcgcgcgacccatgggctaagtagctgatgctttttagcgaagggcccgcaggcaagaagagcaaaacattaaaacgcaccgttttaaaagttgccgcgttggaatatcatctgcgtgtcgctagtcaatgggacatcaaaatttcattattcaccgtccatgactcgtctcccaccagcttccttccacgaaccaaacttggtttcaactttcattattaatctttttttttttttttttgcaactttcattattaattatttaatgttctcttacctgtacaaaatttagctaatttcatatttaaaaaagaattgactaaaaggaaagaaatcccaaacaagataaaattaataaattttctacggactcttgaccaaaaccaaattctattctccctgggaacaaaataaagaatttattctaaaaagtaaaaaccctatatatataccaaggaatcaatagaggatcataattttacacaccttttttttttttttttttaataatatagctctcgtcgtttataattttttttttttcgtctggggcaaattgtaatctagaaacgacaggaaccaaggtttggatcctccccctcgaactctacgattcgttcttattctcaatctctcctccttgttgttgttgttggatattgaattctcggattgaaaactcgagatccgtgttctgtttttttttccttcccgattcaacacgatcaattggcaattcgttgtttgcgtttcctgatccgttaaagttgattgcttttttattaaatctgcaaaaatattctgacttttatgcttttggatttaggtagctttagaaattggacgatttatttcagctcattacgatttgatttgaaagatcgttttttttttgttcagggttacgaaattgaagatcgaag

SEQ ID NO: 7063 - DNA, 3000 bp, Unknown
  misc_feature (1)..( 3000): cDNA_ID_3049681_gDNA_ID_1621125_Annot_ID_172236 3000 nt of promoter + ATG
atgaaattagctaaattttgtacaggtaagagaacattaaataattaataatgaaagttgcaaaaaaaaaaaaaaaaagattaataatgaaagttgaaaccaagtttggttcgtggaaggaagctggtgggagacgagtcatggacggtgaataatgaaattttgatgtcccattgactagcgacacgcagatgatattccaacgcggcaacttttaaaacggtgcgttttaatgttttgctcttcttgcctgcgggcccttcgctaaaaagcatcagctacttagcccatgggtcgcgcgatagtgttaagtttattgattcatgtaggtgaggaaataaaataggagaaactcgtgtaggaaaattaatgtggtggattcgtttagcttcagcacatttctccatttagttttctttacaaaagcccatggacgtttttacaaaggcctttattcgactattataatgtatagtaatgtaaatggtttcgttaaatcttaatcgaccgtagtcataagtgaaattaaaataatttgcatcaaatccccataaatatagatcgtgcatgttgcataaaattcaaccattaatgatcgcaattccttcggatctgccgatcattacgccagcactttttattgttttgacttcgatggttaaaggtctacttgttaggaatagaattagggtcgcaatccccattgtttcataaatacacttgcggtgtgatttataacataatcaaactcgattttatgcatatagaaacattttataagttatctccgagtttgaacctcgtttagagagaaagaagactacaagtctacaaatcatatatacataaatagttcgtaaaaatttacataaatcaataattgtagttgtttatataaagcacaagaattgtaattggaaacaatctactcatacgttttgtataatttatctagaaattttgtaattttatcttcactaactacaacatttcgctttttaaaaccatttgtaaaccaatacaataacaatgtgaagtcatatcatcaggcaacagctgaatgcaaacatcaattataagagaaaaaaggaagagaattacaagtatttttaatcttctgagaaatatatttacatatatatccaacattgtctaccagctttttgggcaccgatttggacctatcatttttactacacaacggaattgaaagccttttgcaatggtactgttagtaatagtctcttggtaacattacatgacagatggagaactatttaagtttataactttttgtatactagttatcagaagatttgattattgaataaagaaagaagtttaatcggtctggtggagaagtgatgcttaacaacttgtgttgaccacaactcggattatgaatattgaataaaactctcaaaatatgacagaagctatgaaggttcgtttgaccaatacatggtgaggaacaaagaaaatctttatagtaacatggtgaggaacaaatttagatatgtatatatatcagtatatgcaaatttaggtgtcatacatcttacgtctccatttaaaattgtcaattgtgttgtacattgcaaatttaagtaaatttgatcttttaagtgtttgaaattttataatgttatttgttgtctacctaaaatattactatagtaatcgaactgatatatttttaaaattcatgatatgttgtcagctcataagccacttaagttcctaatgaaaacatgcggtataaaacaattttggatgcgatatatacaaagtattatagaaaaaatttcggtttgtttgtttctttggttatcttgtggtaagtacacctttcttttctgtatttttcctttgtttggattatcacgaatagagtttttgactttaatgtcacctagttgatcaccaatcagcatttatggatatattatgtctttattataatcaagacacagtcaaatgatttccaatttttttacctaaaagttaatgttgagatatatggataggaatgattatgtatcgatgacaaaaaaaaaatgattgtgtatcatcaaattacgctaattagtaattaccatgtaaataataaagaatatgcatgttagcatttacatgcatattagaggatgataacataagataaaataatcattgtgcaatattgcatttatggctttaattctcttctgattctaaatcatatcttcttctgattcaagatccacatttgccttcaaatattagcaatgtagtatttcctctgtacacaaactcaaatgcatattttcattatatcaaatttttataacatttttgaaaatctgaacaaatagttgtagagtatacactggttaatgcggactatgcataaaacatacggttccacatgctaaattgttaaataatttttattctgttaatagctcccccctagttaactgattcaaattacatacaagaccaaaatttctttttcttatgtgttttttgaagccgaaataatgacaattcactttcaccgcatatggcgcgacacggttctatgtgggtgaagcaacaaacaccacagctaaatataagcccaaccatttacatatactagctttgatagtgttgtgaacaagcctcgtgaatagtcctatattggctatatagatacaaactcgtgaatagtacacctataatatatactcaacatatatgccaataaataagaaaggtccactcacagctggccaacctgcacattgtgtagtatctcagcaaaacacacattaaataagaacctccaaaaccccatccatcaatctatacttctcttcacattcacacacacacacacatatatatatatatatatacaaacataaatacagatacatctccatatactatatgacctaattaattacacacacacacacaaaaacccattgaagaaaaaaaaagcgtggagagtgtgtgagaggacacgaaatg

SEQ ID NO: 7064 - DNA, 3000 bp, Unknown
  misc_feature (1)..( 3000): cDNA_ID_2999487_gDNA_ID_1621125_Annot_ID_172244 3000 nt of promoter + ATG
tgcatgaccgaatattttttgtataataggtgacaattaagctattgatcattcacataaatattgtacataacactcttttagttataaatttatcatgctaatgcaacactcaatacctagactatataattaactaacagagagagatgggagaaatctgtttcatctacatttttaccgcctttccatttcccaatctattaatgtagtgataaaatgcatctttccatttttttttttttttgacgtccatcaatgatcaaatccctttacgattgcgattcacaaagaatcaatgccaaaatacacgtcgcaaattcgtaatgatatagtataatgcccaaaaaacacgtgagtaaataagattaaaccaactgtaatgtctaatcacatatcttgtaatttaaaccggtataataatactaaaccgggaaaacctaattgttgtcttgcattttccctctatggctcaaggtataattaaaatggatatcagttagatgcatactgcatacgtttttaacatttcgaatccataaattcagttgttgcgataatccaaaactaatttgctcagtacacggaccaaaccaaaaaccggttcttttagaccaaaccgaaattgtctactcctagtcctcctgcatatatgccccaacacatctctcaatcctctcatcgtcaataatatctttatatgacaatggtgaagcagataagaagatacgctctatttcaagccacgccagattctgagttcgtgaaggagatgtacggaggctacttcaacgtattcgtgtcggctttcggagacgaaggagagcaatgggatcttttccgtgtgatcgacggcgagtttcctcgcgacgaagatcttgagaagtatgagggattcgtcattagtgggagtttacatgacgctttcacagaagaggattggatcattgagctttgctctgtttgcaaaaaacttgatgtgatgaagaagaaaattcttggcatatgctttggtcaccaggtttgatattattatcatccaacgttttcttcttcttctatcatttaaaatatatcatacttgtataattttttaattacttaccactaggtaaaatctttacataaaagtgcatgttttttctttcgtaatttctctttttaaaattcgatgtacataactgttttgcctaacttcataagctatgttgtagactagcgttagactagatgaatctagttctattcaaagtaataaattttaaattataaaagcatactgcataattgaattagaatcatcatgccatattcataacatatcgcatgctatatcattttcaagttttttttttcaagttataatgcagtattgcatgctatatcattttcaaattaaattttgcgtggaatatatatatatatatatatatattgaggataataatcatcaaacatcatgttttataacttgaaaatgagatagcatgcaatatgtaatgaatatggaaaagatttaggctgtgtaatgaacatgtaaattttaattttctagtcagatattattattatagacagaaagtaattaaagaagaaaaacataattttttgttgttgttgtaaaatgatatatttgggtaaaagatattagattaagtacactgttatatactttataaattctttatatgagtacgaataaatgtacttatcaaagaaataactaatgtatgtgtgtatggattagtttcatctacacatggtggttaataatcctgaaaacaatatatatacctagcttacgtttttttttcttgttttggatttagatcatatgtagagtaagaggtgggaaagtgggaagggctcgtaaaggaccagacataggcctcggtaacataacgatcgttcaagatgtgatcaaaccgggtgattacttcgatcaaatcgagtcattgtcgatcatacaatgtcatcgagacgaagtacttgagcctccagagtcggctagagtcataggattctcagacaaatgcgacgttgagatattctcagtggaagatcacttgctttgctttcaaggtcatcccgagtataacaaagagattctccttgagatcattgatcgtgtccacaagatcaaatttgttgaggttcgttttaaacgtctatctttggttttattaatcctattatgtatagattggtcggtcttctaatgtcccaacccttgggagattattccgctacgtacccaatttaaattccgttgttcaggatatatatatatatatgtagccagggtgaggaatctctaaaacgattttttaaactaaaaaatatgtaggaggaaattttggagaaagcaaaggattcgatcaagaagtttgaaccagacacgcagcgtttgcacatgctttgcaagaattttctgaaaggacgaagaacccactaattggtttagtttccacgttcatggtctaaataaattctactacgtttgtgtaatttcataactattatatggtcatggtcatcacataatgtaacatatcttcgcttttaactaaattaccgactgctataagaaataataataataaattaccgataaacaaaaagaagaagactggtatttgtaattttaatttagtcatttataagtgggtataggttacgtgtataaatagattatttgatcttcaaaaaatacacgtaaaatcgagctacggtaaacaaataaatgtgattctaaacttagataaattattaggtggagttgtcatcttatagacagctaatctcgatgtgtgattctttttttttcaactaatttttgactattttttttctgttttctttatttaacaaaaatctcacttggcgtgtctgatcttgttccccgtcgtcgtctctaacttacacatttccattctccgaatctctatctctccttttgcttcatcggtgtgatctctgagacgaaagaagaagaagatg

SEQ ID NO: 7065 - DNA, 3000 bp, Unknown
  misc_feature (1)..( 3000): cDNA_ID_1013226_gDNA_ID_1621125_Annot_ID_172253 3000 nt of promoter + ATG
aaaatagtgtaaagacaggtacattacaaagtcaagagtatttacccattgatttgcattttgtatgtttgaagaaagatttgctaattgtgtttgctaaagatgaatgtttaagacattcatcgagatcttgtcttaacgacttgtcctctagaagcttttctctccatcttctccctctttttgcgagtcttctcatcctcaacacctccctaagttcagtcatatagacaaaacacagtccattttaaatgatcatgttttatttcccccttgttcaaagcactttgagagtattcaagacaaagtgattacctctgaaccatgtgacaatagtcccttaataagaccagaagctttgtatgctccaaatgcagggatctaaaataaaaacaagcaaaagtaaatggttgcatcattcctacagagcaaatctgttgtttgccttaaaatatggcaataaagaaaattgagatgggtatcataccactaaatacgcgtaccaaaactttccagagatgatagatccgacctgcacaaagcaggtgatgtagagtacatcatgcaaatatctgcaaggaagaatagagcatcaggcttatactatagaatctaccataaatccaatccaccataaagatgacgattatgtagcaactgataaacgataaaactcggagaaagccacaactagtaaaacatcactcatttcaaacaactgataatgaaacagtcctcctactattgcttttggttatggaaacagaatccaactatacagaaacacttgagacaaaagcaggcactttctagttgatcaatttaaaagacaaatctttccgaacgtacccacacattccaggagtgctcatgtcaaatccaccatcaagaagttcaccagcatcactaacactaggctttgccatttgatgaagaagcttatatggaatcccgtaacctaacgatgttaacacaagaccaatccaatttttccaggtatgacttgaatgcgaaattataaccctcactaggacatacaaaatctgcaaacacatattgccaaaaacatcaatcctcgaattcatcgaaacaaaatcagctaaacattgaaactttcgagacctaaagatcaaattcaacggatttttagttccatattgatacaagtaacgtatctaaacaaatctaagctcaacggattaatgtattgagaatttaagaaatgaggaacgaggaagttacgttgcaaaggatcataatgagacggagcttagccatgtgtcgagcgttctcatctttcctcttctttgctccttgattcgccatgagttaaaagagaatgatcaaagagacgaggaagatagttttttcagtttctgtaattcttcttttgctttggatcttcacaaatggtgtgagagaaaacttttaggtgtctaagcttgtttaatccaattatatattgacacctgtacctttttgtcgtcctcttttctcaaatacttttttcacgcaggaaatgttttgtttggctgcgtgtcgtaattacgcttttccttgggtttaggacaaagattcttaatttgggctttcgtctatccttatcagttgttgttggaaaactgaaacagttctatctaaatgggccagaacaacctaaaaggcccataaaatctgacatcttaaggcctatcaacagaaaactgcattatttcagttttccaataacaaggtctgtgtgaaaatcaccggcgctcggagaagacatcaacataaaaccttttaccgctgttccaaaaactaaaaagtataccatttctatgatcaatcggtaaaacgatatttataacggaacaagaacaaaagtagtgtaaatttttttccctgttttatgttgttctatagacaaaaaaaaatgaagatatcatatcttgtgggcctatatccaatatttgagtgtagcccatatttggatcaaacatcacgtcttacacaatggttctcggatatcccaatctgagtatggttttaggtcaattcaacatagtattattttgtcaacaagcaccattatagcaaaaacaaagatgtatcaaagaaaagtagcgttaggggttggtcagaaaaagacatgtttgcagtgtaagaaatgacgtggacacgtggaatcatacgcaatgcaacatgtcatcattaaggtccattgttcaacttacccattgagaacaaaactagaaaaattatagaccgttggatcatctttaaggaccatgtctgattcacgtatctctctcccacttggaatatgcttagcctatgtatgggacacattcgctaggtccaccagtatcctgtacgcaaacgcaacatcgagaagcttccgtttccaatattctatactataattacaaatgttaaaaattgtttataaaatttgtaatttgacttgtagacatcattagggtaaagatatatcaagaaattacttttttcataggaataaaaatagtcaactctcttaaataagggacaaatacaatcctctaatgacctggaaaacaactatgcaatcaacattaacaaatgtaattagaagtacaacacaatcaattttggttaaaaaattgaaagtatataaaaataaaaaaataaaaaacgtgtcttagttgataaataactcattaatcacgcctctatctctctgttttaagagtttaacagttaaagatcttcttctctatcttccttatttgactacatctccgtttattcttgggtctctctctatctctcttatccagatttatcatcgtcattacatataaacatcaaacttaacttttcaatattctcattcactttttcctcttgtgctctaattcttatccggatccgatttctctcatacaaagattctgtttttcttcttgggttattgttcttgctctgtttccgtatctcaaagtttcagctgctgaattgaatttgcattgatcgtag

SEQ ID NO: 7066 - DNA, 3000 bp, Unknown
  misc_feature (1)..( 3000): cDNA_ID_2999484_gDNA_ID_1621125_Annot_ID_172246 3000 nt of promoter + ATG
tttttgttctttattcgtttcgtctgagagaagcctcctttgtgcctgtaaaccttttttctctctctttctagttctctctaacccttaccttcttttctctttcataattttgcatgtctgtctaattaaatacgactgtaataaaatttctaatttagtaaaacaaaattatttttagtgttaagcaattaaaaattcagcagttttacaatagttaaataaataagctagttatttaatttagtctagatttgactggaaatgacgttattaatgtatttagtggttttttcatcaataaattactaatttatatatagacgctaaaaatccagcgttatcgctaatgatttgggtgaaaatttgaaagatttggtagtataccactctgtcggtgttccgacagtataattctaacatcagtagaccattgcaatcaagttctcaagtgtttttatctttatattatatgttggtttaaagccggtttgcatccacagtgcagcatgtataccggaccaatattgttatgttaattaacttccagtcactcattgctaaacttcttttgatatgcatacaaacacgttttaacttatgaaatcttgacttccgttttttattcgatttctactaaatcgagacatgatggacaattatttaaatgaagtgatatagacaattaaataattgtatcaatacaagcttgaaaatggtctgaccaaaaacatgtgctccctagtcgaggctcggttttatcgagacaaacaccactaaaccctatactcattttcatattcatattcataaatcataatacgtactatataaaaacacactgattaaaccgaaccgaaactgaaaataattggtaggtgttgattatgctgcagaagagaaagatcgaaaggcctaagagtgacacgtgtacggagatggtatgaagaagctaaaagaatagagatagagaggttgaaagcacgtaggcaatgacttgtgaggtgaaatgacagagcaaaggcaaaacaaaaacaaaagagttacgaatgagacagaatgtctcaggaaacgtcagcttcttctgttttttggctcttcatttcgtaaaaccaattttcttttggaactgtcacggaaagcccacatggtgtgggatgatatgaacctgtccattaatttgaaacttggaaggagaaacaaatcagaagcgtgaaattaggtcacttggttatcaatgattctgttttttgggaaatcttggtgtttgttctcaaattcagatatccattgaaaatagatgatcttcgcctagtaagtattgaaaattatatgattttctaaggaggttagctggttagtgatgggaagcaacttgttagtccttttagctatggactgagacccatattattgggccataatcgaagcccataggaccataatcgaagcccacaagtccacaatattgcttcaattggtgaaagatactgtggattgtagagtgtgtagtagacgtaatcaattttctacaatagtagatgtgtacgtaactggacgagtttctggactatattcgaatttcatctttgtagtttgtttatatacttggaccaaaaaagattataactaattaaaaaacagcggaattgacaaatgagaacaccctccttgaaacggcgaagaaatagtcaaatgtgcgatacttattttttgtaaaccttaaagattttgttttttctttttgataatgaccagttcccacaaaaacaggtaagttaaatcaaccatgtgcatactgcaagaagataacatctctatatagttgcgcaagaatataaaaaccggcgttatttacgagttacagttttctaacagatttggtgaataacaaggtttattaattgtagatatctatatatatatatatatatatatatatattgaagtatgtatgtgttatatattgcataaatacattcaagatagttatttatttaattaaaaacggtaaaatatagattttatcaaatgacatatttttagtttaaatatggtacaattaattttaagatttactggcacatcaaatgatcaaaatgtggttgataattgtgttgattattgttattgataaaaccattttcttttcaattaaacaggtgtggtttggacgaatcctaatcatcttagaagaataagacgattttttttttgccccagacgattaaaacatatcttatgattggcagccacacatatgcactttttagtgagatatgatattacgaaatgctagtttacgtatagtttctaaaatacaaatttcacgcactaaactacggacacctagttaagaaataattattgatatgatgtatgatagtatttaaactatataataaaatacaaaaatcaaaactattattttttaaaaaaaaagaatcacatagtgtaaatactcatgtatttttctttagtcatcacaaaatttacttctctagatttttaaaaaagttttgagctattaaaagcatttatatcgtgtagagacataaaagtatatcaataataaaaaaataatatatatttctaatttaattatgaaatacttactacttaatttcttttgacaagtgattccattatttgtttattgtttgtctacaaatgatatccatgttcaaactgtgtcaatcattcagaatagagtcaacaacggttgccgtccacggtccactccggcctctaaacttttttttttttttaagagcctctaaacttttttttctgaagtaaacaacaaaattaaaactataatatatacaaaactgttacataaaacgtggaaaattaaaaaaccagtaggtaggtcgaccaaatcaaatctcatataaatacatacatacatacgtctttattctccactgctctatttctcaatctctctcctaaatcaatcaatctttgtattttcatttagccagaacaaaaaaaatg

SEQ ID NO: 7067 - DNA, 3000 bp, Unknown
  misc_feature (1)..( 3000): cDNA_ID_2172957_gDNA_ID_1621125_Annot_ID_172273 3000 nt of promoter + ATG
atgcaaagataattatctcatagggaacaaaaggttaaagaaaaaaaggcctgaggcacctgtaggatagccaatcactcaagtccatccacttatacaccattgaccaagactccttaagattttctttcacccataaaagctgcaaaaggagaaatcttttttcgtcaagctcaaacacaaagaaagcaatcatataaagaacccctataagaaagttgtacctacttttggtggctccatttctggagaaacaccgccaccacagtactgcaagactggagaattaaatgagttgattctctctgcctgctttacagctctatggtccatccatacaataatgtttcttcttgaatcaccactccacgacactgtaacaggagatccctcagcatcaaccgccactacaaacaaaaataaacgttacattgtcaccgttaagctcctcttattcagccaaacacaaagacggttataagcagattctacacaccgagagagcacgtggcagcaaagcctattcctttcacttccacatccgaaacatttgcaagagagcaagcagatttcacagcagcacaaactgcatgccaaatatctgttgaagattgctgttccaataatattatcaatgtcaaagttaatctctaaacaaataagccatgatctcccttatccaacataataacctcaatacagtctccatccttccaaatctgtattggactagtagcagatcctagaagcttcccattatcatcgaacaaacctgcatcataatcaacttaagctacaaaaccaaaattgcattgctggtcgattttcaacattaaaaagaatcgatttttagtagactgatatcaaatttcatcgccactaaatcaatcatcattctcacgaatctaagaagactacaatttttcaaaattgacgagattttaactcggggaataagacagaaggattaccggcacgggcgcttccagtgccaacgtcgacaccgagaaaaacggagcgagacggaaatggatttaactcagcggtggtcatctgaacggcaacggcggaagctacggaggtgacgatgactttagtggctcaccttcctttatctactttcctttcctttatacatcataaccggattgttcttggttagtagagagccggatttagctaatttggatcggtcgaaccacggtccacgtgctccgttttttcccctgttttatgactaataaaaccctacaagtccgttctttgacctaaaaaataattctccaagttgagtcttcttactcgattcatcgggaaaaagagatggcagatcgtatgactcgaatccctgtcgtcaacgcagactgttgcaagcctaagaagtagcttcttatgcaaggtacaattaccctgcaatgactataactcgaggggacttcaagctgagattgaaccaaggagaattcacggattctcagattatagttatgttgggagagaatggaacggggaagacaacgtttatcaaaatgcttgcgggttcgaagcttgatattgatgaagaaggatctcaagtacatgagataccacagttctctgtttcttacaagaatcaacatatgtcaaaccgtaaatttgagattactgttagagatttgatacacaggaagatccctaacgcatatgcagaacaccaattcgtgtcagacgttatgaaaccgctcaagatcgaggagctcatggataaaagcttcaacaaactatcaggtggagagaaacaaagggttgctttagctttatgccttggtaaatctgcggatatctacttgatcgatgaaccgagcgcgtttcttgattcggagcagagaattatagcttccaaagtcataaagagattcattcttcagatgaagaaggcggcttttgcacgatttcataatggctacgtatttggcagataaagttattgtgtatgaaggagaaccttccgtggattgcacggcatcttctcctcagtctctacgtagtggaatgaatttgttcttgtctcgtttgaacatcactttcagacgagatcctacgaatttcagaccaagaatcaataaactcgattcgatgaaggatagtgaccagaagcttgcgggatgttattactacttggatgattaagagagagatgacattgagagaatctttcaccggagaaaacctgaagtagtgagaaactcacgttttgatctttcctagccccttcaatctattataagatctcttgaattttattagatccatctggagtttaatttttgagaatatattatggtgtttgaattcggtttgtttcaatcgttcccatatattagactagtttttttcttcacacatgagaatctcaaaccgattgcgtagaagaagaactcgcattcatctgtttttgtctttagttgagaatgaatgaccgttgtaatgtcatgggcttcttttggtttgggtctgaatcacttaagcccaacacaatcttttctttggttgaaacactgtcgtttttgctgttttgtctgacacaaggcatcggatgatgtcgattgtcgaatatgcttcctcattcggagtgttctcagacatcttgagcttctcattagttaggcggtgcgctcgaaagtcgaagccgtgttgacatatcaaaacattgggaccattcaattttgtacaaatgtccaaacattatttcggtttgataacaataaacaaataaagaaagagttttttattggattcacttggcaacagccaacaacgaatcaaataatctatatacataattatattagaagctgtgaatgtgcctccgagtagacaaaagcacatgcaccataaatgatcaaacccatgaaacttccatctctctttttcccctatataaactaatgtcacttacctcaatattccatcaacaatatacatctgagatatcaaaactcctagagagatctaataaaa

SEQ ID NO: 7068 - DNA, 3000 bp, Unknown
  misc_feature (1)..( 3000): cDNA_ID_3092430_gDNA_ID_1621125_Annot_ID_172271 3000 nt of promoter + ATG
cgtcaagtaacttatttatgaatcaaagaatcaatcatttagctgcactctggaggaacacctcgaggaaacctttttttatcggagcaatagttgtaaaccatgtatttactctgtacccctttcattcttgtctggccattcgaatcgagtttttgagtgaaccattgggaatttgcgggacaaactgactttccattaacccatacacatccctcgacattgtagtttctgtaataagcggtgaaaggagcttttgaccaatctgttttctctaatcctccccttgtagcccaatgctctgcttcccatagactcgcatatagcctcattggttgctttgttgggaatgggactccacgtgactcggcattcataaactctctaattggaatcccatcaacggtaaaactggagagaataaaagattcttggttcatgagtttatatcctcaaacataaatattatgtatggtacaaaggaaggagtttcgacacttacataattctttgtggattccatgtgatgcaataagtgtgaaagttagcggttgggtcaaaccatagatgaaattgttgttctttgtctcctgagccttttgtgtaaacattagtatggagagtatatggatgaccacttatgttccccaaaaactcgaaatcaatctcatcccatgtagttcccggagatttaagctacacaaattagaacatcatataagcaagtggtacgaacattttatgaaatagcaaaacatgacaagaacgttacatgttacttacatagaatgttgtgacggttccagcagagttaccagggacaagtttcatttgaacttcggctttaccatagagaaactcttgattagattggaaacctgaaccagaggatttgtcaagcgagagagatagaagtttcccttgattatcgtgaatctttccacgaccatcaccccaatgtatcttaacgtctttgtggaagctgcctgcatagacgctgatagattgtgctgcaaagagaaagagaatcaagaacgtaaaagacttcatttttattagatctctctaggagttttgatatctcagatgtatattgttgatggaatattgaggtaagtgacattagtttatataggggaaaaagagagatggaagtttcatgggtttgatcatttatggtgcatgtgcttttgtctactcggaggcacattcacagcttctaatataattatgtatatagattatttgattcgttgttggctgttgccaagtgaatccaataaaaaactctttctttatttgtttattgttatcaaaccgaaataatgtttggacatttgtacaaaattgaatggtcccaatgttttgatatgtcaacacggcttcgactttcgagcgcaccgcctaactaatgagaagctcaagatgtctgagaacactccgaatgaggaagcatattcgacaatcgacatcatccgatgccttgtgtcagacaaaacagcaaaaacgacagtgtttcaaccaaagaaaagattgtgttgggcttaagtgattcagacccaaaccaaaagaagcccatgacattacaacggtcattcattctcaactaaagacaaaaacagatgaatgcgagttcttcttctacgcaatcggtttgagattctcatgtgtgaagaaaaaaactagtctaatatatgggaacgattgaaacaaaccgaattcaaacaccataatatattctcaaaaattaaactccagatggatctaataaaattcaagagatcttataatagattgaaggggctaggaaagatcaaaacgtgagtttctcactacttcaggttttctccggtgaaagattctctcaatgtcatctctctcttaatcatccaagtagtaataacatcccgcaagcttctggtcactatccttcatcgaatcgagtttattgattcttggtctgaaattcgtaggatctcgtctgaaagtgatgttcaaacgagacaagaacaaattcattccactacgtagagactgaggagaagatgccgtgcaatccacggaaggttctccttcatacacaataactttatctgccaaatacgtagccattatgaaatcgtgcaaaagccgccttcttcatctgaagaatgaatctctttatgactttggaagctataattctctgctccgaatcaagaaacgcgctcggttcatcgatcaagtagatatccgcagatttaccaaggcataaagctaaagcaaccctttgtttctctccacctgatagtttgttgaagcttttatccatgagctcctcgatcttgagcggtttcataacgtctgacacgaattggtgttctgcatatgcgttagggatcttcctgtgtatcaaatctctaacagtaatctcaaatttacggtttgacatatgttgattcttgtaagaaacagagaactgtggtatctcatgtacttgagatccttcttcatcaatatcaagcttcgaacccgcaagcattttgataaacgttgtcttccccgttccattctctcccaacataactataatctgagaatccgtgaattctccttggttcaatctcagcttgaagtcccctcgagttatagtcattgcagggtaattgtaccttgcataagaagctacttcttaggcttgcaacagtctgcgttgacgacagggattcgagtcatacgatctgccatctctttttcccgatgaatcgagtaagaagactcaacttggagaattattttttaggtcaaagaacggacttgtagggttttattagtcataaaacaggggaaaaaacggagcacgtggaccgtggttcgaccgatccaaattagctaaatccggctctctactaaccaagaacaatccggttatgatgtataaaggaaaggaaagtagataaaggaaggtgagccactaaagtcatcgtcacctccgtagcttccgccgttgccgttcagatg

SEQ ID NO: 7069 - DNA, 3000 bp, Unknown
  misc_feature (1)..( 3000): cDNA_ID_1014815_gDNA_ID_1621125_Annot_ID_172269 3000 nt of promoter + ATG
tcggcgaagcatcgacgactaatttcgtggcggcgagaccgtcggcgaagaccgatgatgcagtgacgatgagaggttgtggttttgctaatcttgccttggttggtatagacaaagaagagcttcgagggagactagcgatgcctgagtatcttcgtatagctatgagagattgtatcaagaggaaagattcaacagagatttctgatcatttgttacttcctggaggcgccgccgctgatatggctcctcacgcgccaatggttgtgtttattaacccgaaaagtggtggtcgtcatggtcctgttcttaaagagaggcttcaacaattgatgactgaagaacaggtctgttttttaaaaaacaaaaactttttttttgtttgcaacttatgaaatgagctcactttacttaacttttgaaatgaacttgagatcatatttttgtttgaagaagattttaaatcttgatttgggagtttactttctttttgacttcactagatttgtggttagattgtgaatggaaacactctgttttggtttaatgagtataactatgagcctatggcattcttattgttctgacatcatcaaatgttctgttttttttttctctgtaattttgtttagaagaagttataaactgttttgtcttaaaaagactgtgattcctccttagttagtgagctcatgttaatatttgcaatgacaggtatttgatctcacagaagtgaagcctcatgaatttgtacggtacggtttggggtgcttggacacattggctgctaaaggagatgaatgtgcaagagaatgcagagaaaagatacggatcatggtgagtatctatttccaaagtattagttagcaattggaattagatttgctaagttagcggcgatgattgatgataggtagcaggcggtgatggtaccgttggttgggttcttggatgtctcggtgagcttcataaagatggtaaatcacatattcctcctgttggagttatacctcttggtacaggaaatgacctctccaggagttttagttggggtggttcattcccttttgcttggagatctgctatgaaaagaacattacatcgagcaactttaggttccattgctcgattagatagctggaagattgtagtgtcgatgccatctggagaagtcgttgatcctccttattctttgaagcctacaatagaggaaactgcacttgatcaggctttggatgctgatggagatgtacctcctaaagcaaagtcttatgaaggagtgttctacaactacttcagcataggtttggaatttggatacatgaagtaactttatctttcattgttcttaataaatttctacaaagttaaaccttttgaagtaatttggtattttcttgtgttgtttaggtatggatgctcaagttgcatatgggttccaccatcttcgcaatgagaaaccgtatctagctcaaggccctgttacaaataaggttgctatatatcagaatcttcattcttgtctaagtttcattaattagctgtttttttggtttgtaatgagattatgaatcacactcgtttcggttttgcagattatctattcgagttacagttgtactcaaggttggttttgcacgccttgtgtcaacaatccagctttaaggttagcattttctgtgaagagagtaaaccaaaagccttttctttactcaattcctgtctcttgttgtgttgacatgttgtggtaagatgaatttgcaggggactaagaaacattatgaaaatccatattaaaaaggcaaattgttccgagtgggaagagatccatgttcctaagaggttcatataaaactaatcttatctttgattaaaactaaaaaaatggcttcacttataatctctctggttttgttttggtgtagcgtaagatctattgtggtgttgaatctttataactatggaagtggaagacatccatggggtaatctcagaccaaaatatttagagaaggtaataatgttttattcagtacactaatcttaggttttattgctttctctacaagctttaacagaacgtgttcgggttttataacagagaggatttgtggaggcgcattgtgatgacggactgatagagatcttcggtttaaagcaaggttggcatgcgtcatttgtaatggctgaaattatctcagctaagcacattgctcaggtacaacaaaatacatccaaagtttctttataagaatcggtttaacctcggtttgatattaaaccgtttatcgttttaggcggctgcgattagatttgaactaagaggaggtgattggaaaaatgcattcttgcaaatggatggtgaaccatggaaacaaccgatgaagagtgattattcgacttttgtagagataaaaaaggttccttttcaatcgttaatgatcaatggcgaatgatcgaggaaactcttttcaagaagttgtaaaaggattaaaaaagcatgattctttatgtatttctgttccatcaattagtcaaaatagtgatctatgttgagcttttgctacggctgttgttgtgctagtgaagcatttaactttgtgtattttatcaaaaaaagatggttatttattcaatagtcattaatatacaattaagatataagcaatcatcttcaggtagaccttgaaatcttgtaaacatgattttgctgtctttaaactctgtttcttaagtcgtttttcagtgttttggagatagtagtaatgggtctaaaaagttaaataatgtttttgtggggagaaaaatgaaaatagcagattttcgaggatgggaagagtaaaacatatatttgagaagtcgaaaagtgtgaaatatttgttctgtctcgcgaggaagagagaaaaatcgaattagaaattgcaagttttagggttttagaaaatctatcttcttcactgagttttccagctccgaagaacacttgcaacttcaggcaatt

SEQ ID NO: 7070 - DNA, 3000 bp, Unknown
  misc_feature (1)..( 3000): cDNA_ID_2172943_gDNA_ID_1621125_Annot_ID_172268 3000 nt of promoter + ATG
gcaaaacattctgtagacgactttgtaatattttgctaacaaaacagctaacattttttttctaagtttattaaatctgttgaatgtttgagtcattttcttttcttttaccataatattgtaggccaataaaagatgagaggtaccgactagttgtgcaatcaatgcattcatcatgaaaaagttgaattctctttgacgcgttagggactccccgaaaaggtctaccttttccattttaaaggagcacaaattttttaatgcgatttctaatttcataaggtatatgatcatgtgaagatgaaaaaagccttcctcaaaggctacttattaatttgtgcagagagactatcatatgtatagattagatagcacaatttagttcttccaaagtcatcaaaaataaacttatgtaagttgacgtaaataatacaacgatgatcatatttcaatatttcatataaaagggcctctcgctgtggaaaaatatttgatgcttcaatgatcagaggcaaatcaaaatctgtaatgaaggatttattataaaactaaaactataatttgtcattaagctacaaaacccattcttaaatctcaactaaacccattaagttcattattggtagggccgaatcacattgatggctcgcttttctttcttatgataaatacaaattcttaggtgtactttgagtgattcaagtgtcacatgatgccacacttatttctttcaaaacatccttaattacaaacaattttattttatgatcaataaattttaatgatattcagtcacaataatctttgaaattacatatattcaaacttggttatatgcatccatgcataattgaatattagtatcatttgagttcacgactttaataccatcacttccaaacagagcggcccaactcgaatccataaaccaacacacacaaaatagacacaaattgagtctatggattaaatgtcaacactgatccactatagtctatatttttataatttttatggaagagtttagtcgaacttcagtgcgaaagaaagaaggctaagcaaccttaacaactcacttaagatttagccgtgaaactaaaatttggctaagcctcaaacctgaattacccttgtttgggttcatatgccgactcattacgtcccaccgctacttccaaaggcacgagtccatgtgggtcataaaatgacgtgtacttgtttttttcttacagagatgaagaacttaactgatttgattccgttcagaaacaacggattgaaaacatgttgattccgattcgtataatgtctagattccttttctttaactcgtaaatcctttcttggacgcggtttcgagactttgacgttgataaaatgtgaatatgtgtacatgtccacctttgcctcttacgttgacggtcgacaactttttgcaagtcttccaatttctttccatttatgcaatttttcccctcaacctatttatatcttcactatatgctaatctactcattttaaatacttttcattaaagatcaaatttaagattaatctgaaaggtaccaaattttatttatgattggaaaacgatgcctaaccaataacaaaaatgactttcattagcattttgatttattaaaatcctgaaaataattaagttggtcctagacacaaaactaaaatatatcattccaccaacatcatcatcatataatagaagtttataaatgttttatttgaattttagttcaagttacttggttttagaaaatgcgtaaccaatataaagacggctatagtatgaagcgatgttgatgcggaattgatctttagttaaacagctcttaacttttacaagaatttaagttatatctcaattaaaatttggtttcgacaacccctgaatcgtttgtttgttgtggaacgaaaggtttgtgtgaattgctttaggcaggttacagaggaattaacatataattcaggttttttttatctatttaaacagttgaacagttttaagttttaaccatacatgaatatatttttatcttgattattcagttacatttggattgaatagagtcggttaatccaaattagtcaccttttcataagattgtttatattgaagaactaactaacgtatgagaatcaatgtttagacagacttgagagcatttgtgaaaaatttaggtcccctgtatacccataaaacccataggctataatgggcttaaaaatacaagataattgttgtatggatcctaaaattcaccacctcggcccatacgtgagttatgtaaatgaaagttgaaataaaatagttatgtaacgcaccggttatttaggatgcaataaatatataggcatatctccctaaccagaaaagaaaaatgaatattggacagcttcacgatctaataacacaccacacccagtagggcaatatagtcataaatatgcggcccatatgtcacatcctgacacagtccactgcctcatttaattgtcccttttaccctttttacaatcttaacgtgacaagtaaagcatttaatagtctctctttctgtaaacttacatagttttgcatttacaagtcaaatatcaaaatatgcaggtattattaggggttttaattagggtaacaagtaaaaaaaactttaaatttgtagtcttacgatagaaaaaaaacttccttctcattcgccttaaaagatggtcacatataaatcaacgagatttaaaagtagtggcaattctgtaaattcgtaatactagtaagggcattttcatgtcgtttttttaaaaagttgcaaaatctacacgtttaaatacgcacatcgaagtacaccgattttgatttgctctgtcttcgaaaactaatcttaaaaaacaaaacacagaactgtcaatttattagtcttattgaattgtcttcaaagttcgatcatttttttacgttttattttaatttgtttctccaagaatctgata

SEQ ID NO: 7071 - DNA, 3000 bp, Unknown
  misc_feature (1)..( 3000): cDNA_ID_4262150_gDNA_ID_1621125_Annot_ID_172267 3000 nt of promoter + ATG
ataaccaaaccaagcgtttggagaacacaatcagaagaactctcattcatatactagttgttttcaaatgtttgtatatgattggatatatacacatgtaaagtttatcagagacaccataaaataaaataagtaactggtgctacaaatttcatctaattcgacaaatgtaaattacaaagctaaatgactcgtctaaggtaagtgataatgttagtgcaaacatttagtattatttttgaactgcaagatgattaagtatttttctaaatcatgactatggtagtactatttaataattaaatgaaactgtatattcgaaagtagaaagaagaggtgtggaattggacaagagaagagtataacagagaaaagtttggtgtaaaaaaggctgcaaaggagttggttaaaaagtgagtgaactcgataaacgcgtaaccctaaaggcaaagcgtgcgttactctttccccaattattttaccttttaaacttttttttttctttctcttagaaatgattacggcatttttaaaactagttatctcatttatatttataacgactacaatatctcatgacgatggtaaatcacatgaataaagtaaatatgattcgactacttggacgagttttgaagttgtccacaattagttttggataataattgtagtgagtgcatggttactgtactcacatttcttctaaattacaaatgtctcacaaaacctagaattttaaaccatgagagctcttcaacatactatagagattaatttgtactctaatccggaatcctctggatactaataaaattaatgaatacttgatcacctctttactttcgttgcttataaatttattcatgtagtttgtagtatgaaacatgaaagtatgtatagtcgatactccatagcattattggttctgaaaaattgaatctcacgtaaagtacagtattaagtttttcgtagacatattgcaatgatgagaggtaacaaatgaaataaggacaatttgtttggtgtagaagaagtaagagtcatgtagcacaaaaagattgtctattaaatggtctctgaatttattgggtcggctcgcacatcggcacatgtgatgaccttaccattcttgtctctgcatttaatattctttatccaaataatgatacaagtgaagttggtaacaaaatcgatcgtcaatgttttgtaatttctttccttgttccaaaaggatgtcaagttgtcgtgcagccattggctattttgatttgttataattcaagtttagcgtttatcttgcttcgatggaaagacatttaatcaaaattatgatctttgtatcaaggaaatgaattcgtaacacttatgttacgttcttttcaatttgtttccggttcttctaatagaaaagttaaaacgttattttcaaaatgattgtgacactttggattgtatttcagttccaaatctaaaagcaagactggcacatgatcgatgatacattaaacacacataagctataacagtttgaagtaattctcgtaccttcgagtcagaaagatcaaactcgtagaatttatatgttcaaccttttcatttacttcaaagtgaagttctatgttacaattgatttccaaaatgctaactacaaaataaaaataaaagagcttttggatcggcgtaaaagagacagcagagagataaaaaggcaaaatacgaaaaggtgaaaaagctttttgagtcgattccttttgcagggattgcgtgtgatttacagatatttcgtttttttaaaacaaaacaaaaaacccaacgaatacaaaaaaactcacacgttttcaatagcgcgtgacatacaccgatcaccacctaagctgatcacgagtcagaaaaggcactcaagcaattatcgtacacgcgccactttaaaacgcgtgaacacttttgtctcattactatgactagattcaaactttaatttcgtcatcaaaactttattagttgctacctttttctttttttccccacattcatctaaacttagtaatttaattttttgcttttttccaaacgttttaattagtagtagtaaacatcaatatcaaatttctaatcttttccatataaagtttgttctcaaccgtatagcagcaacttacaaaaaaacgttaataaatcttcttccaatcttgtgcatgaacttgttgtagtcttgatgattatttaaatagtaacactaatatctcttctaaaatacgaaagatgacactgaaaacagagcatcgtattcgccgttttaagacctatatcggtattcatttagtacctatttcgagttttaattctctgtcatcacaattcacaaataatttaatcttaataattgggtctcaatacttaagtagatgttaattggtctagaaatgaagaaattaagcaattttcaaaaccaagttaatgactttgaggctcaatgcatggttactattctctatagccgcagacacaaaaggacactatcgtaatctcctcaatgctccttataatatttggcgtcgaataaattcaaatagatacacatagaaagctataataatgagagagtttataagttcttgtgaaggcaaatgatccaatctttccttttcttctcctcaaattttctttcttttcccacgcgcttacacacacactgcaaaaaccacagaaacacagagaaagagaaagacaattcaaacaaaagcttcgattttttacctttctgtttgatcggctttttgtttttctgtaaaaagccatcttttgtgtttgatcctttctttttttttacctgattaaacaacttttctcctctgcattttttcgtgacccttttaaatatcttgtggccggtcctaaaagttctttatgcaaaggtttcttctttataagataaacaaaaggtgaagaaaccacaaccaaaaaaaaaaacttcttgttgagaaaagtttttttgagatg

SEQ ID NO: 7072 - DNA, 3000 bp, Unknown
  misc_feature (1)..( 3000): cDNA_ID_2172926_gDNA_ID_1621125_Annot_ID_172265 3000 nt of promoter + ATG
tttctgcaggatgtgatgagaagtttagattgcacgggactagacgataggcgaaaggtgaatgattacgcgatgagcgagtttgaaaacttggtcctatgtgtttaaaggtcagttcctgattgcagtattcggatcatttaggtagaaaaaacaatgtgaacaactgcagagatacattaccagattgaagtctgtatttttcttctctttgtgtgtaaatatgaaacgaaggcggtcaaattatatataagcttcttctttcttccgttcttatgaagttttatgcaatcatagaagcttcttgtttgctgcagagttctgttataagtttctacttttgatagcgtggttatctgaattccaccaagtccatttttcctcttactatataaatatcgagtaatttggctcgagttagttcggtttctttcagggttggtttttcttggcagccgatgaattcttggattcatcgaagtagccatcaattagtaggggttcaggtttttgttgaattgtgcttagtagtttgggatatagtagtgaccatattgtcatttttagttgttacaaggctctgaagtctgaaccatattatatataggaagaattcatcaaggtgcgatgatatttctatcatttgttgagatcaaaccttcgatttatacattttggaataaccagagtcgcagtctcacgttttcatacctaatgatttagagtgttcactcaatctccaagttagagcaggctaatttcggcaaaactcttacctgcaaaccattatttggtatatgtgagtgtacataaattgtcaccggaattaaaccatcaaataacttgtcacaagcactttttctgcatatccgaattcgatgatgtgaagaaaatggttgtaccaattttcaattgcacatatgtctgtcattttcagattatgttacatgtaaaaaccaagtatggttattatattttgttttcaaaatgagaatcaaaataatagaaatcagtaagtatttcttatcatggtagtttactttgattggttatcttattctgtgtaagctctcgacgattttattcatattttgaaatactatacaaaagtcatgatgtgtgtacattttccattaggactttctagacttgagcattattttccttgatagcttcatcgacgtttaggccctgaaatccaaataaacaaactcataattaaaatcctgcttttctaaagtaacaaagaatattaagtgataaagattgggagaaataattacggaaaataatcaatgttaataatcccagcgacaggattagcgatctgagcaaaagcttctcgagaaagatcgagcgtagaagcacagccactgggacaatggtcaacgatcttgaccttcacggatttccccgtgcaagggtgaggcacggcgttacgaggtccgctgcatttcacggtgaacattttgccacaaactcgaccattgtcccataatgtatcactcgctgcagcgatcatcactccttcttgagtacctctgtaacatgctgatgctatcaaacatgaaataaaagaaaatgattttataacatttcgctgtaggttgatatgaaaatgtataagataagtttgttgtttgtatttgttttataattttggtagtaaaacacacaaaaattcttacgagtgtaacttgtgtaaaaagttgcaatcccgggagttgcatatgagaaagagaagagaaaaacaagaacggtagaaaaaaacacaatacttttactcatgattcgtatttatttgtaagagtgtttatctttgaaatgtgacatatctatttatatatctgctatatattatatgactaactctaaatatgcatgtattgtaattgtttgccattgaaatatctttgactgttcccattttttaacatgtgtatagttgtaaatttgttatatttaatttcttcttatctgtgttgactaaaggtttagaaagattgttatcctcatttgatagcaaatttacagccaaagactccagaaaacgtttactaactacgctgatcaaatttgccacgtaaatttatatgaacaatctcataaaaacaattcatcaaaaggaaaaaaactctccttttataggtcctaaatgtagtgaaatcaatatttatggactagtacatatggaacagttatgaggcgagcgttaatgggccgaacgagacgataagagacattattctaaaccaagctcaaccacgaagataaccggatcataaccgcaaaatgaaccggaataaaacgtgagaaacaacgagataatattaaaaatgatgcaaagaatttctgaatgtaaaggtaggtatggtgacataaggaatggagttaccgaggaagctgcccttgtcggattgtccttatcacttcccactcggcattaccagataggaagctcagaggacagagataataattggaacccaaaactgaaccctattttatataatctcatcaccaatactttatccttaaatgaagtctggtttcgccctttgttttctcctctagttttcttgtaacgccaaactacattctgtatgatcaaaatttagtaacataatttatcagaaccccattgttttaaaacgtgtctgtgtatttgtgtttatatacgcttaatcttcttctttctagttaaatttaatcaatttaatgaaaaatttggtatataaaaaaaaagactttgctcacgagttcctctcataagggccaaaactagttaaaaagttatcgtcaaaaactgatataaaaaagatgtccgaatattcccgcatataaatatctatcagacaaactcttttgtacaatatactttgaatccgataaattttcgatcttcaaaatccataaaaatctctcctttatttagccctaaaacagagtattagagtttgattcgtaaaagagaatatttttaatctccgccgcaagtcg

SEQ ID NO: 7073 - DNA, 3000 bp, Unknown
  misc_feature (1)..( 3000): cDNA_ID_1031563_gDNA_ID_1621125_Annot_ID_172263 3000 nt of promoter + ATG
cacgaaggcgagaagcagagcaaactctgtttatcgagatttggtgggcaccactttattaagtcaaaccagaagaaaacactcttccttttccttatttccattatttttattttataggttacacaaaaacctattttcacttgtttacacgaaactctcaaaagcctgttactaatagaacttagaagtctaagctagaaatatactatattggcattattttgggcagtggatcagcttttcattgtgctgatataggagagagatatatatctatatatataagggacgaaacaagatttgggaattatgagaaggttcgattgccttttctatgactcgaagcgaatcttgtgttatgcacttttgattaagtttattctacggtgaatgaatttaccggaaaaaaggtgtaggaaaaagtatatactcaaaagttatacttgatgcaatcacacattacattgatttctttaattattgtgttgttgataaaattttggtacgaagacgttgacataagccatttaaatcaaattatcattattcattttccgtcaacttatgtcaacatgaatcgatttaattatttcaatttaagaaaagccttatacacttttcggtatatcacatacggataatacctacatagtattgtactacatacggtatatctagccgttatttgttgtatcattattttcacgtattacaaattcattagaatatgcatattaattgataatcttggcttggcagaattggaattcgtctttatatatataaaaaacgtacggtaattcatatatgatctcataatttagacaaatctatagggacgtgacttaattttgaatttctcaatccatatattattaccctaaatctatttattccgtttttaatattttctttggagtttacaaagatacatataaatattagacattaaaagtttggtgctcgatgctttggctatagttagaaagtccactcacttttgtgtctttgacgtacatctccataacctataattttctacctagtcatttaaatatttcaaggtactttcataacttgaaggcggaaaacatgtaaaaaaggttaccttccagaagaaataatatatactatttattgaagaaataacatattcgctgtctatagattttagttttacatgttattttctttcgaaatcacctgctccctttgaccaattaaaccgagtgactaatataacaactatatgaaatgttgcagttacaaattagtttcgttaaaacaaattttgattagttttgtagaacatcaaaaaaatgattgtttggaaatatagataagactttttctaaataaatttggtactgggagtggcgtttttctaactaggcaggtttgcaaaatgcaacatgtttgactttagttattttgcaagcttttcttctttctcaaattaaatagagaaataaattagaattcgatgaatacaatcatcccgtaacgatgcaatttatctgtaaagacaaaatgttatattgatttaaaagatgttggcaagatagacccatgagccaaaagcataattgataaaaagtttgatcataaaactggtagagttcttatacaagattagacaaaaacacagattagttggttttgaattatacgttgatactcaatgtgaaaataatgaaaaacatcttagggttgggatcaatgggacaatgaacttttaagttagatctcccacgatcttgtaacaactaatttgtcagtacatgtttttttctttttttcttaactaataattccaacctaaaatttgaatctaagagattagtcaattgtttgaaatattctccattcgacaccttttctcacgaatcattattaaaacgtaacaatacaacacatttaggagatatataaaatgaaaaactggaccttataaagaggaaaaagaatcccccatgtgcatgtgctatacagataacatttattgctttgccaataaatttcagacccttgcttaactgtccatctaaataaaatctataaaatatcattagaatggcctcctcctaagcaaaaccatcccaaaaacttaatagccttcaaatgaagactgaaattgttagaactattagatacttaagaactacgaattgttaagaactactttgttaagaactacgaattgttagaactattagatacttaagacacatattcacctaggctatgttatgccttaagagatttccactaaaaatcacttaaatagtcctaacgactcatttaacaggttttatgcacaatttaaacaacatcgattttattgacaactgtgtatactcgtgctgcagtggtacgtagtcatctcaaaactgaagaaaatctataaatataaacattctctagtatctctgtagatcaactcattttggtgcgtttagactgacacaatagtcttaaacttctgtatgccgctcgaacaatatttatgttgtcatcatcaattcgacggtattaagaaactaaactaaacatattcaagcccgcgtatccagattggtgggcttgagagtgtagttttaaagcattttaacactcaacaaaattcgatggctttcaatttaacttcggcccatcgttagggagccccgttcactgaaagacaaacatgttatcacaatctctaattggtaggatcgaaacttcgaaagatttagcgatttttacaaacgccgcgttacgcgtttattacacaaacgcgaaaaaagcgtcaggaaagattggccccttgcgcactcttgcttttttctggaaacgtctctgaacgaccaactatagatcgtggaaaattcagattccattgcgacgaaaagaaggcggcggattcaaagaacacccaaatacaaatcgaagacggagccttttcagcaatttcgttttattcaacctctggaacaccaatcatctcaaactgattga

SEQ ID NO: 7074 - DNA, 3000 bp, Unknown
  misc_feature (1)..( 3000): cDNA_ID_2172918_gDNA_ID_1621125_Annot_ID_172261 3000 nt of promoter + ATG
ttggcaccctatcaaaacatctgcttcctctaaagtaactatgaatagctccattaaggaacttaattagagcatatatataatgacagtccaaaataaagtctccctcttgtagtattaaatgtcttagctatatgaacttaacgaaagaaacttcccatgtgaaaacacccactcctccaacgtcactaattaattagcaactagcacaattattaatcacaattcatttttctctctccatgttatgcactaatgaatcttgttttagcatgtttcacattgattgttcgggttgttaccattttaaataatgatatgtttcaattcacaatttcatatagatgacttatgtacgcaactatgcattttcatattttattcttaaaaaagtatcggttcgtagtaaagtctgaattaagttttttacttttgtccttggaagagtacggaagaagacactaatctacccttgatttaaggagacaaacatatcattaaaaggagattatgtttattgattttagattataccctaaacattatccaattaaaataaaaacagttactttaattgacttttaggctgtatcggtcgtagactcgtagatagcagtagataccatgaaactgaagctaatccactcaccattccgtcggttcttctacctttttaacttcaaattatttcacatggcctacacatagactatagtatacatttatctaagaccatgcgttatatgattatgataagaatggagctcgtaaatagtatatcagataaagttgaatgaaaaaaatagttgatcggtaaaataatattatacttgattaattgaaacatatattgaggataagctagagttaccatttcctataactattctacttagattagtactcttcgtatgaatcatatgttacattttatatacactttgataaaactatttgttttacatataattctgttttgcatcaatggactctcactattgcatcttgtgaactcgtctgttttattccccatgatgagtgatgaaaccatcagccacgccaccaatgatctcaaacattatttttatattatagttacatctgtcaacactcaacagtaacatcaatgtattgttctgcaatgtcatctcacatatcttttgcaaattcaaaaagtacgagatatctctctgtagatcaagaccatttggtgttctttgattcaagacactagaaacaatttgattgtactataaatcctcaatttttggaagtttatcaactgttaggacaatcgacctgtcagtaaatctgaatttcttatatgatagtaaatgattttaaaacatatcacagccgtcaatcagagagactgtgagagtcaccgttgaaaatcactctttggtgagtgaaaaaatgtaaaagtaaaagaaccaatgggtaagggtccctccacgtgtgcacatgcgcttcggtggacgcgtgcatgcaagagtgttgccacattaacgacgtcgtagaatgtgattaagggcacaaaacattttaatcaaagaaaatttgactgatggtgacgacaatgagatggtgggcgtgtagagttcggagaatgattgttgagattcccgtaaattacggaggtccattggaaaacaaatccccgcaccagaagatccatgttcgatgtattttgttggagaaaaaaagctaattttaatatcaaaaatatttctctttcgatagttgtatatatttatcgaacatcaacttttatattcatgtacatctatcaatatcattttttcgttttctgaattaaattgaccaatataaatgaattattattgtttctttttcctttttatcaacaattattattgtttctttttttctttttcaaaaccaggctttcccaaagtttgcggatcgccacgttttaaccactaacaccatattgatgttatttgttgtatgtgtataaaaaaagttatggcacagttaatgtgttgaccatgcttttcatatttgatacctagttgtgaatgtatcactgtgaagcatcaaaaagaagatgaaataatgcaccgtataaccaaggtgtgcactgtgcaatgcaatgcatcataaatttctcaaattctgttttttgtatgtaaattattgacgtataatggtaaatatgattaatagattcactcattgttcgacaataatcaaactgaatattgctcgataataactgaacatattacattaacaaattacgcactcacaatcgtcagaaccagccattattctcagctatacattctatatcatttgttatctttttataaccttaggtgatttaggtgatccaggtcacggtaagtatatatagattataaacttttatggaagactgatgactcaatctacaacattggagaaccacaactttttaatctatactttacgttctttaacatttaaatttcaaaactgagatggacttttttagttattatatatgttctaactaagtaatgacaccaattcaaagataatctagattatttagcgtgcttatataggcctttatttgcttggcgacagcgctgactgataaggttgtcagatagagaattacatgttaaatcaaatatgtgaacatacattacatacatatatatacgagtgatgagatcattatatatcacggattcacggagtgtgaaaaaaaaaaccaaatgaagctacgcagttgacagaaaacaaacgaaagatacacaaaaaatgttttttttttcataaaatcctcataattgcaaaacttaaaacatcaaaacgtatatatatcatcacaaattttcggcggaaacaaataataatggacaaaagtttcctaaattatagggtaatacaaaagggtacgtgggccattcgtagcatgtgcatgcatgtgcttctcctatctcctattgcccccaccattttccctctccttttgaaacaattaaa

SEQ ID NO: 7075 - DNA, 3000 bp, Unknown
  misc_feature (1)..( 3000): cDNA_ID_1411786_gDNA_ID_1621125_Annot_ID_172274 3000 nt of promoter + ATG
agatatcaaaactcctagagagatctaataaaaatgaagtcttttacgttcttgattctctttctctttgcagcacaatctatcagcgtctatgcaggcagcttccacaaagacgttaagatacattggggtgatggtcgtggaaagattcacgataatcaagggaaacttctatctctctcgcttgacaaatcctctggttcaggtttccaatctaatcaagagtttctctatggtaaagccgaagttcaaatgaaacttgtccctggtaactctgctggaaccgtcacaacattctatgtaagtaacatgtaacgttcttgtcatgttttgctatttcataaaatgttcgtaccacttgcttatatgatgttctaatttgtgtagcttaaatctccgggaactacatgggatgagattgatttcgagtttttggggaacataagtggtcatccatatactctccatactaatgtttacacaaaaggctcaggagacaaagaacaacaatttcatctatggtttgacccaaccgctaactttcacacttattgcatcacatggaatccacaaagaattatgtaagtgtcgaaactccttcctttgtaccatacataatatttatgtttgaggatataaactcatgaaccaagaatcttttattctctccagttttaccgttgatgggattccaattagagagtttatgaatgccgagtcacgtggagtcccattcccaacaaagcaaccaatgaggctatatgcgagtctatgggaagcagagcattgggctacaaggggaggattagagaaaacagattggtcaaaagctcctttcaccgcttattacagaaactacaatgtcgagggatgtgtatgggttaatggaaagtcagtttgtcccgcaaattcccaatggttcactcaaaaactcgattcgaatggccagacaagaatgaaaggggtacagagtaaatacatggtttacaactattgctccgataaaaaaaggtttcctcgaggtgttcctccagagtgcagctaaatgattgattctttgattcataaataagttacttgacgttgtctttgtaactcaatggttcttcttatctataatttttcaattcatttgttaccaaatatatgcgtgtttgtgtaagatcttttttacaatgaacaatgagttcttccattctaaaaaccttttaaaacatgtcgttactatatacgtacaacgatacttggggataaattgaataatatataaccttacttgatggataatgaatggcccaaatttcgacctttttctgaataaaatagaattttttccaggttttgtttcaagcttagtttcaagcgcagtaggatataggtatttatactttaataaaagaattcagcgtgaatggaggcgagaagcggtgcgatattttagctgtgttgaacgtccatatcccaccatatcttcatttagcataatgcatgtgagtatgtgacacatatatttatattattgtgcatttgtgcttccatagaggttggcatcttattttgtatgttaatgtgcggatatttagttgattaatcaaaaacactttgaaaaacataatataattaaattttattgatcaattcaacagtctttgtaagaaaaattatttctgtaattggaagtgtttttaaggtttagttaaatatgacgactattatgctcttttgtatcgtttttttttggattgaacgctaaactatacgagtgcatgggtgggtctgtttggtcgtaactcgtaaaataaataaacatcagaaccctctatgcggcggggagggtttgcgcttaagtcaaaagtcagaagccgtgttgacaaataacctcaacgcaggactagcatgtgatatacattattaatatctctgttttgtaacagtaaacgagtaaagaaaactaaatattgaaggacatatataaatgataagcttactactttactagttactggttggatgacgcacgtactggtccaagattcaacatcacaattttttttacagtccaaatttccaaaatatactttatttttgttcaaattaaaggaacatttttcttgatctagatatgtttgttatgtttaaggttcgtttcaagctaatattaagaatggcttgtttcaatgtgaaaaaggttatgctcatttgtaaatggatattgttaaatcagtttaagaaagtttcctacgcactaaacgtgtcaaactaaatctcaaggctataacttattttatgtattttgatcgggtactagctttaatcatgctgttacaagattcagttacattctattacaccgtccaaacttatgttgttatcttcacccaaataaaatgaaatgttttctgctgggagatcgattaaaaccaaaagaaattatatttgacaagactatcagccaaattaaaatcaagattcaactatggaaaacttgtagctatttttcaatacctaagttttaggaaactttgccattatattggtgtttatctaaggattagaacatttattttagttaaattaaatcaataaatcgtaaagttgttaattaggaaaaaaagtattaaaatgcaaatatatttgtcattcgaacctctatgcggtggggagggtttacgctcatgtttgaaagtcaaagcagtgttgataataatctcaacgcgggaccagcatgtgatatacgaatgtctatatacattattttctctgttttgtaacaataaacgagtaatgaaattatattttattggtttcaatttgtaacaaccagcaagaggtctaatgagccaactagaatacagcccacgataaataatcaaacccatgaaacttccttctctctttcctttgccatttccaaacactatataaactcatgtcgcttaactcaatttttcatcaacaatacatttgagatatcaatacacctccaaaatatatacaaaa

SEQ ID NO: 7076 - DNA, 3000 bp, Unknown
  misc_feature (1)..( 3000): cDNA_ID_2993900_gDNA_ID_1621125_Annot_ID_172255 3000 nt of promoter + ATG
tatctttcttttctcatcagaaccaatttggtacacaagaatctactgcaagtgcatattcctcaaaggattttgttttcatgttaatttattggcgtatctcggtctaaatgtaaccagcaaactatctgccttgttcaatatgtacttccactaaactattttgcattccattggaaagtgacctccatgaaatgccgctcatgaatactcttaatcaatcatccaccaaatgttgcaggatctttttcgcacagaaccagaaaatgttgcatatctcattctcatctcttagtccgcactccacaccctacgccactcactttggagtctgctcttaaaatgatgttatgacatagtaagatatgaccaacataaaccctttcacactcacgacatcttcttatattgcttatttcttaggatcatgaatgaattgtttcgacaatactgagaacgatacacgtcttcaatattctgcataaaggccaacatggaagtagctatattttatcgtggaactagccataatgcttgaaataaacaatgttatactcataatatcaattaaatgtttgtgatatactactatataattaaccactagtaacttcatcatcatcctttttattatttttgggtcaactatatcattatccttattcaaccaattttattcttatataagaggaaaatcgaattaggtaaacggaaaatgcgattactttctgaactcaaaagaaggaatcgaaacaatttttgttataatattaacaattttcgtgtggtctttatcaaattacgatcctgatttatgaacacgtggcgctaagttagttcagtttcattcattgagcttttaattgaacaatgagcgttaccaattttgtgttttttttctcgcaaaatgattttttcttgttcagaaggacacgaagtgttcatcatcttcttacatggcaaaagtacgaaaacatctgagattgtggcacgtgtgttaccctgacgactctcttctcgtccctttttcacttttccagtttcaagttaacacgcggattgggcccggaggtttcttgattcgtcaatcgttagccacacacaagttttattctttaaccttttattttctttagttagtttcattgtaaacaatttttttttaaaaacaaaaaaaaacagaggttgacctagaaaagaaataaatgcagcggtattgaattgttttcttctcaacagtcatcatcatcatcaataaaagaaacatcaaatcaaatagttgaatcactgtatgaaattaagagccagaatttcacagctcaattgcaactttgcaaccgaatggctaaaaacccttacaaaaaaaaagacgaatgattgcaaacttgcggaattaaatgcaaatgcacttataacaagccgcagtacttaatcatcagtattagagtgacgctaaaaaatttgtatttgaaagaattatgttcattctcattaaaataagagtaggatacatgttatctctagacctaacatgtaacctaattttataactaatgaattcacattaaagcacgtacaagtcaatacaacatctccataacattcaagacatctttaatttggatctttttagggttgataatcacaacttttcgatcaaaaagatatatagatcgttcgttaattacaaaaaagtatgtaaagagtataatggaaacattttaagagtaaatttcacaattaaaaaaaactatagattatacaaaatgaagtgtctagagacgtggtaggttgtgtggcttgtgatgaaacttccccacgtaaattctcatcccaccacaatctctacctactaactgctaactactttacgtccagcgccctttcgctgttttgcttttattagttcttctcttatattttctcctagtttttctacttttttttatttatttattttagttttacaaatcttgaaattctatattatagttaaattttagaaagccacctttgtgtgagttttgcttatgcaattgccgaccgaagtttgttccattctggcgttctcaaacctaacaactgtaactacatctttcattcataatcagattgttttaataatatactcatatctaacaatatcaggagagttccagcagttttattcatataactggtgtagtttgaacgataaatagaacttattatagaattaccatcacccaaattttagtattgaactattcgatgagaattttgacatattcatggagctaaagaaatatgacgacgcatcacattttgatatgtacagtctctacattttttcaaatacatttttttctttttcaaatctagtatcaagtacaaacgaatgtctaaattcgcttggatttattaaaaaagtatctttaagtttggtgtacagtttgggttaaagtactgtgtaatataggtggattgttttgaaaaactttgaaccgatgccgatatctaattgattttcttgtttttttttggtaatttgaaaaccattttaatttatttggttacatatatttgtagtattcagtaagtaagaaacaacataagaagattggaatttgatattagctggtgctactaattttggagtgtttctgaaagaagacacacgttccaaaattgtcaacacgtaaacaaaaaccaataagggattgacttgtggatattggataaccaagcaattaattaagatggtttagagacgtaaaatgattaattaagaaatagtactaatactttattggaaaataagagatgaggtataataaaagatgagtagctgggaacgtgcaacagaaaaatagttcacccaactttctcctattaatacttgcctcttctctcttcctacttctaaccttctttttctccttcatcacacacatatacacacgctttcgtttaaactctctctgtttcaatcattaatcagaaagaagcaacacaaatatg

SEQ ID NO: 7077 - DNA, 3000 bp, Unknown
  misc_feature (1)..( 3000): cDNA_ID_1816629_gDNA_ID_1621126_Annot_ID_56352 3000 nt of promoter + ATG
ggtggtgtggcataaatggaatttggtcgctgttggttagttggtgactcactctcgatcgtgcactgtattagtattttaaaatataaacaaactgataaagtagtatcatataatagtgttttacttactatccgtagaaattggaacgcattatcgcataaaaagtgattcgtaattggttaaaagggacatttaactttaccataggtaactatattagaatcctctgtccaccatagaagagattattctattttgatcctcatcaataattgaagtaaattagttatgtacacattagtttctcttataatccgcgtgattacttatggatgacaatgataatttcacataaataatcaagtgaatatgattacgtagcaattaacaaaggtgttagattttttacttcatagaacaaaatacgatagtttacaagtaatgtaagtacttgtagtcatagagaataatgcttgtgtccaaatttagaaatggttacttgttgatgcagaagatagttcaaacgtggacatcaaggatataatgtcacatcgcccgaattaatttaaaccgcgaaaattattcacatattgatggtcccaagtgattaattaatacaacaactgaatttgcatgcatacaataatgaatacaaattttttttaaaaaaaagtttagaagaaaaacaaaaattagattctcatatgtaagaaaatagattaatcaaaattttgtgtaagttcaactaaatggttaatatggtacgtagatatgattatatgaagccataagaaacttcattttcttgaatagaccatatatcttaattaaatggtattatacatcatcatatcacgaaattgatagataatcttatccgaaattataatgacaaatcgagaaaagcttgtccccacacatgtggcttaaataaaagtccataatccgacagaacttatacaataacttgtttcgtttgtttgtatttggttgaattgaaacgatagatcatttgatattcaaaaggccaaagctgccgcaaatgcttaacaacaatgctaaatgtcttttggctttttttttcattcggtgtcgttttggtatttggtctatacatcttttctgatgaaagatcacaaagattcacgacaatttataacgaataatttttctctgtttccgttttagaatttgacccttagttaatttacttcttagatcttagttctcaagagtcggtcaataggatctaggaaatcatttgactttttttctgtcaacgataatcgacttttttttatatgcgtgagaaccaagcattacatgagccttaatcaattttatatgagtcagaatttacctatgcaacttctctgtgcagttggacattttcccacactatttggtctatagagtgtcaaaaaaggcttgtatatcgtcgccaaaactttatttttataagaaaaatagatttcatacaaaaatcttcatcatttgtttacataactttcaaagctgaataacagtggatctatttcggaaaatgaactcaaatttgggattgtttaggttagtgaagatctactttggctcgatttgagaaagtttaaattcattttgacttctctttttgttccttatatattattgatcgttattagatatcaaatgtcactatgcatgttagctaaacattctttgtgggtcgtgtcgtggctgatcagatgcttatcgtggactttgaaatcataatagacaagacaaatgaacggttgaaccggctttacatacctggtttctagctaaaccaaacacaagctcggtttatcatttttgaacattaagaatcacgtaacagagcgtgtgtgccttctaaagaaaggctttgtctagttttcttcctaagacatgacagaaagtttggaaaggcaacatgtttgtgcaaaatatcaaaggaaaaagtttctgagcttcctatcaaagctttatgcaaaggcctagaggattaaaattcatgcctgccaaagatcagaacagtcatgaggagagtctcaaatgggccttagtaagtagctgatagattacatcagcaaggcttcaaaagaagatacgaaaacatcaacaaccatttgttttcctcatgttcaaaatggctttatctacataaaccattaatacaggaagaagtccatcggttcgtctcttcgattatatgaaaaaacacaaatacatttcatcagtttaaagagaaacaaaacaattatatttgatgaagtggtcaatgaatgggtaaatataaatcttattatatctttatgcttaagttttctatatttagacaaaacaaaaaaaaaattcaataaaaactgtaaaaagaaaaaaaaatctctatatttttaataagtaccattttaacactgttatccaaaataataaacttataaaggtttgttattttacagagaggaaaaaattcatagagaaaatcggcattagtttaatatttcctcaaaagggcaaaataataactgaaaaagagagaaaaaatcagaagaggacgaaaagagaggatccaattaaaaatcggattagatttttactaaatcaagacattgtctggtcaaaatcaccaaaaagaaaaaaaagttagccataacaaaaaacttggatccttcaccaactcatcatcattttacattgtgttgtaagatcttcctcctatcttttttcctatggacgatagattcgaatctaactttctcaccttcatcacaagatcctcgtcctctttctcgtagcctcctccttctaccttctacgccacctttaaacccaaaccaaatctttaatcataactcaaaacattttgctctcaacaacaacgacaacaacaacccacacaggttctgttttttcccctgcatttgtgcctcgtgtcaaaatcgtttggtgttagttttggttatttatcgaagtttgtgtaggaattagagaatg

SEQ ID NO: 7078 - DNA, 3000 bp, Unknown
  misc_feature (1)..( 3000): cDNA_ID_1816622_gDNA_ID_1621126_Annot_ID_56356 3000 nt of promoter + ATG
caatttcaattatagggtttcggagataattagatattgcttcttccttttttcgttgtatttgtttaaatcctctctgctttggtctgtgcttgaaacttgcaaactaaatacgttggatctgttttgttgtaggcaactcttgaagatattggtatggacatgacagaattaaatacccttacctacgatgatctcgatagtgtttcaaagctacaaaaaagtcggagatatgctgatataatgcagcaagtggaagaggctcttgaaggatctgtattagagtacaagaagctaatcgtggactgcaagcagctcttagttgatattgagaatgaaatagtcatcgtccaaaactttatccgtgacaagtatagagttaagtttcaagagcttgagttgcttgttcctcacccaatcgattatgctcgtgttgtgaaaagaattggcaatgagatggatttaaaacttgttgatcttgaaggccttcttccatctgctatgatcatggttcttttagttactgctttaaccacaaaagggaaccaactgccagaggatgttctgctaaagacgatagacgcttgtgatcgggctctggatcttgattccgcaaggaagaaggtccttgaatttgttgattgttgcattgtgtgtgtcacattctaaacctaatgtgcttcttggtctactcatagccatctcatgcttcggaaacaccctcctcctctgcatctggatacaagtctctggaaaacgtaaagcatatcaatgtagctgccaataggtactatatatttctttccaaacaaaaatgatggaactctgtttatctttctctttacttacatattggttctgtgatatcaaaagcaattaagaccacagaaaaccgttgaggcttaacctcaaacatcgaacaaaaagaccgagactcgaactccaacaatctaatggtttcccaatttgtcaaaagtgtactataattatatcttctaaacacccaacaaagtattagccatcaacttataatactctaaacttgatttctctaaatcttttcataccgagacatctaaagtagcactatcaagattactacccgtgacctcagcctcaattacaaaccgggaggtcacaagagtttcttataaacacggttttgaagaagctaaaatggtaaaggtaatggtgtataaatagaatactaagtgcggctaaaggtttgcaaatgagtagtcttatggtggttgtaataaaacagaggactggttctcgaaagagcggcaactaaatggataggtggctgtttgaattttgtggttggctgtatcgctttctgttgcgattggtcatcttcctctgcttttattcattgttctgttactgttaggctgaacttttgtaactttgcaagtacgtaaactaattgtaccactctgataagtatacttcttgataataacattacattcattttatttcaaatttacataccgacataaaccaaacattcctcaacgataaacaagatgaaaaatagaggtttaaaaagaatcgacaaataagtttaatgcgtatacgttaaacctccctgtaattgtgtacaaattacttaagtgaaaactgaaaagtgaaaaccttttaaaaagttaaaacgtgtctgtatatttgaattgattttgtgggttaacgttgtcgattgactactagatgtgtatgatattctctatatttgaattgattttgtaacaaaccatgcggtcataagagtttcttctaaacatggttttggagatcctaaaaattttcggtaacagaaaacagagtgcggctaaattaagcttcggatttacaattgctaacgttgcttttttgctgtgatcaatctttttcttcttcttttgtttattgttctttatagtttggctaaactttgtaactcgagctgtgaagtactttaacagtatatttaataataatacaataacattacattttttaggtcaacaaaattatgttcaaacctttaaaaagatgaaaaagtgtttctatagttaaactaatcttgtggattgaggactagaagtatactatgaaagtcacttttggcaccaaatttctttgctgtcataaatatcagagagtttgacaaaaaaaatttgttcatgcaattacacataagtaaagtgggagccatttttacaattttgtttactaaaacgtgtatgataatagaaaatctgtcaaaatctgtcaatgtcatacttggtatccaataatctctatgctaattggccaacaattttagtaagtttttaacatatttgtggttgtcaaaatttttatttttgcttttagatgtaagcatgaaactaaattcaagtaaactaaaaatgtatacgttttacaactcaaaaagttaaactaaagtcacaagtcacaacgttggtaacaactctgctttccacacaatatatatcacatctatgtttttgtctcagacacataataataccattagagaagaaagaaaatggagatatataatttcgaaaaaattaatgtttcgaaacacttcctgaaaatattcaattgaacattatgtcacggttgcctctgatgaaatcctttaaaaaaatggttaacttgttatctatattttgacgtaagattcaattgtattcgaagaaaataaaaatattaaaaacgagtacgacgacgaaagacaatctgtcactttcatgcatggtatccaataatctctgtggtaattggccaataattttagtaagtttttaacgtgtggaactaattaaaatttcttcttttggtttttagatgtaaagcgtgaagtataattcaaggatatacgcgttttatgactcaacacgttagaaacaaactctgaagattctctataaatatcatcaattgtgtgtgtttgctagtcctcatctatctcaaacacataatataatatcatcagagaaaaacaaa

SEQ ID NO: 7079 - DNA, 3000 bp, Unknown
  misc_feature (1)..( 3000): cDNA_ID_1816616_gDNA_ID_1621126_Annot_ID_56358 3000 nt of promoter + ATG
ctactgatttgccactctcacgagctttgtcaatttcttgccgcaatcggacagagatcgagataatgctaaaaagacgaaactctattctaatcttaatcatttgttaaataatgcgatttttggggttcactattaacgaatcttactcagttcttccacttattacatcaacacgtaccattatctttttttggggctaaaaacgcgtctcgttgcaaccatttagtccatgacacgtagtatgatgtcagacaaaaattgtttggctttttaaaatcgaactggtcagaccgaaccgtgcttccggttgtcgatcgagaactggaggactagtgtatagtggatgaaataaatgtaaaaaatgcattttaatttcgaggatacaacttaaaattcaggcccgacaaaaatagttactccaataatgcaagctatgctttatcatggagctagttatgtaaaactagtactatgaaactaaccatttaacaaacttacggttaaagttgtagatagagttatgggcaccggttttactaaacaatacatatgctttgaacttttaaagttgagcctaaatctatagtccaacactatgaatacattttcgagtctctccctgtgattgatgacgtacccagttatagaagtttaattggtacgtacaccattagttgcatatgtataatatatccatatagtacgattcaaaaaaatgacatttacaaatgaaaaaaactaaattatcataagacgtcatatctattgaagaatatgtgtgctttcatcctttttttttggtagggttatgtttgctttcatcttgatttgaaggaaatgtgtgatagtatatgctacagtaaggattaagttataacgaagaaagagattcatatctaaaatttaggtgtatactattttggaaacctagttcaattcaacaaaaggttgggtgaaactaactttctagttaccaaaattgaatgttttaaaataaaaatcaaagattcgtcatcagacaaccaacaaacttctacacaaattactataaatgggttttactgcagtactttagtagttgttggtcatcagttactaacttactatacatagattcactctaggcttagagtagttgttggccatcaattgttgtagcctttttttggtcaaaggtaaattgagaatagacagtaaatatagcttttgactatgtatagatccacaactgcactcaatttaaaacattaatgcattttgcatgcattcatatcatccgttcatgagattttatacattagtataagttttacacgacagatgttaaaatgttgaattaaatctgttgtcgccattgattttcatgctcacttaatagaaatgtctaaaagcgtgacaaaatgttatattgctacttaagatttttttttttttgccaaatttgctacttaatatatgatagttcaaaaccatgtttagctatggttatagcattgaaattatttggtattacaactaccaaaccatccaatttaaaatagtccataagtaaaaagccaagcatgacacaagagggctatgtgatggtattggttcgagaccgtgtggaatgcataatattttatagacgtttttcaatactaatatcttaaacttatttaaattaaacataatttattatcttaataatcatttataaaataaaagatacatatagctaacttaatagcctataaaatccaaagtataatacatcatttgtgtttaccaatatcaaagtaggataaatggaccagttttgagtcgttagacaaaatgatatataatataccatcaacaatagtaattaactctgaaatgcagaatcgcagaaaatagttgataaatcatttgtcattttctaatgtgatttcagttccctatatagtatagttgctatttaacaaatggtgttggaaagttgaaacatttaaactaaaagccaaaataaaataaaatttaagtctcttcttgaacatttaccattaaattttgttttcttctatacactaaagaaaaatctcctaaaatagatacagctttcattgctctttttgtttttaaacggttaaaagaagaaacaaactttaaataaccgttaaattagatattgatcagaaacaaaaaaaccggtttcgaaaacgcgttaccaaaccggatattgcttaaaaagtcccacttcaatttgtttttttcctgcttcttcttctaaaaataaaaactctactcttgtcactctctttttgctgtccctattttcactccactctttttcatttttttagtccctactttatttctcattcattatccttttctaattaaaaaaaattaataccaaatctaaacatcatcattcattttaggagatgtattagaccttacattttgaatgatgagttttagttatatgattttgatgattttaggaaagttgatgtgatttattgtaaaatcttttcaaatttcatctaaaaccatataatttggatttctgtatttttaagtgattttttttttcaaatctttcaatattaataaacatcaaattcataaactgtttccaataacagtgaaatttaaggtatattttttagttcaacaacactagatttcattagaatttttaaaatttataatgaataacataagatttataaatttacacaaatcacttaaaataataaattgaatacgctcctcttaaattattcacaaaattatacgttaccaactatacataaattataaataaattaaaaattaaaagtctataaatagatttaaatttaattgtgtagggtttagttatggagaaaacataattgtgtaagtttttttggcttctatatatattaccacaaatatataacacaatccgctctcaaacccaaacaagcccaccaatctcttcttctctgctcttctctctctgtagacactagaagaagaacaaaa

SEQ ID NO: 7080 - DNA, 3000 bp, Unknown
  misc_feature (1)..( 3000): cDNA_ID_3049732_gDNA_ID_1621126_Annot_ID_56359 3000 nt of promoter + ATG
cgccgtcgccggactctctccttccaatttccccaaaacccctccaccaaaagagcatctcactccacctcttctgatcggagacgctgcaaatctagctgaaacagacctcttcgccggcgtggaatggtcaaactccaacgccattggtttcacaacaaacggagacgaagaaaagtcgacgttttgtccccaagatcctcttctaggcttcgacccaatctcttgatcagttctttctttcggaaccaccaatgtctccggcgtcccaagcaaggggtgccggccaggtatgggttttgcccctttaatgacaggaacaggggatccaggttcgagccgatcaacgtagataaactgacccaactgcaacttattgctgagaacgacgtcgtcttgatccgaagggagagagacgtagatcgagtgagaggaatcagagattttgatgagaaacccttgtttcggctccagagacttctcgtcgagatcaatgggaacgatatctgtgacctgtaacatagagcttcggtgctctctagttggtttaattcctgttttcataccttggattagcttttgaagaattccaggtgccaaagctgccatttttgttgagcttttaagatcaagaacgatagtttcagaaaattcaataactgggtaagaattaagaaggagatgttgatcttaaggatttgcagttgctaggagccaacggtaagattaaaaaagcaaactttttgaatcatggctttgttgcaacggtcgaaattgctggtagatctgtgtcgcaattattctaatttatatccgtgatcatttggtttaacacttcacaaaaagcaacgatgagtctttttagtcagttcatggatttataatttatatggccaatttgaagaaccaatttctaatggttaagtctctagtatagtgtatttggtggttgacacttgacagtgcatagttggtggaaccaataaacatcgcatgattccgactacaaaattacaagaaagtcagaactgtttcaatcactttttctttactataaacagtatcttaattggttttggtaagggaactcaaacaatttcagcataatgagtagtttatttgtaggccagaagtgctaaagtaacgagattaccaatttaagatgataaatgtataaacaaaaagaacaaagtaggccttagatgttagaagaaaacaagggtctgattcaatttctaaacataattcaccaatagtgattcaatttcaatcatgaacattaatgaacgagattaaatagctttaagtcagattcactggcagagaggtaatggaaaccatgaagcataatgagtagtttatttccaggcaaagtgttaaaggtaacggaatcatcaattgaatatgacaattgtattaggtaaacagaacaaactagcccttagaagaaagcaagggtttgtgttttttctcgatatctccaacttctaggacaaactgcaaaatacagcgatgaaatgaaacaaatttcttggaatctatcaaaacttgcaggccatgttatagtgttgaagcaaatcctgcaaatatcgaatgcaaacttagattagtcactgtgcaaatagaccaacacaacacaagtctgaacaatctaatccactggttcaatgtttcgtaaatgtgaatcaacacatcattttactaccatcgataagattccactctcattaggtcagatagacagtgataggtcgtcacaatggagcaatagtatgacaaggaacaatttatacaaactcaatgcccttctgctacgttttcgtaataaaacatgcgaagaaaaagatcattagctataaagccgatcacttgatatactatacaaaaccgattacttctattagcatgtcaaggcagatcatttatggaatcctatttaccaattgagactacatttactcctagtctggaaacagaaattcagaatcaacttcaattctaaacataaatcatgaacacaagtaaaaaatttaccttctgataagcaactccagttttgattgctcagagatagcaatgaagtgagcaaagctgaagcagtaacactatgtaatggtattagtgaaatccctgcactcaattccacaggtaccctaaacacaaaacccaaatttacatttcagagataaaccctaattcttcagcataaagctcatacattgtagacgcaaaatcaaactatttctcgattgaaaacagatctatcgcctgtagaatctcggttctaggattcgatagctaacctggagaatgtgagtctacgaagtgagggacgagttgaagaagatgatccattcccgaaagcaattccggctgattttccgatcttcgaagcagaagttgccgctgatgaacgaccaaagagtatcttcccggaggatgacgatgcctgaagagctcttctcacgccgttggccgccatgtttactcttttctcaaactctcaaaaaaaacttcggcgacatttctgtcatttacgaaggtgaggttttaaacccgggtcgggtcggatctttacgataaggacccagtacaaagcttaattcggcccatagatatttaaaaatgagccgataaccggttagcaactggttcaaccgggaattaataactggttatcatctatgccttctcttttatcagttgagaaacctcgagacgaacgaaaccccaactttcgagtttgccgatgagtctagcctccatgatctccggctaaagatcaatgaatcgacgccttcctctgttcgtttgtcgattgattacaacgacggtgatatcctcgcggctgttactctctcgattcgtctgattttagtgcgtttgatcagaaatcggaaacgaatcatcaggagattgttcgtagattccggtggcagcatgaatctctccggtgtaaaaaggttaagcgagcctctcttgttgaaaaatatattgatg

SEQ ID NO: 7081 - DNA, 3000 bp, Unknown
  misc_feature (1)..( 3000): cDNA_ID_1816610_gDNA_ID_1621126_Annot_ID_56360 3000 nt of promoter + ATG
ttgtcgaaataacctgctcatataatttacttcaatatctacatatacatttttgcagctattttgtgaaataaatcatgtagttgagacttatttagtcactagattttaatgtttgtttttgttaattagaaaaaaaaattttcgaattaaatatttgacacttaacaatcttccctaaatctctccacattaactacacgattagttactaaaataaaacttccaaaatatttaatatcatttaattactacaaaattatcatttttgatattgtttttttccatgactataacaattcgattataatcatcaaaccggagagatatttgatagcatttaagtactacaaaattacaaaatatttagacaataattcataaacatatcataaataagatcaacattaataaaataaatgagttttttacgggacggattggcgggacgagtttggcaggacgttacttaataacaattgtaaactataaaataaaaatattttaaagataaatacaatttgcaaacttttatatatactaacttaaaaaaataaattgtttccgcggtgtaccgcaagttaaaatctagtatgttcatgtttttgtaattattaaaggtcaatcgaggctttacttttttttttttttttctcttttgtttctgctttcttttaagaagattgaagataaatgttacctaacctaactcatattttaagcataacatatcattctttttttgggatctacaaacgtataattatataattgtgggttcatctagtgcatgaaaatggaagaatccatcactttcaattaccgacttaactattttggcatgttatgtttgttactttttcccccttaaatttaggacgataaaaggattatattttttgttggtagaatttagtatggaaggataaaattaaatttgtttacatctatcacgtggttttcattactgtaaaaaagtgaatacaatccatcatcgtacataacaaacgagaggccagtagggtgtgaaactcataaccagaaacgatgttttgttatggaatcacaaggatcacaataactcttgttttggttaattggatatgtgtgtttataagttcacggttttgtgtcaacgatgctatgacaatgtaacagaggagtaatggagtttgacctctgtgtgtgatcagaaagacccacccatctctgtatatctctccccattgaagctttacctatatctcaactaacttggtccaaatccattattggatagaggaaattactgttttatgacaacaataaatttgtgaattatctatcagagaacctataaaggcatgaagtgttgtgagatcaaatcaacttcaatagagtttctgtgtttgtccttggcagagttttcacttcattcaatttggatccctctactaaatctgttaagtctgtttctggttggttgatacaatcaaagactaaatgccaatttccatgtgaacttcactctgtttcagtaactcaccatttcactatctactactattctagttttctatatacttagttctacaggacaaaacctcctttgcaaaatccgattcaatctcattcttgagtactagaagaagaagaactatactaagtttccaatgctctttacaccatcttaaacctataattgccaatttgcaagatttgaatacaaacaaacattcactccaccggattcaatatggtctctttttatcttcttccacgatttatgacgaaccaatgctccctgaaaaaccttgaaatgccctgcttatgaaggagaactttcccttttgcctccaataagtagcaaacctctccttccagttaaccacatcatgattgccttctgtcacaagatcttggcactcttccaagcacttctgcttccacaggtcattctacgaagccatgtctcgcagttcagaagaaacacaagccaatgtcccaatatccacaccgggaagcgactctagtatcttgtgttttagctctcgaggtagactgataaagcaaggtggaagttctaacccagttttgtagcaaagatcaaccaacagaggcgtaacaataccatcttttatcattctccaccacacgagtaccttacagtcaatgctcaaagtatcttcttcttcatcagatttcaaagtttccataagtaaatcaacaatgtgcacatagctacgtttatcaatagacaccacacgaacaaaactaccaacactaagagatccataaactacaacatcgcctccttctcaaaattcaaaccgactattcctttcacagaaggtagagtatagttaagcgataccaaagtcttcttcgagaagctaaaacgcatagatgaatcaggatcaaacaacacaaatccagattctaacataacagcatgaacagtcatgatcacaatcgtcaattcacaagtgtcaccagattcctccatcaatatatttttcaacaagagaggctcgcttaacctttttacaccggagagattcatgctgccaccggaatctacgaacaatctcctgatgattcgtttccgatttctgatcaaacgcactaaaatcagacgaatcgagagagtaacagccgcgaggatatcaccgtcgttgtaatcaatcgacaaacgaacagaggaaggcgtcgattcattgatctttagccggagatcatggaggctagactcatcggcaaactcgaaagttggggtttcgttcgtctcgaggtttctcaactgataaaagagaaggcatagatgataaccagttattaattcccggttgaaccagttgctaaccggttatcggctcatttttaaatatctatgggccgaattaagctttgtactgggtccttatcgtaaagatccgacccgacccgggtttaaaacctcaccttcgtaaatgacagaaatgtcgccgaagttttttttgagagtttgagaaaagagtaaac

SEQ ID NO: 7082 - DNA, 3000 bp, Unknown
  misc_feature (1)..( 3000): cDNA_ID_1816606_gDNA_ID_1621126_Annot_ID_56361 3000 nt of promoter + ATG
catgattgccttctgtcacaagatcttggcactcttccaagcacttctgcttccacaggtcattctacgaagccatgtctcgcagttcagaagaaacacaagccaatgtcccaatatccacaccgggaagcgactctagtatcttgtgttttagctctcgaggtagactgataaagcaaggtggaagttctaacccagttttgtagcaaagatcaaccaacagaggcgtaacaataccatcttttatcattctccaccacacgagtaccttacagtcaatgctcaaagtatcttcttcttcatcagatttcaaagtttccataagtaaatcaacaatgtgcacatagctacgtttatcaatagacaccacacgaacaaaactaccaacactaagagatccataaactacaacatcgcctccttctcaaaattcaaaccgactattcctttcacagaaggtagagtatagttaagcgataccaaagtcttcttcgagaagctaaaacgcatagatgaatcaggatcaaacaacacaaatccagattctaacataacagcatgaacagtcatgatcacaatcgtcaattcacaagtgtcaccagattcctccatcaatatatttttcaacaagagaggctcgcttaacctttttacaccggagagattcatgctgccaccggaatctacgaacaatctcctgatgattcgtttccgatttctgatcaaacgcactaaaatcagacgaatcgagagagtaacagccgcgaggatatcaccgtcgttgtaatcaatcgacaaacgaacagaggaaggcgtcgattcattgatctttagccggagatcatggaggctagactcatcggcaaactcgaaagttggggtttcgttcgtctcgaggtttctcaactgataaaagagaaggcatagatgataaccagttattaattcccggttgaaccagttgctaaccggttatcggctcatttttaaatatctatgggccgaattaagctttgtactgggtccttatcgtaaagatccgacccgacccgggtttaaaacctcaccttcgtaaatgacagaaatgtcgccgaagttttttttgagagtttgagaaaagagtaaacatggcggccaacggcgtgagaagagctcttcaggcatcgtcatcctccgggaagatactctttggtcgttcatcagcggcaacttctgcttcgaagatcggaaaatcagccggaattgctttcgggaatggatcatcttcttcaactcgtccctcacttcgtagactcacattctccaggttagctatcgaatcctagaaccgagattctacaggcgatagatctgttttcaatcgagaaatagtttgattttgcgtctacaatgtatgagctttatgctgaagaattagggtttatctctgaaatgtaaatttgggttttgtgtttagggtacctgtggaattgagtgcagggatttcactaataccattacatagtgttactgcttcagctttgctcacttcattgctatctctgagcaatcaaaactggagttgcttatcagaaggtaaattttttacttgtgttcatgatttatgtttagaattgaagttgattctgaatttctgtttccagactaggagtaaatgtagtctcaattggtaaataggattccataaatgatctgccttgacatgctaatagaagtaatcggttttgtatagtatatcaagtgatcggctttatagctaatgatctttttcttcgcatgttttattacgaaaacgtagcagaagggcattgagtttgtataaattgttccttgtcatactattgctccattgtgacgacctatcactgtctatctgacctaatgagagtggaatcttatcgatggtagtaaaatgatgtgttgattcacatttacgaaacattgaaccagtggattagattgttcagacttgtgttgtgttggtctatttgcacagtgactaatctaagtttgcattcgatatttgcaggatttgcttcaacactataacatggcctgcaagttttgatagattccaagaaatttgtttcatttcatcgctgtattttgcagtttgtcctagaagttggagatatcgagaaaaaacacaaacccttgctttcttctaagggctagtttgttctgtttacctaatacaattgtcatattcaattgatgattccgttacctttaacactttgcctggaaataaactactcattatgcttcatggtttccattacctctctgccagtgaatctgacttaaagctatttaatctcgttcattaatgttcatgattgaaattgaatcactattggtgaattatgtttagaaattgaatcagacccttgttttcttctaacatctaaggcctactttgttctttttgtttatacatttatcatcttaaattggtaatctcgttactttagcacttctggcctacaaataaactactcattatgctgaaattgtttgagttcccttaccaaaaccaattaagatactgtttatagtaaagaaaaagtgattgaaacagttctgactttcttgtaattttgtagtcggaatcatgcgatgtttattggttccaccaactatgcactgtcaagtgtcaaccaccaaatacactatactagagacttaaccattagaaattggttcttcaaattggccatataaattataaatccatgaactgactaaaaagactcatcgttgctttttgtgaagtgttaaaccaaatgatcacggatataaattagaataattgcgacacagatctaccagcaatttcgaccgttgcaacaaagccatgattcaaaaagtttgcttttttaatcttaccgttggctcctagcaactgcaaatccttaagatcaacatctccttcttaattcttacccagttattgaattttctgaaactatcgttcttgatcttaaaagctcaacaaaa

SEQ ID NO: 7083 - DNA, 3000 bp, Unknown
  misc_feature (1)..( 3000): cDNA_ID_1816598_gDNA_ID_1621126_Annot_ID_56363 3000 nt of promoter + ATG
gtctccgagtgtctcagtggaaccgattttggagccagaatcatcaagacgcttgtcaagtacccgttggtaagtcccaataagcatgtcagtatagttacaggaatctcagtcctgagaaacatcggaccgtgcaagcaaccccagaagagagggtaaaacaagagcctagcaatggaaccaccaacagcgattttctcatcctccagcatgaatacagcagtcagacacttaccaaccaagtcaaacacattgtacgctgcaataagcagaatagggtaccaatctgtaagaagctctgaatgaacatcctcagtaatgtatccaggaaatatcgacaatgtcaccatgtataagagaacaatcccgaaaccatgagatttaactttcgtcacgatatcccagagtgttgtcctccacgctaaaccggttaaagaacctttctcttcgctcttctctctgattagttcttcattcttacgctcctcatggaacttgatcaccggaagcttatgcgctacgttgtagaacacagcacaaatcaccataacaacaatccccacagcaaagtatagattcgcactttttctcaaaccatcaggatcttgaggatacacagctttagtcaaaattctcaatagtgacacaagaacacctacacatccaaaattcccaaaaacctaaattaatctaaccacagcaaccaaatcattctccattattgaggaagatgaaacatttaccggagccagcagttccggcgacaacagcttgcatatacctctccggcatttcaccggcaacaccgataagacctccttgcataagtgcatcacctagaccggataaggcaacggcggcggaagtaacatcgaatccggcgtataatccgacctgtcctttaacataaaccagatccaaaacaggaaccacaagcaaggcgattacgaagagtaaaagaccgagattgattctaaagctagcgaggctcttatgtgcatagaagacaacgataacgaatagacaaacaagagcaacgagcatgtagataacggcgaagatccgatcgacggccgtggaaggatagaggtaagagaagtaatcgacggcggtgatgaatgcgttccatggaagaagaaagccaacgccgagggtgaagtagatgatgtaagcgaagtggtaggaatcagaaggagcttttttggtagatccttcgtgaggattgaggagaagagaagtctccggtccggcttccgagtcagttacgattccggcggatttatcggtggtggtcatttgaatttgtttagtttctctcagttttggggatttttgggaaattcgttgactaatgggagtcattaaaacggtgcggttttgtatgtgtgtggaattacataaacggtgtcgttttgctggccgagcaaataatttggttggggatgcagtagcgtagacgcattagttggagtattttattttactagtttttgatttttggcaatggccctaaaacgtgtatttgataaataatttatatctgttgtagatgcgaatctcataaaatagtagatattattagttgtagtgtcctactgtgcttttgtccaaaaaaaaaaaaagtgttatagtgtgcatcaccattatcaagttgcattgcattatcataacgagttaatgacgcttgtgtcatccaaaacagatatgtatgttctggtagaaacagatatcataaagtgtttgttttccggcttccgcagtacaacaagagttcgaacaagcctcagtcttattcccatcatgtggatagttaccacatgaaataccccacaaattgcatcttttcgagtaccgagttagtcaacggcttaatctgctttcgaaaagaaacaaaacccgtaatttggaactttagcacgagacagctcttaaccttaaccaaatccatataggattccgtgtataatgttatagtctttctaggatatgatccaatcgagagtaaacacaaagttgtgtgtataccgtctggtgaatcttctgatgaatgtcgggttttaacattgagatcagatcagctgaaaatcatggacaacggttaaaaccaattacaaacatcgtcctttgtagaagagttccaggagagcatcaatggttttctatattatggagccacatatcttgatgatgatttggagattacatactaatgagttttaatggcaatactgaaaagtctgatatgataaggttaccaaacaataatccaaactcacccaaatgatttagtaatgatcgattttgatctctactaaagaagtcggaaaacaaatcgaccaaccaccgaatgagaaaatgatagatgtcgggctaaagccaattgaaatcaatcgaacggctttgctagaaaattccggatggcagagtaaagaagactttttctcttaaaagtatgaagagagaagagtgaaaactgagactatggaataactaatgtatgactatgtttactcttattaatgaagttctatcgagtaaaaaagatggtttttttaattaaaccgaccaattgaacaaaattttattaaaccgacattggaacaaaatttatcggaccgtcttagaaatctctctctctcacaccgtctttctctctccctatcaaatcccttctctctaatatgcgatcttcaaaaccctagtttcttcggatcgcttccaaacttgcgattatctccaagatagtcaaatccttcgctctttctccttttctttcttctctcttcttcttcttcttcttctcgttcgtctgcctcaccgatctccatcaatccaaagtattggaccagatcaccctcgtcgatatttttgattcgattccacaagtgattactagttctctcaatcggtgtaatgatcaattctctatcgtgttgaggatttaaaatcagtgcttaatccttctagttttggagctcctaactggattgtttctaaatc

SEQ ID NO: 7084 - DNA, 3000 bp, Unknown
  misc_feature (1)..( 3000): cDNA_ID_3049718_gDNA_ID_1621126_Annot_ID_172319 3000 nt of promoter + ATG
tacaaatgtagtctggttggtataagccttgttatgtatgtacgattgatgtcgtagtcaatgtagttgataccgtacaattcgatctaagctaatatttttgtcgtccgacttaaaactatataagcatcaatgttttggtgattacgaattagcaaaaacacaattttcaagaaggaaaaaaaaaatatttcacagtaatacattagacactcaatgacagctaactgtaaacaaaaatacaaaacacaaaacagtgtaatacaaaagaatttttatgtataaaatatgtcggttattaaatatccaaaaatgaaaatgtacttggatgttacagctatgagacaactactaagataaagaagaaaaaaaaaagggaagcttcgaaggtgggctttggctttgatacagacgtgcacagatcctttcccatgtaaaaactttgataattctgacgtgtaatttttccattggtaaaacatgttttgactttttacttacgtaagtggaaacgcattttgcaaaaaaatatcatatccctcgaaacacttatccattcacagaaacattctgatcctcgtttttagttaattcgtgtcgaactctcattggttcatatttacgagtccccacacctttagccgacgttggtgtctgtctggataaagaaagaataaataaaacgtttattttctataaaaatgttttgtttactattttcacaattttacgaaaataagagaaaatggaatttttttttttcgtgtggcggaaagtattgtagtattattttttctcttttgggggaatattatcaaagattcaagaatgtatttatttatggaaataaagaaggtgtttgctttttttgtgtgttcttttaaaatctttatataaaagaaaggtatctattgtttggttggtataaatacgcatgcgcattggctttttcgagtagaggaagagactagatagagtcgtgattttttttttcttttttaaattatcaaatggacgtgaaattatttattgaaaaataaacaaaaaaaaaaaaaaaagaagaagaaagagtctatcggatacgtcggatccaatctcccaatccgcattggctgtcgagacaacgtggatgtaaaataaggctttaagttcaagatcatttacctcaaagccactgagcctttaggttaataacgtcctaaattggctaatgtcttcttatgacatactcaaaatctatttttcttggtcgtcaaaattcaatactaatgatgtatatagatgcatggttcattcacaatatagtgtacttggttttttatgcctttccagtttcctataagtatgtatctatatagtatttgattttctaatccttcatataatcttaataaataatattgagttcaaacataagatatttctttatatatggatagagtctctagttgatcgtgtgtaggtgtttcatctttgaccagtggataacgatcagattatttaatttgaaacgttgtttccactttgtagagcttagactctatgtcactatgaaacgacttgtcaacaaagcattttgagccaaataatttaacatataacttggttaaaagacgagtttacgattattactattcttaaagttaaattatgtaatattttcagatttagttttcagtagtcacatgcttaagaacattaacatcagaatacaaccataatgattaatgagagatgtatgcaaaatatatcaactaatcatgttaaaaagggttgtaccattaattagtgatgcttatctgcttcattaagataataattaattttcaggaaaataaaactattgatttgaaattcttttacaaaatatcgatgaaattaaatcggcaataataaccaaaaatatacttttaattataaatgtgaaaaagggggacctcattatatccataaaaaccccagacaaataggtaagatacaagttgctaaatttaattaaaatcccaacaacaacaacaagattatctttaaaatacaatccatcctaaaccaaaaacaaaatttggtccaccatataaaaaaaaacatcatatgctaatatatagtttccatctaccaaactcaaaataaaagataagaagataagaagataaaaggacattaacgtaattttaatcacagcgtcccaagaaactaatccaaaacattatcgcgataaaaccgtacagagcaaaaagctactaataatattattattgaaataaaaatagatagaaaaaatagatcgttagaaaacgtgtatatatatatatatctgtgtattttgcaatatatcgtttttttttcttcgttatcgcattaatctctctctctgtatcttctcttgagtggagcgaatatccaaaagagttccgagtttctttcatccttcacgagcttatactttttcttctccattcgtttgtttttaacgatcaaaaacaacggcgaaggttagtctccggcggtttcttcgttgagatgtgacgacttttttttttgaacgtttataaagattacatattcatgtatttagatttcttttgttatgttaactgtttcattgatgttcgagttaattttaatttgactcaaacacggtaatttttttttaatcttgatctgttttgttacgtaatttttgggttgattttagcctgaaatgatgattttttttctttctagcttatgtttttcgtgaatcaatctttttcaatataaagattagtattttgttgaaattcattttttatttgattggctatgaggaatcagtttcttgaaatggaaatggtgatttgatttgatatgttcacaatatgaatgaagaagattagggttaatttatatatatgaaacaagaaagtttgtttatttaaggtaattgatatatttgttttgttgttattgccatttttaaggtattggaaataagacagaagctgttagctctgtttctcc

SEQ ID NO: 7085 - DNA, 3000 bp, Unknown
  misc_feature (1)..( 3000): cDNA_ID_1808923_gDNA_ID_1621126_Annot_ID_172315 3000 nt of promoter + ATG
tggtggcctgacccgagaatggtatcagttattgtcaagagttatatttgacaaaggagcgttgctcttcactaccgttggaaatgatgccaccttccaaccgaatcccaattctgtttaccaaactgagcatctatcatacttcaaatttgttggtcgcatggtaatatatcaggaccttgtcaatgcaatgatctgattgatcgttttttgctctctctgatgtgtttgtgatgtcactgcaggtggcaaaggcgttgtttgatgggcagcttttggatgtctatttcacccgttctttctataaacacatacttggtgtgaaggtgacttatcatgacattgaggcggtggatcctgattactacaagaatttgaagtggctattagaggtttgaggacctagcctttatttacctttatctattacatagctcaaaaatagaagtcaggtcctgtgctgtttgagccttatatatttgtccccttttctgtttattcagaatgatgtgagcgacatactcgacctcacatttagtatggacgcagatgaggaaaaacacattctttacgagaagactgaggtgtgtggtgattgatgttctttcttttgttgtgctttatcccaaattgcctagtatattgaattgatcattttatctttgatgaaaaggtgacggactatgaacttaaacctggaggacgaaacatacgggtaacagaagaaacaaaacatgaatatgttgaccttgtggccgaccacatacttaccagtgctatacgccctcaaatcaacgctttcctagaaggcttaaatgagttgatacctcgtgagcttgtatcaattttcaatgataaagagcttgagctcctaatcagcgggttgcctgagattgattgtaagttggcattctatttttcaatatttttgcatctatttgcttattcatttaaagttataataacaatcttgttatctgttttcttttgttttttagttgatgatctaaaagcaaataccgagtataccagctacacggtagggtcccctgttattcgttggttctgggaggttgtcaaagctttcagcaaagaagatatggctagatttcttcaatttgtcactggaacatcaaaggtaaaaccaatatttgcagcttctgtccaagtcgcttgagcttcattttctgatatgtactagtttttcttctggttgttttacaagcggtgtttctgttttcaggttcccttggaaggcttcaaggcactgcaaggtatttctggccctcaaagattacaaatccacaaagcatatggatctccggagcggctgccatcagctcatacatggttagacattattacaaagtcttttttttttcagttaaacgtggtcgtaattttcattggttctgttgcagttttaaccaactagacctccctgagtatcaatctaaggaacaagttcaggaacgcctgcttcttgcaattcacgaagccaatgaaggttttgggtttgcttgaacaaagcttaagaagaaggaagagcttttgattaagagcaagaaatagaaaacgcaagtggctatttttgtctgtccatatattatgttagtatattagtccattgttttttttttaggctttctctctatttccttagattttgttaaaaatagttgcaaactctcaaatattagtagttgatatttgctatccatttttataagatgagaaaattacataactgctggtcattattttgaatacttcctttctgtcacgcgtattggcatattcctcaaccaacatacgaaggccagtttgttatcacaagtttgcaagcccattgtcttaatatctcaactgtctccagaagcaagtctcataacatctagaagaggttgttgagcataccaagtgtgttccgaggaggataaacatgggagactccactccaaactccattaccttcaccacctgcctattcagcaaatgaagaatcagagtgtgtgcatggcatctctccgaaaatcccacacagggtcttgatctttgtcctccacgttcatcatcattttcatccattattgcttactcgccttgtccttgacgttccacatttgtctccagccaacaagtattgctggtataagctttgatagtttgtaaaataaacattagctaacataaatactcttttgcctcttatcaaaaaaaaaaaatgatgcttcacaagttaacacaccttcaaattttcttaaaaaacatctatatgcaataacagaattcaaattataatgcaataatgataagaaaacatttctcctccatcaaccaaaacgtgaattaacatctatcgaaaataggtgcttcacaagttgacacacttgacacacaaaatctacaagtgtgagagcgcttgttcataacgagtttaaagaatcgcaaaacacactcatattaataataatcaatcaacttttggaaatattcaatactcttttgttgatacatgtagtcttctaagataaaataaaaacgtatacactaaacagttttttttttttttttttggggtcaataacagaatctaaaaattaaagttaaaatttaaacgataaaagtatttaattgggacgtttatcaaaatgaaacaatgcattggatcggctttaaaaagcaaccaaaaaaaaaagagctgtcatgattgatattcatcatcacaaaataatgaaaattgccttattcacgtaataacaaaaagaaaatgattttataacagtcgaatcgtacggcagatatttgttggcccctcctcttatatgatatcatagtcaacaagagaacaaagccacagagagagagagacactaaaaccctaatctcttactcactgtctctcttcttcaatccatgtcttcaacacaagaagcgtctgttactgatttgcccgtgaagagacctagagaagcagaggaggacaataacggcggcgcc

SEQ ID NO: 7086 - DNA, 3000 bp, Unknown
  misc_feature (1)..( 3000): cDNA_ID_3049724_gDNA_ID_1621126_Annot_ID_172314 3000 nt of promoter + ATG
cgtgttccagctatgatcatgcaggctgtgcttcagctatgtgcccgtctaacgaaatcacatgctttagctatccagtttctggaaaatggaggcttatcttcactttttaatcttccgaaaaaatgttttttccctgggtatgatactgttgcatctgttattgtacggcatcttgttgaagatcctcagactctccaaattgctatggaaacagaaatacgtcagaccttgagtgggaagagacatataggtagagtattacctcggacattcctgacgacaatggcacctgtaatttcaagagatccggttgtttttatgaaagctgtggcttcaacttgtcagttggagtcatcaggaggtacggactttgtgatactgacaaaggaaaaagaaaagccgaaagtttctggcagtgaacacgggttttctttaaatgaaccccttggaatatctgaaaataagcttcatgatgggtcaggaaaatgttcaaaaagccacagaagagtccccactaacttcatccaagttattgatcagcttattgacattgtcttgagttttcctgggttgaagaggcaggaaggtgaagcagccaatttaatttcgatggatgttgatgagccaactactaaagtgaagggtaaatcaaaagttggtgagccggagaaagcagaacttgggtctgaaaaatctgaagaattggccagggtaacttttattttgaagttgttgagtgatattgttctcatgtacctacatggtaccagtgtcatactgagacgggatacagaaatatctcaacttcgagggtccaatctacctgatgattcacctggaaatggagggttaatttaccatgtcattcatcgattgcttcctatatctctcgaaaagtttgttggacctgaagaatggaaggagaaactgtctgaaaaggcgtcctggtttctggttgttttgtgcagtcgttccaatgaagggcgtaaaagaataatcaatgagcttacgagggttctatccgtatttgcttccttgggaaggagttcgagtcaaagtgttctattacctgataaaagagttcttgcttttgctaacctggtttattcgatcttgacaaagaattcatcttcaagcaatttccctggttgtggctgttcacctgacgttgcaaagagcatgatagacgggggaactatccagtgtctgaccagcatccttaacgtgattgatcttgaccaccctgatgccccaaagcttgtcactcttattctcaagtctctcgagacactgacgagggctgcaaatgccgctgagcagctaaaatcagaagtaccaaatgagcaaaaaaatacagattctgatgagagacatgatagtcatggaacttcaacttcaactgaagttgatgagctgaatcaaaataatagcagtctacagcaagtaacagatgcagtagataatggacaggagcagcctcaagtttcctctcagagtgaaggtgaaaggggttctagtctaacccaggctatgcttcaggagatgaggatagagggcgatgagacaatactgcctgaacctattcagatggatttctttcgagaagagattgaaggtgatcaaatcgaaatgagttttcatgttgaagatagggctgacgatgatgtagatgatgacatggacgatgaaggagaggatgatgaaggagatgatgaagatgcagattcagtggaagatggagctggtgttatgtctattgctggaactgatgttgaagaccctgaagatactggccttggagatgaatataatgatgacatggttgatgaagatgaggaagatgaggatgaatataatgatgacatggttgatgaagatgaggatgatgaggatgaatataatgatgacatggtggatgaagatgaggatgatttccacgagactcgtgtaatagaagtgcggtggagggaagctcttgatgggctggatcacttccagattgttgggcgatctggtggtggaaatggttttattgacgatattactgctgagccgtttgaaggtgtgaatgtagacgatctgtttgctctgcggagatccttgggcttcgagcgtagacgtcaaacaggcagatcttcttttgatcgatctggctcagaagtacatggttttcagcatccgctcttctccaggccttcacaaactggcaatacagcgtcagtttcagcaagtgctggcagtatatccaggcattcagaagctggcagctacgacgtagcacaattttacatgtttgattcaccggttctaccatttgatcaagtaccagttgatccttttagtgatcgtttaggaggtggtggggcacctcctcctttgactgattattctgttgtgggtatggattcatcaagaagaggggttggtgatagtcggtggactgatgtaggtcaccctcagcctagtagcctatctgcttcaattgcccagttgatagaagaacattttattaccaacttgcgtgcttctgctccagtagatactgttgttgaaagggagactaataccacagaagtccaagagcagcagcagccggatgttcctccatctgttggaagcgaaactgttttgggtgatggtaacgaaggtggtgaacaaagtgaagaacatgaactgttaaataacaatgaagttatgcaccctcttcctttgaacagtacaccgaatgagattgatagaatggaagttggggaagggggtggagcacctattgagcaagtagaccgtgaagcagtgcatcttatctccagtgctcagggtcaatctgatacttccggtattcaaaatgtgtctgttaccgctatccctcctccagtagatgatcctgattctaattttcaaccaagtgttgatgtagatatgagtagtgatggtgcagagggaaatcaaagtgtacaaccttcacctttggacggtgacaacaatgagctctcatcc

SEQ ID NO: 7087 - DNA, 3000 bp, Unknown; identical to SEQ ID NO: 7083
  misc_feature (1)..( 3000): cDNA_ID_3049728_gDNA_ID_1621126_Annot_ID_172313 3000 nt of promoter + ATG

SEQ ID NO: 7088 - DNA, 3000 bp, Unknown; identical to SEQ ID NO: 7082
  misc_feature (1)..( 3000): cDNA_ID_1816606_gDNA_ID_1621126_Annot_ID_172311 3000 nt of promoter + ATG

SEQ ID NO: 7089 - DNA, 3000 bp, Unknown
  misc_feature (1)..( 3000): cDNA_ID_3049732_gDNA_ID_1621126_Annot_ID_172310 3000 nt of promoter + ATG
tctgctgcttcaggacaatccgtctctttgatctccttttctcctgatcaatagaattataagcgatttcatgcaggatcgaagaagacccttcttctgttggtttctgattttcggttcttgcgtttatgttctgtgacttgttctcagcatctggagtagcagctacttcaatggaagtgagttcgccaatggtttgtgccatctgctggtgaaactccatgaacttctcaaagcacaccgcagggcaatcagcttttgctgatttactcagattggtgaacgtcctgtcccaacaaaaccacatcaacacattacattccaactcaaatccgactaataaaaaagcgtaggaaagaagagtttcgggttatatacttggtatgacgaacaacaatttccgtgattgtagcttctcgcaatgcctgaagggcaactttctgagctacctcccgaagctgagttgcttcctgtcaccaaagtaacacaaagaagattaaggaactatttgaactttcaagaaagatatgatattattccaagcatcaaacttcaatgaagaacacaaatggagttcaaatcaccttgcttagtatgttgagccttcctgataaattggtatctttctcgggttttatcttcttcgaggtagacaagggaacaacatcttcttgagcctctgaaatcaagaaacaagcattgtcctgaataaatcattgtaaacacactaaatgatcaatagaaatgttaaaagcaaaatatacctagagaggatttgaagggactaaaaagagaagcattgttctttttggcctgtctgtcacaaacacttctacttctcggaaacttcgaagccgacgaaacaaaacaactcttccttagcatcgccgtcgccggactctctccttccaatttccccaaaacccctccaccaaaagagcatctcactccacctcttctgatcggagacgctgcaaatctagctgaaacagacctcttcgccggcgtggaatggtcaaactccaacgccattggtttcacaacaaacggagacgaagaaaagtcgacgttttgtccccaagatcctcttctaggcttcgacccaatctcttgatcagttctttctttcggaaccaccaatgtctccggcgtcccaagcaaggggtgccggccaggtatgggttttgcccctttaatgacaggaacaggggatccaggttcgagccgatcaacgtagataaactgacccaactgcaacttattgctgagaacgacgtcgtcttgatccgaagggagagagacgtagatcgagtgagaggaatcagagattttgatgagaaacccttgtttcggctccagagacttctcgtcgagatcaatgggaacgatatctgtgacctgtaacatagagcttcggtgctctctagttggtttaattcctgttttcataccttggattagcttttgaagaattccaggtgccaaagctgccatttttgttgagcttttaagatcaagaacgatagtttcagaaaattcaataactgggtaagaattaagaaggagatgttgatcttaaggatttgcagttgctaggagccaacggtaagattaaaaaagcaaactttttgaatcatggctttgttgcaacggtcgaaattgctggtagatctgtgtcgcaattattctaatttatatccgtgatcatttggtttaacacttcacaaaaagcaacgatgagtctttttagtcagttcatggatttataatttatatggccaatttgaagaaccaatttctaatggttaagtctctagtatagtgtatttggtggttgacacttgacagtgcatagttggtggaaccaataaacatcgcatgattccgactacaaaattacaagaaagtcagaactgtttcaatcactttttctttactataaacagtatcttaattggttttggtaagggaactcaaacaatttcagcataatgagtagtttatttgtaggccagaagtgctaaagtaacgagattaccaatttaagatgataaatgtataaacaaaaagaacaaagtaggccttagatgttagaagaaaacaagggtctgattcaatttctaaacataattcaccaatagtgattcaatttcaatcatgaacattaatgaacgagattaaatagctttaagtcagattcactggcagagaggtaatggaaaccatgaagcataatgagtagtttatttccaggcaaagtgttaaaggtaacggaatcatcaattgaatatgacaattgtattaggtaaacagaacaaactagcccttagaagaaagcaagggtttgtgttttttctcgatatctccaacttctaggacaaactgcaaaatacagcgatgaaatgaaacaaatttcttggaatctatcaaaacttgcaggccatgttatagtgttgaagcaaatcctgcaaatatcgaatgcaaacttagattagtcactgtgcaaatagaccaacacaacacaagtctgaacaatctaatccactggttcaatgtttcgtaaatgtgaatcaacacatcattttactaccatcgataagattccactctcattaggtcagatagacagtgataggtcgtcacaatggagcaatagtatgacaaggaacaatttatacaaactcaatgcccttctgctacgttttcgtaataaaacatgcgaagaaaaagatcattagctataaagccgatcacttgatatactatacaaaaccgattacttctattagcatgtcaaggcagatcatttatggaatcctatttaccaattgagactacatttactcctagtctggaaacagaaattcagaatcaacttcaattctaaacataaatcatgaacacaagtaaaaaatttaccttctgataagcaactccagttttgattgctcagagatagcaatgaagtgagcaaagctgaagcagtaacactatgtaatg

SEQ ID NO: 7090 - DNA, 3000 bp, Unknown; identical to SEQ ID NO: 7079
  misc_feature (1)..( 3000): cDNA_ID_1816616_gDNA_ID_1621126_Annot_ID_172308 3000 nt of promoter + ATG

SEQ ID NO: 7091 - DNA, 3000 bp, Unknown; identical to SEQ ID NO: 7078
  misc_feature (1)..( 3000): cDNA_ID_1816622_gDNA_ID_1621126_Annot_ID_172305 3000 nt of promoter + ATG

SEQ ID NO: 7092 - DNA, 3000 bp, Unknown; identical to SEQ ID NO: 7086
  misc_feature (1)..( 3000): cDNA_ID_1816594_gDNA_ID_1621126_Annot_ID_56364 3000 nt of promoter + ATG

SEQ ID NO: 7093 - DNA, 3000 bp, Unknown
  misc_feature (1)..( 3000): cDNA_ID_1808923_gDNA_ID_1621126_Annot_ID_56365 3000 nt of promoter + ATG
atacaaccagttacgtatgcgctccccacaggatctgaagggacgtctgaatgtgcagtttcaaggtgaggaaggtattgatgctggtggcctgacccgagaatggtatcagttattgtcaagagttatatttgacaaaggagcgttgctcttcactaccgttggaaatgatgccaccttccaaccgaatcccaattctgtttaccaaactgagcatctatcatacttcaaatttgttggtcgcatggtaatatatcaggaccttgtcaatgcaatgatctgattgatcgttttttgctctctctgatgtgtttgtgatgtcactgcaggtggcaaaggcgttgtttgatgggcagcttttggatgtctatttcacccgttctttctataaacacatacttggtgtgaaggtgacttatcatgacattgaggcggtggatcctgattactacaagaatttgaagtggctattagaggtttgaggacctagcctttatttacctttatctattacatagctcaaaaatagaagtcaggtcctgtgctgtttgagccttatatatttgtccccttttctgtttattcagaatgatgtgagcgacatactcgacctcacatttagtatggacgcagatgaggaaaaacacattctttacgagaagactgaggtgtgtggtgattgatgttctttcttttgttgtgctttatcccaaattgcctagtatattgaattgatcattttatctttgatgaaaaggtgacggactatgaacttaaacctggaggacgaaacatacgggtaacagaagaaacaaaacatgaatatgttgaccttgtggccgaccacatacttaccagtgctatacgccctcaaatcaacgctttcctagaaggcttaaatgagttgatacctcgtgagcttgtatcaattttcaatgataaagagcttgagctcctaatcagcgggttgcctgagattgattgtaagttggcattctatttttcaatatttttgcatctatttgcttattcatttaaagttataataacaatcttgttatctgttttcttttgttttttagttgatgatctaaaagcaaataccgagtataccagctacacggtagggtcccctgttattcgttggttctgggaggttgtcaaagctttcagcaaagaagatatggctagatttcttcaatttgtcactggaacatcaaaggtaaaaccaatatttgcagcttctgtccaagtcgcttgagcttcattttctgatatgtactagtttttcttctggttgttttacaagcggtgtttctgttttcaggttcccttggaaggcttcaaggcactgcaaggtatttctggccctcaaagattacaaatccacaaagcatatggatctccggagcggctgccatcagctcatacatggttagacattattacaaagtcttttttttttcagttaaacgtggtcgtaattttcattggttctgttgcagttttaaccaactagacctccctgagtatcaatctaaggaacaagttcaggaacgcctgcttcttgcaattcacgaagccaatgaaggttttgggtttgcttgaacaaagcttaagaagaaggaagagcttttgattaagagcaagaaatagaaaacgcaagtggctatttttgtctgtccatatattatgttagtatattagtccattgttttttttttaggctttctctctatttccttagattttgttaaaaatagttgcaaactctcaaatattagtagttgatatttgctatccatttttataagatgagaaaattacataactgctggtcattattttgaatacttcctttctgtcacgcgtattggcatattcctcaaccaacatacgaaggccagtttgttatcacaagtttgcaagcccattgtcttaatatctcaactgtctccagaagcaagtctcataacatctagaagaggttgttgagcataccaagtgtgttccgaggaggataaacatgggagactccactccaaactccattaccttcaccacctgcctattcagcaaatgaagaatcagagtgtgtgcatggcatctctccgaaaatcccacacagggtcttgatctttgtcctccacgttcatcatcattttcatccattattgcttactcgccttgtccttgacgttccacatttgtctccagccaacaagtattgctggtataagctttgatagtttgtaaaataaacattagctaacataaatactcttttgcctcttatcaaaaaaaaaaaatgatgcttcacaagttaacacaccttcaaattttcttaaaaaacatctatatgcaataacagaattcaaattataatgcaataatgataagaaaacatttctcctccatcaaccaaaacgtgaattaacatctatcgaaaataggtgcttcacaagttgacacacttgacacacaaaatctacaagtgtgagagcgcttgttcataacgagtttaaagaatcgcaaaacacactcatattaataataatcaatcaacttttggaaatattcaatactcttttgttgatacatgtagtcttctaagataaaataaaaacgtatacactaaacagttttttttttttttttttggggtcaataacagaatctaaaaattaaagttaaaatttaaacgataaaagtatttaattgggacgtttatcaaaatgaaacaatgcattggatcggctttaaaaagcaaccaaaaaaaaaagagctgtcatgattgatattcatcatcacaaaataatgaaaattgccttattcacgtaataacaaaaagaaaatgattttataacagtcgaatcgtacggcagatatttgttggcccctcctcttatatgatatcatagtcaacaagagaacaaagccacagagagagagagacactaaaaccctaatctcttactcactgtctctcttcttcaatcc

SEQ ID NO: 7094 - DNA, 3000 bp, Unknown
  misc_feature (1)..( 3000): cDNA_ID_1816590_gDNA_ID_1621126_Annot_ID_56366 3000 nt of promoter + ATG
ataagatttgtcggcttcgaggattgcaatattatattatttgaagcattattattagatgtgtgatcatttttgtggctttaaatgcttcccacgtcttctaaaatgaaaattcaaaggaatgttgataaaatgttttagccttttagggtctaatgactcgtgctagcattaagtattcaaaaaaaaacaaaaaaaaaggaaataattctggttatcgcagaatagtaactagtaaaacgtataaaaattaataaagacaaaactaagttgaaaaagatagagttccacaacaaacaatgacgccatcggtagctaagtaaagtcaatatctaactaattaaatagcaaaatagtagtagatgttaacgtaatcacattcgtaatattctgtaatgacgcaaactcggggatgcagcgacaaaagaaccattacctaacaaaagtaggaaactctcttgtaatttgaacaatcttccaatagtttgtccattatatttgttttttttttgtactattttattcaagaatcgaacatatttctaatttttctacatggaccaggtctcaacattatgaatcacatccgatattacgaaaaactctattaaaatgattactaactctatttttaactatttttcaaccatatagattatttacaaattcatacatatggaccgttttggtgtcttcagatacgacctatgaggagataagaaagaatcgaatcattgacaattattgtttgtgattctgcagaaactgaagagcacttcacgttctttgcacacgtgtatgtccaatatcgcacgccatattaaccgcggttccagttgcatcagaatgtgtccagagatgaaccacgtggaaaccggtttgtggaaaaccggaatcgtcataaacgcttatcggtttctgtcatgatcgtaataatcatgcacgcgtggatcaatcatctctcttagtaagttttgatgatattttgtagacgtttttctttacttttgatgaaactctctagaaaactttaaattatccacgaatatgtggagctctatgtagacgcataattgtgccgcatataaatgccgtcagcttaattttggcagttttcgttacacgaaaatggaacaaatgtaaatgatcaaataagagaggacccataacatcatatatgtgtcggcctttcgatcaccctctccacataaaacctcaaatggccatatttttttcatttatatatttcttaaatggagtaatacccattacccaaaaaagtggtcaccaagaggaattattctgttatagattccaccatcgaagctaaaagcaaatagatatattattgataaaataaaataaggatggctgctagaaatagaaacgcatgggtgttttggataatcctataatatatgtttggtaaatataatattacattttcgataacttattgtattaagttcatatttaaaaccaactcgtgctaagaaacgaataaatgccgtggagcataaatattagtaacttggtatattaaataagtgagacttacatttgtttttaaaatttggtcaagggtttacatttctcatttaaagaaatgtcataagataaactaaacaaaaattatagttgttgagattaggtagcttgaatgttaactcaaaagtttcatgctttttcattcgctcaattgcttttgttttgaatggagcaatcagaagaaaataagtttaattgttaaaacaagtcgccaacaatttttgaaccattgaaaacataaaccaatatttgaagcatttaagaaagattttttttttgaatcatggatgttgaaaactttgacttcgatcaaaggacaaaattttcaattttcaatctttatgatatcgtaaatcactttatttttgaaaagtgaatcaaaaaacatttgtcgaactctaatagcttgaactcaaaatttttcagtaatcataaaatctccagattttactgcattttttatttttacattcgaattaccttgtttaaatatgtagattatgtactttcgcttttgttttccttaaccatattgttttccttttaaaacatagatgccaaatattaagtttattttagtatcactttaaaccacatatcttaaacaatttagttacattaaattcaaacaatataatgcaagtaaatgaataaagatggggatataaaaaaaggtaaagaaaaacaaaggtaaagattgctttgactaaatatagccaaataggcaaatataattacagtccttcatcttttctctagctttagaatttgtcttcaaatatgaacataattagtatagtattttgataatcactttatagaaagcttgaattatatgaatcaacatcccacttatcaaaagccacacttttcatttcctttttcactctcactttgacattttaactttcctcataattacaaaaaaatattgtattaaatagtaattactaaaattaagaaaattcttagcatctgaagatttagttgactaatctcagacctaatctgtttcagtaaactctatatatgtaaattaaattatatctctgattataaattaaaaacaaaaaaacaaaaaacgtctctttgtatctcctcaaaagccgaaacaaaacctctctttctcacaagtaagcaacttcaaaatctggttaacccaaattacaaaaaaaacaaaaaaataaaaagtcgctctctttcttcttaaaaatctcaactttgtcgtccaaaactccaaatccagaaacccatacgcaaatatccttctacgtgtttgctcctttcacgtttttctcgaatcttctcgcatttaccaatcaaacagattctaaagttccaaactttttctttctttctcaaaccattctctgtttctcaactcttcactttccagtggtaagatttgaatcatgggtttctcaaattcttaacttttcacaaaagcccacc

SEQ ID NO: 7095 - DNA, 3000 bp, Unknown
  misc_feature (1)..( 3000): cDNA_ID_3049718_gDNA_ID_1621126_Annot_ID_56367 3000 nt of promoter + ATG
gctaatatttttgtcgtccgacttaaaactatataagcatcaatgttttggtgattacgaattagcaaaaacacaattttcaagaaggaaaaaaaaaatatttcacagtaatacattagacactcaatgacagctaactgtaaacaaaaatacaaaacacaaaacagtgtaatacaaaagaatttttatgtataaaatatgtcggttattaaatatccaaaaatgaaaatgtacttggatgttacagctatgagacaactactaagataaagaagaaaaaaaaaagggaagcttcgaaggtgggctttggctttgatacagacgtgcacagatcctttcccatgtaaaaactttgataattctgacgtgtaatttttccattggtaaaacatgttttgactttttacttacgtaagtggaaacgcattttgcaaaaaaatatcatatccctcgaaacacttatccattcacagaaacattctgatcctcgtttttagttaattcgtgtcgaactctcattggttcatatttacgagtccccacacctttagccgacgttggtgtctgtctggataaagaaagaataaataaaacgtttattttctataaaaatgttttgtttactattttcacaattttacgaaaataagagaaaatggaatttttttttttcgtgtggcggaaagtattgtagtattattttttctcttttgggggaatattatcaaagattcaagaatgtatttatttatggaaataaagaaggtgtttgctttttttgtgtgttcttttaaaatctttatataaaagaaaggtatctattgtttggttggtataaatacgcatgcgcattggctttttcgagtagaggaagagactagatagagtcgtgattttttttttcttttttaaattatcaaatggacgtgaaattatttattgaaaaataaacaaaaaaaaaaaaaaaagaagaagaaagagtctatcggatacgtcggatccaatctcccaatccgcattggctgtcgagacaacgtggatgtaaaataaggctttaagttcaagatcatttacctcaaagccactgagcctttaggttaataacgtcctaaattggctaatgtcttcttatgacatactcaaaatctatttttcttggtcgtcaaaattcaatactaatgatgtatatagatgcatggttcattcacaatatagtgtacttggttttttatgcctttccagtttcctataagtatgtatctatatagtatttgattttctaatccttcatataatcttaataaataatattgagttcaaacataagatatttctttatatatggatagagtctctagttgatcgtgtgtaggtgtttcatctttgaccagtggataacgatcagattatttaatttgaaacgttgtttccactttgtagagcttagactctatgtcactatgaaacgacttgtcaacaaagcattttgagccaaataatttaacatataacttggttaaaagacgagtttacgattattactattcttaaagttaaattatgtaatattttcagatttagttttcagtagtcacatgcttaagaacattaacatcagaatacaaccataatgattaatgagagatgtatgcaaaatatatcaactaatcatgttaaaaagggttgtaccattaattagtgatgcttatctgcttcattaagataataattaattttcaggaaaataaaactattgatttgaaattcttttacaaaatatcgatgaaattaaatcggcaataataaccaaaaatatacttttaattataaatgtgaaaaagggggacctcattatatccataaaaaccccagacaaataggtaagatacaagttgctaaatttaattaaaatcccaacaacaacaacaagattatctttaaaatacaatccatcctaaaccaaaaacaaaatttggtccaccatataaaaaaaaacatcatatgctaatatatagtttccatctaccaaactcaaaataaaagataagaagataagaagataaaaggacattaacgtaattttaatcacagcgtcccaagaaactaatccaaaacattatcgcgataaaaccgtacagagcaaaaagctactaataatattattattgaaataaaaatagatagaaaaaatagatcgttagaaaacgtgtatatatatatatatctgtgtattttgcaatatatcgtttttttttcttcgttatcgcattaatctctctctctgtatcttctcttgagtggagcgaatatccaaaagagttccgagtttctttcatccttcacgagcttatactttttcttctccattcgtttgtttttaacgatcaaaaacaacggcgaaggttagtctccggcggtttcttcgttgagatgtgacgacttttttttttgaacgtttataaagattacatattcatgtatttagatttcttttgttatgttaactgtttcattgatgttcgagttaattttaatttgactcaaacacggtaatttttttttaatcttgatctgttttgttacgtaatttttgggttgattttagcctgaaatgatgattttttttctttctagcttatgtttttcgtgaatcaatctttttcaatataaagattagtattttgttgaaattcattttttatttgattggctatgaggaatcagtttcttgaaatggaaatggtgatttgatttgatatgttcacaatatgaatgaagaagattagggttaatttatatatatgaaacaagaaagtttgtttatttaaggtaattgatatatttgttttgttgttattgccatttttaaggtattggaaataagacagaagctgttagctctgtttctccatggtgtcaagatcttgtgctaattttctagacttatcatcttgggaccttttagattttcctcaaactccacgaactcttccacgcgtc

SEQ ID NO: 7096 - DNA, 3000 bp, Unknown
  misc_feature (1)..( 3000): cDNA_ID_1816692_gDNA_ID_1621127_Annot_ID_56374 3000 nt of promoter + ATG
cagaggtcgtgtatcatcatagatcagaaggattttccttttatttttggagatttgaaaccttgatattagactttaaaagcaatccggtttggaaaagtaactttaaattgtaattttgaatctttttttctgatatattactaaggtttgcatcatagaaacagaattgttgcaaaatcacagacttgtgaattcaaactatgtatttgctgatttaaatcttctgaatttttggtgaccttgtttgtctgaactcttgaagtttaaattcaagacgtataagagagtcaaggttctgttctctgctctttttaccaaaaatcttcattttttttaaaaaaactgtgaattgtactgtaatttggatcaggtatggtcttatttcagtgtcacgtatcggatcatggtttttggaactgcagatatggactagaatgatgcaatgcagccccttagctcttggattggtcatgtaagcccttttcgtttctttatttgtgtttgatctttggtcttccctgacagctaacgtttttggagtcgagccaaaatcatttgatgatacttcaaaaccttgctacgtagagattcttttccaagtgatttgcttcgtctctgtcacaagttcttggatcatatgattcatctgatatgtggaatgtatgttttcttatcagattagtaatctttttctttacttgattggatatcactgagacacttgaaagctatctcatgtcattaggactcataaatcattgtcatccaaattgatggttgtaatgttcagagtctagctattgtaatggaaactgagatgcttgaaaccttttaaaggttgttgagcttcactaagttagtatatacactgaagattatttctctacgacagttgagaaatccaatacatgtaatatttgatcctagaaaaccgtgccaggtgtatattatttgaagtatgaatttatggatctttcttctattcgactttcagtttctttgcatactcatttggcttggagactttatgaaagaacttgctttggtaggaaagacagatgcataaaccgctttatcttggtattttcttggggtattttaaatgcaatcctcacggtgcattgccgattttatagtgtttgcggatatttcgtgagctttaggttgtaacttgccttatcatgtatgttcctttctctttttctgacagtaaccaaactagatgtactatatggtaggcatactttggtttcgtgatcaataaaattaatctggttctgcttggttagtactgaatcttttgtgttgatgatgttgtgatgtcgaaattgagatccaagtaaaccaaactataataaaagatgagtagcaatgaggctaaagcttagcagaagtaaggaaacgatgttgttttgtgtactgttgcactttttgtccagaggttggccagtgaaagctacccaagatacataaacactagatttcacaaatgctattaactaaacgataaagacattatgtgttttgttacttcaaatcattattgagtatgcaagcaagcactacactaaatactgaaacctctgttttgacttttgaaactaaccttccttatataaaacttttgcagcgagctcgtccgcttcatggcaaaatattaagctacaagaacaaaatagagaatcctttgttggattcaacattggcacatatctctcatatccgtttatatgatgctgctcctcatttgctcacagtattgtccaaaaccaagatccgtgtcataatcggattcttgcaatctgatctacaaacagaattgctgcgtcatggatcggtctcatcaacagtgccttcttcagtctcaatgttgttacctgcaattgagtctatttacagtgttcttgttgcttcaaacctccacacacatatcaaagtgtctacgcctcacggtgattcaatctttctcgatacgtttccgccatctcaagcttactgtaaccataattgaaattctgttatggttcatttccttcaggctttgtcgataaccagttccagttgtctgatgatgaatctttatccgcagaaaaactatttgtgcaagcctttaactctgtttaaagaaatggtcgatccaaacactgttgcattacaccagacgtggttgacgctatgacatcaaacaatttcagttacgagcacttccggtgagtgaagctaactggggattgttttactaaattttaggccggtttatttgcttcatgatttgccgatttggggatatgccttgttttctttatatagttactaacagaaagaaggaaaaatcttttggttcatgtgactttaaaggtggggcaatgattcacttctacaaagcgcaagtgtaaagactccttctatcgcttctttgcaatgaccaagctgataaaaaatttcgagcaccgttctgaaattagtataaaccacgatggttttgtctattgtaggtcatgaaacctgcattttaccaggaagttaacggaaaattttgtatctgaaacatgctttattattagtgatgggccttatcaactgtgccttcttcatccatcggatagcagaacaaagattgataaattatgcatgagatctctgttctctatccgatggagaacgttgggaagcctcatggagtctcccagtaagaggaagcccactcctaccttgaaattgtcttctttacaagctggagttttcttatttgcaccatttgacttatttgctaaagaaccaaaatttctaacaaaatcaccaaaaatagtgcggtgacaaaacagtaaataaatatatagacactatatgtgcttttggtgcagtgatgtatccacgttgccttcatcatcacgttgactattaaggccagcatgttgttatgactgaaatgttctatgttctttactacttgacaaatatatttatttgtttgttattattcgaatttttataatg

SEQ ID NO: 7097 - DNA, 3000 bp, Unknown
  misc_feature (1)..( 3000): cDNA_ID_1816688_gDNA_ID_1621127_Annot_ID_56375 3000 nt of promoter + ATG
cataattgcatctcaatttaggtgttgggacgatgtggtatagagtgtgaaggcattgagacgctgtgcatgaaggatctcacacttcgaagagacagtatgttttccctttcttcggcatgatgaccagagttgacaatggaatgcttttcgaaaaagttgactttggatatctgcatcaggtgcagaaaagatcattggatgggctcttagtcaccatataaagtctaatcctggtgctgatccagatgttagggttattttgtctcttgagaggtaattggcagcttgtccctgtgcatcgttgtttacttattttcaccaatgtatctgtttcagtattgagaatgaactttcgatccttgcagcttaaaatgtggaatagaactcttggaaattgaatctaagaagtctctcaaggttagcaaatcgtcttggaaattgaatttttgtttacttattttcactctggcaattccttctatcatgtaacaattgttaattttctctgttgctttcaggacattgtgacagaaaatacgtttgaaataagtgatattattccgcccagtgaaattggtgttacattcgatgacattggggcacttgagaatgtcaaagacactttaaaggaactggttatgcttccttttcaatggcctgaacttttctgcaaggggcaattaacaaaggtggttgtcttatccgcatttggttttaggaaattcccatattgtttcactatgtcctgcctcgaattgatgacagatctgtgaaggaccttttatttgtgtgtaccagtatacatgttcataagttttgtgaagtaatgacgatattagtaatactagctgataatttggctttcctcaaaaaatttatctcctataatttagatgttaacgttatggattggtggcttcctaatcagtctgctcctgtacttctctacacagccttgtaacggaattctcttatttggaccttctggaactggaaagaccatgcttgcaaaggcagtggcaacggaagctggtgctaacctcatcaacatgtcaatgtcaagggtaacagaatatccttgaaaagttggactctaccaatttatacacggaatctcttgttcaaacttgtgttcttctcaatattgcagtggtttagtgagggtgagaaatatgtcaaagctgtcttttcgttggctagtaaaatttccccaagcattatctttttggacgaggtaattcctcatggtcaattcgtgggcgaatcttgcttgtagtcagagcattgactgtcttacaatattttactgtcttgtaggtggaaagcatgctacatcggtacaggctgaagacgaaaaatgagttcataataaattgggacggtctgaggacaaatgaaaaggaacgtgttctggttcttgcagccacaaatagaccttttgaccttgacgaggctgtcattagaaggttgcctcataggtaatttatatatagcttccttgttggactaagctttctgtcaaattgacatgtcgtaacaagtttttggtattggcttctgcaggttgatggtgggactaccagatgctcgtagtagatcaaagatattgaaggtgatactttcaaaagaagacttgtcccctgatttcgatattgatgaggttgctagtatgacaaatggatattctggaaacgatcttaaggtaaaattcctagtaattccttttaaccttttgctatggtctgacgaaatgataagtaatgctcatatatatccatgttacatgctcttttggtgcgtgcagaatctatgtgttactgctgcccgccgtcgaatcatagagatagtggagaaggaaaaaagtgtaagtagtctttgtgttaaaccaagaaaactaactttatgctgcctaaaactagtctatagaataaaaatatgcttatgatgagatatattatggtaggagcgagatgctgctgtggctgaaggcagagttcctccagctggaagtggaggttctgatctccgagttttaaaaatggaggatttcagaaacgcactcgagctggtatgatttttgcttgtgagctttcttttctcaaatctgtctctggctcagagaactgtataactgttgtcgatgttgttgaatcaggtgagtatgagcatctcatcaaagtctgtcaacatgacagcgcttcgacaatggaacgaagactacggggaaggtggatccagaaggaatgaatcattcagccagtacgtgtaggattgagtctacttcagaagcagaatgtgttgtatataatatgttcacgtgaatagatagatagtcataaaacagtataaactataaaggtatagtgagttctgacagaataacaggttttagtcggagttttgatacaaacctgtcaggttcggtcactggtagtttcaaatgacttatattcttgtcgtagtcacatttcaacaatttgttttagcttaaatagttaataacggttcacatttcaactaaaccagtcaggttcggtctctagttccaaatgttttttcccttttcgatcaatcggacgatctttgctttgaaagcatagaaacacttgaagaaatcaagaaccgtatccaaatgaagcttcatgtatctgatgacgactttcccaagtggaagttgcgttcatgtgaccatgtcaatggatgttgtttataatcgcttccagtaaatcgaacgagtcgactaaaccgaattatattgatcatccggtttgttttgattgaatttgagcgacacgcagttcagctccagaacttgaattcggcaagcagtaacaccgatgtataacggaggcgaggcttcttcccacacagacacagaggatataggaaactgcgaagcgaaaaagcttcgtggctctaaaggttagagctttattcaatttctcgaattgaatcagatttagcacactgtgagttatttgcattgtctttgtaatg

SEQ ID NO: 7098 - DNA, 3000 bp, Unknown
  misc_feature (1)..( 3000): cDNA_ID_3049777_gDNA_ID_1621127_Annot_ID_56380 3000 nt of promoter + ATG
agtgtagagcaacgaaagttaaggaactattttatgggggtggctaatttaaataccaataatatttgggccatagtgtagagaaacgaaaattaggggagattattagttcatgatccagagtctccagactctttcttctacggaggccatttgaaaatgtatggatctcgtttaatgaaaatgggccataaacttgatgactttatttgttgccctagaaatttactaaaggttttaaaatttaaatggtgtcaatttagaacaaggtctactagataggcaaattttaccatattaattcctaaatcgacatatgaaaaaatcgtaaataaaagatgttcatatatatattgcctaataaattgaaaattcggtgatatgctattttacataatagtattgaaatcacttaatatattctcaactattcttagtgggtaatgcataaatcttctatcaaaatgatgtgatgttcataaatttgcaacttgagaatatgatcctttcattactcaaggatccagctcacaccacatatattattcttgtatacaatgtggaccatggtcctaacattttaacataacacttatgaaaataaaaagaatatgctatgtacaaagaacccaacttcatatccaatatcaaaatttgtgtaaaataacccaattagtttatttggtatataattctcttgagatcaatttatagtcacaggcactctaaaaaattgaaacccaagagggtcagattaattgattaaaccgttctaaatcgaagttaaaccaattatgtttctgagtaaattatttttcctaaacaaaaatgaaccgagatgataaaatgaacccacaacataaatttaagttctcttgaatatcaaaaaaacacaacaaaaaattcaaagcggatatatacagttttctttcataattcaataaaccgataaaccacaaagagaaacaaaacaataccaaataactagaacacatttatgatttctttgttaaaatttgagtttaaatttaatagtatatatgtgtgtaagttgaagaaaacaaattataaagatcatacatatgacaagaaaagagttagatagagtgatttttaatgaaactaaaataataagtatcctttgttggaccccaaaggtcagcaagtgagcttcaccacaagtattatattccaaagaaaagcattcccctcacacgaatctaaatataatcttatgcaaaagtagccaccaacaccaaaatatcataatcaaacttttgggagacttatgaattactatttcatggaattattaacatatagagcatgcatacggaccatataaaataaatttaaaagtagtttcaccactagttgtgcatgtttaaagggtttaagtggttctcataaaagatccaaatcttgtttccttttacattttgcaagtgtgcctttatcctcatgcatcattatatacaagctttgttataatctcagaaggttacatcttacaataataatattaaaaaaatcgagcaaactcaagtgaagtgttacgtatagtatacactatactaacaagtcgctttatattcattttaaaatcaaaatcccagcaattcttatgatagttttcttagattatattattactcgcatattattcgattaacatatgtgaagctttattttgcaaaatgataagctatctagctacctcaatatatattcgatttgtaatatattgttatctcaaattcttggtcgtctgagttacgtatgcttttaattttagctacccgaatatttaaaaaattaaatacatgaatgtataatatacacatctattttattttatttttacgacaacaaaatcacatattaaaatacgtatatatgaaatacttgagtcttgatcaatgacagttttgttttgtttttaaagggtacaatgacagtttcaacatctagtgtttttgttagttaaaagttttaacatagagttttactatgcttttggaatctttcttctaatgtgccaactacagagaaatacatgtattaccactaggaatcggaccatatcatagatatcaggattagataactagttctcgtcgctatcacttcgcattaagttctagtaattgttaaagattctaattttttactaaacaaaaactaaatcaacatcaaatatgcaaagtgtgtgttgtccacacaagtgactcaaagtatacgcaggtgggattggaccatattattgcaaatcgtttccgaaccactcatatttctttttttctctcctttttttatccggagaattatggaaccacttcatttcaacttcaaaactaattttttggttcagtgatcaaatacaaaaaaaaaaaaaaagttatagatattaaatagaaaactattccaatcttaaaaatacaaatgaaaccataattttaatttatacaaaactatttaattagctaagggttgtcttaacgtttagaaaataaaaaattatgattgtctgtttaaaattacaatgaatgaataaaaaaaatatgcaatgaatgaaagaataaattttgtacatccgatagaatgagaaaatgaattttgtacaaaccactcaagaattcaaaacaattgtcaaagttttcttctcagccgtgtgtcctcctctcctagccgccacatctcacacactaatgctaaccacgcgatgtaaccgtaagcgctgagtttttgcatttcagatttcacttccaccaaacaaaactcgccacgtcatcaatacgaatcattccgtataaacgtctagattctttacagcctacaatgttctcttctttggtcggccattatttaacgctttgaacctaaatctagcccagccaacgaagaagacgaagcaaatccaaaccaaagttctccattttcgtagcttctttaagctttttcagtatcatagagacacttttttttttttgattagaaatg

SEQ ID NO: 7099 - DNA, 3000 bp, Unknown
  misc_feature (1)..( 3000): cDNA_ID_1816662_gDNA_ID_1621127_Annot_ID_56382 3000 nt of promoter + ATG
gttcctcgtaatttagaaattctccgaccattaagttcgtcggaaacaaaatgttttcttgtagaatcccctgttctcactttccacacagaattttttcgagcaatttaagttagcaacttcatgaagttctttaaacctagagataacgtttttttacactcgagaatttcctgaatatggtaaattcaaatgacaaaatcttataaattgatagaaatctacaacaacaaaagggcgcccggtccaagtttcttgtaccaaagctattgacacaagttctaataaaaaatcctacaaaagacaaaatatggaaatatttattgatatttgatttacacataagactttaaacctttgcggggtatcgggtagccaactctttttataatgttgaaaattaaaatgaagaaatagaaagtcacaatctctaaattatttgttttgtcatacaaaagagattaatgtgactttgtagagaatatttatacgtacatataagcctaagcatgatcacttacgctttataatgtttcaaggctttgcaccactcccaccgttgctaccatcttcactcacctttgcattgatgacaaatctcgtttcaaagtttttagtagtaaaaagaacttcgctttgtacgttggtaccgactcccataacggaaacactaggttttccagtgttgttagtggcaagagttgcttcaccttcacgtagaggagctggtcttaaaacgccattaagaggagctttggtgccaatagtggctccactttctttgatgggagaaactcctacaatgacaccaataacaggagttttagtgccattagtggatccgccttctgttacatgagacggagcaactcctctaatgccaccactaagaggagctttggtgccatttgtggctccaccagtaacattgttagtagagtttccaattggctgttttttattcatgagtttggtattattggccattcctccgatcttacgtgctccaacattaccactcaaagctgcaatgaataccaccacaagtaacttgatgatattcatcgtttttggctctaatttttttttataatctaagataatattttgtttgtgtagctttgagattgtgttcctaatatcattcccacatgtatataaataatgtgtattttgtacttacttagagagaaatacatagatgtgaagagagttttatacgttttaataatcattcattatcttatagtgacaaataatgactcttcttcgcttcattgaaatttcagagatgcaatgtccacaagaatcatgcacacttgagccgtttaacgtgtgttgattcagatggatgactatgcgaaagtatagctacaaaatcacctaacagtcaaaatttaaaataattttccaacataaatgtttcgtatcgtggaaagtataactttcttttaaaacaaagacggtgattgcattaactcgtaccaaatcaataccatgggcaacttagagcatgtccaacggttaaggccctaaaaatttctaaaaagacaaaaaaatagattttattttaatagttataatctatttttttaatacagatagaccagtaataaaaatacatgtgttattttgtttgtgagctcgtcccttacttacgggttttaagagtttctctctcatgttcctactaacttttgattattttttactttttttattgttagggcctcacctaaaagcctccggttggggatggtctttaatgcattaactttcaaatcaatatgggattgcattcactttctttttgggtcttcaaaaagttcaaaaacctcaagtaatttccctacttaaattatccttaaaatctgaaaaaagagattaatcaacttcttaaattcttcttatggttttggtttacttttactttttttggcatatgatttatttattaacattgaaaataaaataaaaacaacttaaaaagttgggtttaagtttttttttgagctttaacacttgaagaatgaaatcataagacttttaagttataaaatcgaatatggacttaaatatatccggatatccgttatccggttcaaattctcggattattcgtatctatatctttattcggactatccgtcgttttactatctgcatatgttggccggctatccgtttgtttggataaaaatccgtggtaaaatatattaacctcatgcgtactttggtctactaataattagactataaatattattctaattttttggtgtgttattattggagttgtctcctaccaaacaaaaatgcgaaaagagtcaattttgaattttgatcattttgataaaaagtaaaagaatcgttttattaaatatttttaaatgatctttttttttcaaaatcaatcaaacccgttatatctagatatctattaaccggcctaaattctaggattatttgtatccgtcgtttaactattcgtatatctggccggctatccgtttgtttggttcaaaaaccggatacggatatccacggtttaaatagattaacctcatgcctacctacttttggtattctaataattagactattctaattttctggtgtgctattgttggagttgtctcctaaaaaaaatgcaaagaagagtcaattttgatcatttaaaaatatttaataaaaacaattcctttagtttaattggtatactgggccatcaatgggaccgaccaccaagagttgtgcaagcaatcggattatttagcgtttttgatgagttccagtaatctatttgcttttctcaatagctttaaaatggtgaattcgaatgaagaagacgaaaggagaattcttgacgttgaagaatctcttcttacacaggtttcgacttaaatctatcaatttgcgtttgccaatttctctccatttatttaccccttgacatctttctaattatagctatactttcaatttttagaatccactatg

SEQ ID NO: 7100 - DNA, 853 bp, Unknown
  misc_feature (1)..( 853): cDNA_ID_2124745_gDNA_ID_1621127_Annot_ID_172362 3000 nt of promoter + ATG
ttcaattagaagagatgggcgattgaactaaatcaaaactaagaccaaaccgatttactcaattatttttgttgtttttaaaatcgtgttgagaaaactccatatcaatgacgagatagaaatcaaactaaaaatgacaaaaatatatgtttttcctccccaattctaatttacatttagactttaaatagttagcagcacatgatttgattacatatttttattatttggattttcttttctattgaaccaaaatatttcgatccaaatattggataaaattttggtttcaattaggttaatattttgttttcatttataaaattataaatcataaatcaaaaacttaaatgcccatctctacctaattacaataacaaggggaaatatctaatggccggttatccgacctattgataagctatttttatttaagctttcaatgcttgttatttgtttgcacaaatgcgtttgtctccgttcgatgggtatatttcacaaaactagtttatctaacaagttacaatggtttctttttaaatgtgattttttttattttacaatgttttcccatgtaaacttaaacacatagattgaaaactagtgaggtcttatgcaaaatattactcgccgtgcgctttattgtaatcggcctcaaaaataaaacatctttaagtactcaggtggtgctagtgtactcactttgtcaccacccatattcgaactcgcatgttgcgtgttgttgacaaaaaaaagaatctaggttgcattgtggtactttagggtaaatatgacttgtgtagaagtgttgaatcatcgatttacccaatccggtcaagattgaagacccatg

SEQ ID NO: 7101 - DNA, 3000 bp, Unknown
  misc_feature (1)..( 3000): cDNA_ID_3049760_gDNA_ID_1621127_Annot_ID_172360 3000 nt of promoter + ATG
aagataaccgcactatattcaacattaaactaaagagatataatctttaatattccctggcaagatggaagtatgacatcttggaattgaagaatttgtgtgctcaaagggacttttatgagaaagcaagagtctcattttcctccatgtagaaagacttgacacctttcataaacttgattatagagaaatgaataaaggtgttgtcctcttcttcaatagccatgtgaacttgagagttcttattttccgtgagtggctactagtggttaggcactcttatatgagtcttgggttgggaacttccttcaaatgcagggtgttgggaggttttcatggtctcaaatatcatcaaatcaattataatcttctatgggagatgaaagataaagagaaacttgtgaattcttctttgtagttctataattcctccaaatatgctgaaaacactggccattcggttcgagaaaacattatcttcacaagatctgggcaccaatcatacacagtaaaacttcgatttcggtatgttatgtagtgaaaatagacttcttcggagattagcagcttccatggttgacggctctcatggttgaacctaatcaagtatatgttgaacaaaatatttatgtaaaattagatttataaaagtttcataagttatgtttgacatttatatggattcatcccaataaaagttatgaaacacacaacccacccacatatatgtataaagaatgagaagagtaacctttttttttatgagatgtatcttgttcttttcttctttcaaaaacttgtttcacaccaaaatcctttgcatatctctttttctaaactttttttttccaaacaacttgattctatatagtacataacagaattggagatagggtttttgtgtcaccatcataaaaagactaaaaggacctttaggataatatggaatttatactttttactgaaaaggaagaattggaatcttcttaaaaccaaacgtcccgctctttctgttattacatatttgttgacacaaaaaaaaatgatcaatttccaatcaaaagtttttattttcttatgtattaattagtttacttgtttactcgtaagtttgccgattttggctcgtgaattgatatttagtaaatctttataaccgtgcaagattccaaagttgtttaaatatatatggaaaccaagcaaatcgggacttccgagtgccatctgaaagtctagtcaagatctgagttccattgtctcagagtgtattttcttccacattaatctgattaatatgaggcaaattaaaatttgacggatggtagagagttccattacatatagagccatccatcgtggtttctcgtgaatatgttgcgtgtaagaataattagtttgccgatacaagggttacggaggacatagttattgtctaattagatttcatttgtaacatgattatatcaaatatatctgattatgtaaaaaaaactatttatattaatctagtttagtagacaagattcatcgattacttcggaggtttggtcaaatgactttccctatttcatttacaaaagcgtatacgatcgctacaagcctacaagtgtaacgagagatgggcgtttcagatcctatttagctcgtggtagtcctgtggagttacacacacgaattgaagatgaaaagaggagacgagattactgtgttggtctttccatagattgttatatttgtgtttcttggagcgattggactctgtattgatatgagattactgttttggtctttttatagattgttgtattcttatggacacgaatcaaactttattatttattcaaacttttgttttcaataattttttcgttcaataataattttagtcaaaattaataaatttcattttaataatttttttttaaatttttttactgttatatatatatatatctcagctctgtttgtctttggttcttttgcacatccagtcttttctgttacccaacattaacgatctctttggaaagtttggtgggaggtcctttggaacatttaggccgtttagggcattggcttctttattttccttagcaaactctgttttacactttattatggtttgttaccttttgatgtggtttattttatggagagtttacacttttctctagattatgtttccaatatttattttttgttctcggacttagcttccctcgtttgggctttagactctggaaatatctctgttttccgccggcttatgtttgtatctcatgtatctcttcaagtttcttataaatataaccagatgacaaaaaaatatatatatatatctcagctccccgtttctgctgtagctcctttcaactactcctcccttctccacttatcaatcaggcccctttaaaagataattttcacgcctaaaccatcttttaaaacatcgagtaactaaccaaaataaattgattaataacatatgcattctagttgaagttaaaaaatactactatctctattttagtcttaaaaactaacaaacataaaaaaaaaaatgaagttagtgtgttccgatgaaacagaccaaaacactgtaaaagaaaaaaaatgaaacataccaaaacaaatgcgtttaccgcattaacttcctaagaaacgtcttaataaaagactcacactcttaatccccctagtcaaaccattcaatgatcttttaattctcttttgtagtattaatttgattccctaattaaaacaaaaaacgttacacgtggacaaagacacggtgtcgtttttcatcagattcaacgtcttccttggtgacttgccttcttcttcttctacgtctctcacatgtcaaatccttacgatttcgatttctcctgaaaatctcaatttcaacaaaacccttaagatttttcgattttggattcccaattctcccggagttctgatgcagatcgccggagataagtaatctcgagtttactaatg

SEQ ID NO: 7102 - DNA, 3000 bp, Unknown
  misc_feature (1)..( 3000): cDNA_ID_2992345_gDNA_ID_1621127_Annot_ID_172357 3000 nt of promoter + ATG
gagaaaagtgccaaaaaggtcagaagaaaagaaaatgagattttttgtaaccttattaatacaattagtttaacgtgattagagagagatttgaaaaggtaaaaaagtcaaagctaatgactcggtcgttccggtagacagtcaaccgatctacacatctcttttgtcaatacgtgggagccctttaaggcttttatcactattattcttattataacatgataaaataaaataaacatgatctctctttctttctgtctatttgtttctcttatttctacgtgtgtggactcaaactaaaatttagtttttattatcttctcgaattttaaattataaggtcatgccaaataaggtgacacgtttcttcactatctagttattttagtcatttgacatagcatatcagtttttttttgtttttttcgttggtggttttaatcatcaaactttggcgatgaaaacataaaaaggaaatcaacagtaaaacaaatatcaaatataattatgatactataaatttgtaacattactatatgaacaacataactaattcaccaaccaaattttttttttctttctaataaggtttattatgggcaacacatgttatcacgataaatataatatagactatttggatatgtgttattagttgtattctttttctttcttatttttttttatttttatttttttctatattttcattaactattattttataaggtaaaaatataaatattaaaatacattcgtctgctaaaattatccaatgtaatattgcaattcaaaattaattgtttcagaaaataatctcagtagaatgcgctcttataaccgcatgtagccaaccaatgagcgattccaatgattagtaacactaaatctcttcgacttttctaaatttgttgaacctgtttcgatttctttatccggtttgtatagtaccattttttggttatccttcaacaaatttaacaaaaaaaataaaaaaattgcatttacattatgtagtagtctaataaaatataattatagataatagaaaagtcaatagttctaatatgataacaacaaaagaaaatgtatactttaaaatctgaaaattaccattcttttatttgttatcccaaacataagccatgtactataattaggttattgtaatttattataaaaaaaaaagaaagaatattcctgtacttcatgatttctttttgtaacgaagtacataaaattttcaaatcacatgtggtaaccatgatttaacaaaaaattaagtcggtgacaagcaacgaaacataaataatcgactttgtcaagatatgtataaaaatcgactttgtatttagagaacaaggtcttcattatttttcttttttaacattagagaaagagaactaaaggtctacttcaagaaaacaagaaactaggtgcttagctttaataatatatcaaagaaaaatgggtcaaaaaataaattattacatgagtggggcccggccggccacggaagtaagacctaacgaccagcgcaaccggtcaccagtcaagactattagaagccgggccgtcaaaatcgttgactcggtttttgtttccaactgtttttgtattttgttaaaaataaattaatactaataaataagctgaaaaaaaagaaaagagaaaaggtataatcacgtggaacgcgccgcagtaaacggagcggtggatcaaacttttcgtccgtttgatcaaacagaagagaactagtcaatgctctttcttcatatcacaatttaatagtctcaagacgattacgccacataaccattttctcgtgatttcgacatcaaaatttaataaaaggaactgattgattggtcatcatgttacaagtgtcaaatgagctaatccgttttacagtggcatagtttacgatcaatttacaaatttttggttttataacatacttgtagttaaaactatttataagctatttatagtgagttagcttataaaaccctattcttttatctaaaattatgttttgactcgtttcatgataaaattttatccttttcatcggaataaaaaactttattatttatttggcaaaataattggtgtaaaaattatgtatatgttaataacaaaaaatattaatctgattcataatcttaaaaaagaaaaatttcttgaaataaactttagacattgtaaataaaaaaacattatttttatataatgggatgtttatatgtaattttttataaaaaaataaaagttgtttactagtaatccgattggctttaactatcgtcgccaaaagaataatgtagaactgactttgaggtaaaactaaaagaaatttgtaagataatagtcacattaaatgctaaaattaatacatactgatatatcgtataaaatttatgaaaactacaccttaacctgaatcatacactgtaataaaaaaaacaaattatatataaaccctaaaaactaatcataaatcccaaacggtgtactctctattagctttgaaaggattgcccaattgtttgttaaaaatttctaataatagtacaatgttttgtttcatttttccttttcgtcaacctgttacccaatagcaaatgaagtttttatgtgtgtgtgtgtgtgtgaatttccatgaaaatgaaacgggcttagaatcccggtgtattatgggtcgggtcgtaaccgggcaatgacgcaggatctgacgtaaaactcccaagaatttttttaaaaagtctccggaaaataaaatcaaagttcattaacttaaaaagaaaaaacaaaatcggtccacgtcccaaaccctttttataggagagtcttatgttctggcagaagacttcacagactctttcttaatctctctctctttcaaccaaacccctaaacaaaaaaaaaatacattttctgatctctctaaaaatctttctccttcgttaatctcgtgatctctttctttttctatatatg

SEQ ID NO: 7103 - DNA, 3000 bp, Unknown
  misc_feature (1)..( 3000): cDNA_ID_3049763_gDNA_ID_1621127_Annot_ID_172356 3000 nt of promoter + ATG
gtttagtatagtatatagaatattaattgaattaaatgaagaaaatgcaaagtcatggacttataaagccgccgtttattatctaccatttctattttggaagttataagttattcatatggtttgcgtgaggtcgagagacgagaagagagacttctctacgacttttgaaaagagagtcgttgagtcacatgtctgcatgtggtcatacttgttttaacctatccgtcttctttaggactcttcctaaatcaatacattttaaatggttgttacaatatggttggtaaaagaatataagtctattggtaatactaatatatagttgtcacgttgattaatagcagtcgtttttattcagtatggttgcgcgtggccactatttaattaaagatctaatcactcttgaaagtaatcaaaattttggcaaaatttggattatcaaatgctgaattttataagaagtttgagatagacgaaaattggatctataatatgccagactaataaatgttggtctaaaccttactacgaaacgattaggtttagctgaactacatgaatgataaatctgttatcgaatataatttatagaaaaatattgtataatattacgactttcattttatgataatggttattggttcctagtatggctttgtgatgaacgatcatttgcatcatcgtaacttgcttgtgtgatttaggttggactgaatactaaaagacacatgttaacgatatcattggggcacaattgattggcaaggatctaactggattgactgctatagacaacataatcgttggaattggtgagaacccaaatgtgcatgttattcttgtttgtctctttattttaaaacatcaagagccattattcaaaccttgaaatctaattatgatcaaacagcttgcaacaagaaaaagaaaagtagattttgaaatgccaacaagaatacggtaattttgaatgtcattgaacaacttttggggataaaatttcataccaaataacaaattaaaatctgatgcaaagacgtgactaattaaagttttcatagctagctaggcagtcagagcaaaatatcaaaatcataaaatggacataagaaaggaagagaccaagaaattacttcatggttctttttgcccctcttctttagccttcgagacttctcatcttcttaaacaaaataatcatgtttaaacaatcacaaaagaacataaactggttattttgaaaattttgatggctcaagaactttgggaactgttccgaaatgatttaataagtacgtggtgatgaaattgagtatattaaaacatctatctgcacagcaagaaagacaaacaactagaaaaatattttaaatgaagcaccaccatcttaacactaagcttaggttaggtgctttcgttttttttttccatttttgagcttaacttatagcatgtcaaaattctcatttgatggttgtttttgtttgtaattgttcagattctcatttacgtatgtgtaattgctcaaatccttatttttggagcattattgcgacactatgtcaatcatatacctgagactcatgtggacatatgatattatcgagttaaatatgggtattgtttataaattgtatgatatatgtagttcatatgattattatttttgttaggatcatgtgttcctgatgagattgttatattgattattgcatgcatggttaatttcaggtttgtggcaaacgtttatgaaacccttatccaaatagaatgagcttttaaggcccatgaaaaactatccaaacatgattttttttgtcccttttcttcaaccatgttattttttctcacaaaatttgaaaatctattttggaatctaaaaactatttcaaattttggaaattctaaaattgtctaattaaacagttataaaaaatccgaaagagcaagtaaattaagctcgagtgtagcaacttaccaacaaaacttagtgggtcatatcttatcaacacgtcaacgatcaaaacctttagcctattaaattcaacggcttagatcaaaacgaaactaggtgggtcccacttttaatatcgtggctgcataacatttcctcgataactgaagccgttgtggtctttctcagaatctggtgcttaaacactctggtgagttctagtacttctgctatgatcgatctcattaccatttcttaaatttctctccctaaatattccgagttcttgatttttgataacttcaggttttctctttttgataaatctggtctttccatttttttttttttgtggttaatttagtttcctatgttcttcgattgtattatgcatgatctgtgtttggattctgttagattatgtattggtgaatatgtatgtgtttttgcatgtctggttttggtcttaaaaatgttcaaatctgatgatttgattgaagcttttttagtgttggtttgattcttctcaaaactactgttaatttactatcatgttttccaactttgattcatgatgacacttttgttctgctttgttataaaattttggttggtttgattttgtaattatagtgtaattttgttaggaatgaacatgttttaatactctgttttcgatttgtcacacattcgaattattaatcgataatttaactgaaaattcatggttctagatcttgttgtcatcagattatttgtttcgataattcatcaaatatgtagtccttttgctgatttgcgactgtttcattttttctcaaaattgttttttgttaagtttatctaacagttatcgttgtcaaaagtctctttcattttgcaaaatcttctttttttttttgtttgtaactttgttttttaagctacacatttagtctgtaaaatagcatcgaggaacagttgtcttagtagacttgcatgttcttgtaacttctatttgtttcagtttgttgatgactgctttgattttgtaggtcaaaatg

SEQ ID NO: 7104 - DNA, 3000 bp, Unknown
  misc_feature (1)..( 3000): cDNA_ID_3049771_gDNA_ID_1621127_Annot_ID_172352 3000 nt of promoter + ATG
cattagaccattttcaatggttgtctctatttgttaggaaaaaaaattaaaatctctattttagagataaataaagacaaaaatagagtatagaaataataataaagatgggttggagatgttttaagcggcttttttgtagcttgcaggttccaatctaagtgagaacgacttttttttgttgggtaaaaaaaaattaaaaaaattgttttcacttgattgagacctgtgaagcttaggattttgattggtagcacatttccaaatttgaattgttttgttggagaccaataagaaagaaacgaatctgttgaaagttgaaacatacaaatttaatagatatataattgaaatatttgtttacaacttgtttgacaaatatagattgtttaccatcgttcatttaccaaatggatattttgaggaaaatatctttcttttgggaatcatcttactaaaataaaaaaaaatctaatcgtatgtctttgcttataatttctttttcatctttttgtcaaccaacgacattaaacttgtttttaaggttaattataaagattttctaaatataacaattgtatatagtatacaattgtatgtaaaaaaaaacaattgtatagccgtcgtgacgtagtaaaaagggatattaggatcacataaattctttatataaggaatctttacgtaaggcaacattattatctcctctcccttattgagaagggctcatggtcaacgttggttatagtcttatagatgaaatggggatctaagacgacaacccagaatccgaagacagttcaggaatctaggcgacattagtataccacaatctgtgtgcagacactggcgaagcacagacagttgaagtattaaaacaatttttaaatcgtttcgctgcaaattatccaggtttatttaaattatataagctatatttcatttagtactttgtatgaattataaggaactaatacttaaagttataaatcagctgaaagaatttatgatgatataagcaattgaaatggtttgatgtttattcatgaagcttgaagaagaattttcgcttcatcaaaagaaaaaaaaagtgttgatgtcgaaagaaaaaagaaaaagatgttgatatgtatatatgtactgtacaagttattgaacttaccaaaagtttctgaatgtccaacactaacttgtgttttgtacttttgatttctctgccttatgcttatgtacatgaattcttttttttataggttagcacaacatagagcaaaataagctctatttcatcgatataccgagatggaaatacctagtcaagaaattcacatcatgattgataacacaatatcgaggcgcaaagagagaaagactaacctcgcagatgccgaacccattgtcctgatgtctgttttgagtagtctccatgcgggatatttcagaataagcctttctctatgtagccaagcattgttgtggaagattatggtgcatttgcatagcgaactcccgtctatggcgtattatctcctgtggtacctagcacttgcaacacaagtatcactctgttttttgtatgccttcaagtgtatttttctctttgacatggtgaaggaagagttctcgcactatattggagtgaactatctttacgctccatccatttcatgtcttctattgcttcaatcagctcctatgatagaaccacacagcgttttatatcagacactattctggatctttgctgttccagtcttgactttagacacaaagctttatggtcaatggttcacaacagagaaaaggtttttatcgataatggcaaacccggcaagccaagtatcggtaatcgcaaacctagtggctgcgcggggagcagcagagatgggttggaaagagtgtgctctatgcttattctcacttggaatggttcactatttggtcatctttgttacactttatcaacgcttaccaggcggaaacaatttcccaaccacgctaagaccggttttcttcttgtttttcgctgcacccgccacagcaagtctagcttggaactctatttgtggaaactttgatactatagccaagatgttattcttcctttcactcttcatcttcatatctctggtaagtttacatctttacgatacaccaagaaaccgaaaaccgacatttttacattctttttcttatacattttcaggtttgtaggccaaatcttttgaagaagtcgataaaaagattcaatgtcgcatggtgggcttactcgtttcctatcacatttctcgctttaaactcggttcagtacgcgcaagaggtgaaagaccatgtcgcttcggtcttgatgtttatcttctcatccatgtcagttttgatattcatcagtgtgatgttactgacagcagcaaatagcaaaagattacttagacgtgatcatgtcctctggtcttctactggtccaaaagacaaataaacatcgtgtatggcgaaacttgtaaaccaaagctaattacccataaaataatgtatgtaaaagtagttacaaaactagctggataaaaaatttcagttggaagatcaaccaactacagactactatgtaatacaatttgtagaaatttctactctaattactatctgacctgatatcaaacccggttcaaatactataaaaccggaaatgctgaattgaaccgagttattaccggtttaaacacagtaaaatcaaaattcacctgactgtgagaatcaactgatcaattccattccactgactgattcttccaaatctcaggagtcaggcctcagaggctaatttggtttacaatagacacattttactatctgaattgaaccaaatgatttccggttcaaacatggtaaaccgaagaatgtccattacatcatcatctgaaccaaatttacctgactctaattttcaaagctagaggcttttttagtttttgatcgctgcaaatttcgccggcgacgacgatg

SEQ ID NO: 7105 - DNA, 3000 bp, Unknown
  misc_feature (1)..( 3000): cDNA_ID_1816651_gDNA_ID_1621127_Annot_ID_172351 3000 nt of promoter + ATG
tcaggagtcaggcctcagaggctaatttggtttacaatagacacattttactatctgaattgaaccaaatgatttccggttcaaacatggtaaaccgaagaatgtccattacatcatcatctgaaccaaatttacctgactctaattttcaaagctagaggcttttttagtttttgatcgctgcaaatttcgccggcgacgacgatgatccgatcacgaagtgtcttgttaattttcaggaaggtgttgtatcaatcgtcttgtcttaagtgtttattatgtgcaaactctttctctacttcagtttcgtcaagcttgggttttcgagcgacgaacaaagagttaaaccagatgataagatcggggtatatcgccgaagctagagatatttttgagaaactggaagcgaggaacacagtgacatggaatacgatgataagcgggtatgtgaaaaggcgtgaaatgaatcaagcacggaaactgttcgacgtaatgcctaagagagatgttgtgacttggaacacgatgatttcggggtatgtttcatgtggtgggattaggtttcttgaggaagcaaggaagctgtttgatgaaatgccttcaagggattctttttcatggaacactatgattagtggttatgcgaagaatcggaggataggtgaagcgttgttgttatttgagaaaatgcctgagagaaatgcagtgtcatggagtgctatgatcactgggttttgtcagaacggtgaagtggatagcgcggttgtgttgtttcggaaaatgcctgtgaaggattcgtctcctctatgtgcacttgtggctggtcttattaaaaacgagagactttcagaagctgcgtgggttttgggtcagtatgggagtttagtttcaggaagggaagatttggtgtatgcttataacactttgattgttggatatggacagagaggacaagtagaagcagctcgatgtctgtttgatcagattcctgatctctgtggtgatgatcatggtggagagtttagagagaggttctgtaaaaatgttgtgtcatggaattctatgatcaaagcttacttgaaagtgggtgatgtggtctctgcaaggttgctatttgatcagatgaaagaccgcgatacaatttcttggaacacaatgattgatggatacgtacatgtttccaggatggaagatgcttttgctctgttttcggaaatgccgaaccgtgatgcacattcgtggaacatgatggtctcgggttatgctagtgttggcaatgtagagcttgctcgccactactttgaaaaaacacctgagaaacatacagtctcgtggaactcgataatagcagcttatgagaaaaacaaggactacaaagaagctgttgatttgtttatccggatgaacattgaaggagagaagcctgacccacatactttaacttctcttctcagtgcatctaccgggcttgtgaatctgcgtttaggaatgcagatgcaccaaatcgttgtcaagactgtgatccccgatgttccagtccacaatgcccttatcactatgtattcaagatgcggtgaaataatggagtcgaggagaatcttcgatgaaatgaaactcaaaagagaagtaatcacatggaatgcaatgataggaggatatgcatttcatggtaatgcctcagaggccttgaatctgttcgggtcgatgaaaagcaacgggatatatccttctcacataacattcgtctcagttctgaacgcttgtgctcacgcgggacttgttgatgaggctaaagcacagtttgtgtccatgatgagtgtgtacaagatcgagccgcagatggaacattattcttccctggtcaacgttaccagtggacaagggcagtttgaagaggccatgtatatcataacgagtatgccttttgagccagacaaaacggtatggggtgcattattggatgcttgtaggatatataacaatgtagggcttgcacatgttgcagctgaagcaatgtcgagactcgaaccagagagctcaacaccttatgtactgttatataacatgtatgcggatatgggactatgggacgaagcttctcaagtgagaatgaacatggagagtaaaagaatcaagaaggaaagaggatccagttgggttgactcctcaacgtaaaaagcagcctttatttatgtttacttaaacataaaaattgatttgggatcagaattgagatagaaattgataaggtactcttgaaagttctctcttttctcaattctcttcatcatatttggactcatattccaacgacatcgttttgggaatccccatgattcttgtttgcttctatctgtttttcttttccagtgcccaaaaataaaataaaaagaatctttgtctacattgattgaaaatttgatgtttttctttttgcagccattcaaaatattggtggcttcaaattcacctcttacacttgtagcttgtgcttcatccaattctttgcagcgattaaaacacacaaaaagtttgcatatgaattgctgactctgaatttctcaaaaaggtaagcctttttttgttcatatcttgctttttaatctcagatgtatttaaatgatcgtaagtatctgtgaattggtccagtatgattaagagattcttgacactttccaaagatcagaggttttgattttcttcttgagctaatacaaattttctgatcgcaatattagctaatctccaaatccaaatcatttgaatttgttttcttttttgccacttatggatatctctaaggactaagaatgaattgagagatgaaattagggtttcaactttcaatttgaacagggaagctgattttttttttctagaacatcaatgtatcttagactcttacacatcttaattcctaatatagttgtgttattcaaagaaaaaagcttctctcttatgcagataagggcattgcttcattgatatggttaagaaatg

SEQ ID NO: 7106 - DNA, 3000 bp, Unknown; identical to SEQ ID NO: 7098
  misc_feature (1)..( 3000): cDNA_ID_3049777_gDNA_ID_1621127_Annot_ID_172341 3000 nt of promoter + ATG

SEQ ID NO: 7107 - DNA, 3000 bp, Unknown; identical to SEQ ID NO: 7105
  misc_feature (1)..( 3000): cDNA_ID_1816651_gDNA_ID_1621127_Annot_ID_56386 3000 nt of promoter + ATG

SEQ ID NO: 7108 - DNA, 3000 bp, Unknown; identical to SEQ ID NO: 7103
  misc_feature (1)..( 3000): cDNA_ID_1816644_gDNA_ID_1621127_Annot_ID_56390 3000 nt of promoter + ATG

SEQ ID NO: 7109 - DNA, 3000 bp, Unknown
  misc_feature (1)..( 3000): cDNA_ID_1816790_gDNA_ID_1621128_Annot_ID_56392 3000 nt of promoter + ATG
cctttgtagttttgtgcttgacatgcattgttccttttgcaggttacaagcatcaagttcgttggtgacactgatcttgtgttaactgcttcatccgacaaggtaagctaaggttatgtgtacaagctcctttgaggattgcatgattttatggagtagtagtgaagagattaacttctcatttcttaacactctgcagacagtccgcatctggggatgttccgaggatgggaactatacctctagacatacactgaaagatcattctgccgaggtaaggatgtaactgaagaacttctacaggctacagtctcatacagttttacgttttatttatttttggtctgtttaacgtaaaagcaatgatgtggttttcaggtgcgagctgtaactgtccacgcaacgaataaatactttgtgtcagcatcacttgacagtacatggtgcttctatgatctgtcctccggtttatgccttgctcaggtctccaaaattttaatccacacctgatacctgttatccagtttcagatttcttcttttatgctaatataacaatgaaacatttaccttctttattgtaatgtgaattagactcgttagaataaatgtttctgccatgcgtctttctcattattgttgttattcaggtgacagatgcttccgaaaacgacgtgaattacacggctgctgcttttcatcctgatggtctcattcttggaactggtaccgctcaatctattgttaagatttgggatgtaaaaagtcaggtaaaaactctttgaccttccttgctcatcaactgttgtcacttgtaagtttgttctcacttcactctcatctctatctctgtcgtttgataggcaaatgtggcaaagtttggtggacacaatggagaaatcacctctatatcattctctgaaaacggttatttccttgcggtgggtacattgactgattgacctaaactaagtagaaagaaggatagcaccaggttccttttgactgaccaatatttactattctttaaattgtacagactgctgcactggatggtgttaggttgtgggacttgcgcaagttaaagaacttccgaacctttgactttccagatgcaaactcgggtattcaactacctgagcactcttactagtctattttgttgagtgagttttcatttcttaaggcctgaatgagctttttttgtgcagtggagtttgaccatagcggatcttatcttggcattgctgcttcagatataaggtgaggtctactttgatacacaatgttgggaattaattgatataggagctcactttgataacgagatattgaaagatagttgtgcaaactcaattaacctgctatcaccagaaatgcagtttgggtatatgtatacgtttcttctgcaaatcatactaatcgaaaacttgtgcttcaatgttgtagagtattccaagcagctagtgtaaaagcagaatggaacccaatcaagactcttcccgatctgtccggtacaggtaaatgctacatgttaagcttttgaagtcactgctcttccttgttttattgagtctatcattcagacattgtaactacataaatgtgcaggtaaagcaacaagtgttaagtttggactcgactccaaatacatagcagtcggttcaatggaccgtaatctcaggatatttggtttacctgatgatgacaatactgaagattcagcacaagattcatgaagagatatctcaaaagtctcatcatcaagagtagctatatcctcaattctcgcgatttttgttgtatctttacagttctgttggtactttcctgatggcccctctcacaatcacatatacacacctgagctctctccctttctttctcagtcaacaattttcctgtaacaacatcgtaccttaaggatctgcagttgatctttctctctttgatctgaaagagtccacataaaacaaagttagctgctcactataaaagcaaatgaagaacaggcatgtaaatgatcttcttcatcattcaaatcagtaggacctaaacggcaacaattaaaaaacttgtgttatatagaaagggtcatgaatcttgaagacaatgaaatgaagacaaaaagattgtgatggtggtcatagaaattagaaaaccctgagacagacagagattttgactgtactgtggtcaaaacacacacttcacaatcttcccattcccccaccaatctcagattccttttcacttcctccaactctttctctctctctggccttttttttttttttttttcctatttatagctcatctttagtaattccgttattggttaaatttcctaaacatgtttttggtatcaacaatcaagtaagtgcaagaaagtttgtatctttctctaaacccaatttccaaagtaaccaactactaaaccagaatgttacacaaagtaagtcactaaatgactttaaaaacaagattagactttaaactagattagagacatacttatttggaataagattcaaaggtcactagtagctagtaggtggtaaaaaggaagctaaacaacaaataaactcttattaaaatctttcaatcaataaatatttattgtaatttgctgcagtaaatcaaacattgtacagtttcagaactgaatggctcagaagcgttaaaaggaaaaagagactctctctctctctctctctcccctaatctcctctcacatggtcatcaaaagccaaagccaaagccaaaaaaaacaaagaacccagaaacctagaagacagaaacaaaaatcaaagctttactgagccaccaagcaaccaattacatcaactctaaaacccataaaaccaacacaaagattccatctttcaatatctctacaatgagaaagccaatgctttgattttttcccccaatctttcttccaagatacctcaaagcaaaaagagaccacaagaagcaaaagagtctacatacaaaaatg

SEQ ID NO: 7110 - DNA, 3000 bp, Unknown
  misc_feature (1)..( 3000): cDNA_ID_1816786_gDNA_ID_1621128_Annot_ID_56393 3000 nt of promoter + ATG
attgtgacgatttgtggttggctagcgagaaggtacgtaactacgtatgaacaccgtacaaaagagttagcactaaaaagtttgctttactaattatcgtttcagacttttggaatatgaactgaattgtatctagaataaccagaaacagaaaagaaagtaaaaggaatgaagcaatttgacaaaagataaaatcgaataactaagaaaattaagaaaacgatgttacctacaaaatacaaagatttcagaaaataattttattccttgcgaataaatcatagatatatacatgcaaaattttcaggaaaaaaaggttcatgcttttaatcatttaagcaatgtatgatagaaaagaggaaacccaaagaagagaaaccattcaagggcataaaaacagattcgaggacaaacaataaacattgcacggattattacgtaccatggagagctgctcatgagacgaaattacgtcctgcgacatgtttatgtgttctttatggtctccaaattgtgaatgattttccgggaatgaatccagagagaaaattccccaggaaaagggaaagattattgaaggaggcttcttgaatgtggtagtggagctagtgatgtctgaacaagaaaatctaaagaattaaaatactggaacaaaagagataataattaatcaaacagaacagaataaaaatctgtttaaagacagagaagagaaagaaatttcttacaggtttcttctggagaaactaatgaaggttatggaagttatcgtaaccaatttatttatacttatggtttaaatgtgtatctatatgtgtatgtatgcaaaatgtaataagaaaaatgccagcgtggcaattgacgttaaacgcgctggtcctggagtttcttattctcgtgacgtggcgtgtaacgattggaataattagttgacgtggagaaaatagtcccacctaagtgatgacttggttgaccggtaaaggagtttgacccaattctttttgtcgcgatgatttttgactttctgactgaaacttgtgctaaattaagccttctatttatagaatttggcttttctattttatttttagcaatttaatttttcattttctatttatttacttggttgggttttttaaatgctggtaagaagtggaaaagaagagaaggagaaaaagagaccaggtcagtgaaaattttgaaaataagagataaagatcgtactaagtcaaatgtatttattttatggaaatttcgaggggaaaaaaaatgttacgtgatgcttagttaaattcggaaactacaaatttcatatcaagatggtttctctcgataaaaattcgttacagtgatagttttagcataccatgcttcgagttgtcgttttctatatatgttgttttccttacaaccataaccaaataatgaactgatcatacaaatgaaaagatacttttatagatcggaatatatatcgacttagataacgtaaataaaggtacaccaatgtgatttatagattatatagtcatcaacaccatatatgaaactttaacaaaaaaacaccatatatgaaactacaattttttacgaacatggtcttacctttattttatctttttttttcgtataaagaattcccaaactatgaaaaaatgtcagctaggtgaataatctaactttcatggactattactcagctaagttcaaaatatcccttcacttcaaaacttctaaaaacaactttcattgactatacgcattaattaattactattgtaattacgacgatttttttttcgttctcctctagctttttttagtttatttgttttggtcatggttgggaacgggacatcatcacatcacttatcaacattctatttggtccccaactctatgaagcattatttgaaatcattagcatgactatctaagttttttttctcctgatatttatccaaaattttatttcattcaaattgtttaacaatatgtacatatactatatgtattatataaaatacatatcaccactcaggcaattttttaaacttatatacagtatgtgataaaataaacatggtcatacgtttaagaattggaaattaatgaggttgcaagaaatcatttaacgagaacagaatgaagagaaagaaaaaaatagcaacttggtggcaaaaggaaaaagaaacagcttgagatcaaagctgatttgatgaatcgatactttggagatatatatgagcatcttcggcaaaagctttggcctttgagtgcagtgttacacacacgcattttccaaacgagatgatttaagttttgcagagctatcacaaatatattataataccaaactctcagacaatattatataaatcggaagtctaattttttttaataaaaaatgaaaatatagtatgaccaatgatttgttcatataaggttcttttttcggctatgttaattgttgagaaatgagaatactaaatatgctttttatgagaatactacttttcggctatgactaatttttgttcataaagaacacatctatcgtacgtgcaaatagaatggcccgtacatcgttgtcctaccttatactttaaaagaatttgtaatcagaaaaaataaaagaaaagaatgacaaaaaaaagggtaagaattatactttcgagtttcttttctcagacagaaagaatgaacgaacatacatagtttaactaatgggcttcagaaaaaagcctaattagttataaatcaaggtctcgttaaaaggcccatttgtttaacaagaaatctctaacttgttgtcctaagcttaaacaatttttgcatctctctctctttccgtcttcatcgtcctcccggcttctgcgattttgtttagtagcgccggaccggagtagttaaaaccctagcccagtctatttaaagattcaccgagtagtcttctagtcctgcgtatacttcttcttcttcgtttatacttagaagatg

SEQ ID NO: 7111 - DNA, 3000 bp, Unknown
  misc_feature (1)..( 3000): cDNA_ID_1816783_gDNA_ID_1621128_Annot_ID_56394 3000 nt of promoter + ATG
cattagttaaactatgtatgttcgttcattctttctgtctgagaaaagaaactcgaaagtataattcttacccttttttttgtcattcttttcttttattttttctgattacaaattcttttaaagtataaggtaggacaacgatgtacgggccattctatttgcacgtacgatagatgtgttctttatgaacaaaaattagtcatagccgaaaagtagtattctcataaaaagcatatttagtattctcatttctcaacaattaacatagccgaaaaaagaaccttatatgaacaaatcattggtcatactatattttcattttttattaaaaaaaattagacttccgatttatataatattgtctgagagtttggtattataatatatttgtgatagctctgcaaaacttaaatcatctcgtttggaaaatgcgtgtgtgtaacactgcactcaaaggccaaagcttttgccgaagatgctcatatatatctccaaagtatcgattcatcaaatcagctttgatctcaagctgtttctttttccttttgccaccaagttgctatttttttctttctcttcattctgttctcgttaaatgatttcttgcaacctcattaatttccaattcttaaacgtatgaccatgtttattttatcacatactgtatataagtttaaaaaattgcctgagtggtgatatgtattttatataatacatatagtatatgtacatattgttaaacaatttgaatgaaataaaattttggataaatatcaggagaaaaaaaacttagatagtcatgctaatgatttcaaataatgcttcatagagttggggaccaaatagaatgttgataagtgatgtgatgatgtcccgttcccaaccatgaccaaaacaaataaactaaaaaaagctagaggagaacgaaaaaaaaatcgtcgtaattacaatagtaattaattaatgcgtatagtcaatgaaagttgtttttagaagttttgaagtgaagggatattttgaacttagctgagtaatagtccatgaaagttagattattcacctagctgacattttttcatagtttgggaattctttatacgaaaaaaaaagataaaataaaggtaagaccatgttcgtaaaaaattgtagtttcatatatggtgtttttttgttaaagtttcatatatggtgttgatgactatataatctataaatcacattggtgtacctttatttacgttatctaagtcgatatatattccgatctataaaagtatcttttcatttgtatgatcagttcattatttggttatggttgtaaggaaaacaacatatatagaaaacgacaactcgaagcatggtatgctaaaactatcactgtaacgaatttttatcgagagaaaccatcttgatatgaaatttgtagtttccgaatttaactaagcatcacgtaacattttttttcccctcgaaatttccataaaataaatacatttgacttagtacgatctttatctcttattttcaaaattttcactgacctggtctctttttctccttctcttcttttccacttcttaccagcatttaaaaaacccaaccaagtaaataaatagaaaatgaaaaattaaattgctaaaaataaaatagaaaagccaaattctataaatagaaggcttaatttagcacaagtttcagtcagaaagtcaaaaatcatcgcgacaaaaagaattgggtcaaactcctttaccggtcaaccaagtcatcacttaggtgggactattttctccacgtcaactaattattccaatcgttacacgccacgtcacgagaataagaaactccaggaccagcgcgtttaacgtcaattgccacgctggcatttttcttattacattttgcatacatacacatatagatacacatttaaaccataagtataaataaattggttacgataacttccataaccttcattagtttctccagaagaaacctgtaagaaatttctttctcttctctgtctttaaacagatttttattctgttctgtttgattaattattatctcttttgttccagtattttaattctttagattttcttgttcagacatcactagctccactaccacattcaagaagcctccttcaataatctttcccttttcctggggaattttctctctggattcattcccggaaaatcattcacaatttggagaccataaagaacacataaacatgtcgcaggacgtaatttcgtctcatgagcagctctccatggtacgtaataatccgtgcaatgtttattgtttgtcctcgaatctgtttttatgcccttgaatggtttctcttctttgggtttcctcttttctatcatacattgcttaaatgattaaaagcatgaacctttttttcctgaaaattttgcatgtatatatctatgatttattcgcaaggaataaaattattttctgaaatctttgtattttgtaggtaacatcgttttcttaattttcttagttattcgattttatcttttgtcaaattgcttcattccttttactttcttttctgtttctggttattctagatacaattcagttcatattccaaaagtctgaaacgataattagtaaagcaaactttttagtgctaactcttttgtacggtgttcatacgtagttacgtaccttctcgctagccaaccacaaatcgtcacaatacttaatcagatagaatagaacagtttatcagaattcataagatgctacatctcttcttttagtaattccagtaattaaaatttgaacttttatttatactttcgaatagaatcacacgaatttttattagaaatatataatgagtgtatcaaaagcaatgattcttgctcttacctcggcctttatttgttgttaaaaaatcagatgttagtttaaattagggaacgttttggttctaaagaaacgcaagaatccaaaaactttcctgtt

SEQ ID NO: 7112 - DNA, 3000 bp, Unknown
  misc_feature (1)..( 3000): cDNA_ID_1816779_gDNA_ID_1621128_Annot_ID_56395 3000 nt of promoter + ATG
agccggttctcccgcagttagggacggagataaccggtttagacgacccgagtttcaacaaagtcggaaaactctcggcagagcagagaaaagagaagattcataggtatatgaagaagaggaacgagaggaatttcagcaagaaaatcaaggtctttgtgcttaaccatcataaccggattaaaccagtggttatccatataccgatttgttcacatgttttttttgttatattttgttgtagtatgcatgtaggaagacgttggcagatagtcgtccaagagttagaggaagatttgcaaagaatgatgaatttggtgaaccaaatagacaagcctgttcaagccatcatgaagatgatgatgatgatgtaagattaatcttgtttgattacaattagaaaacagattagtttttgtttgatataataaagcgtttctaaacgggggtgtggtttgcaggtgggggtaaaggaagaagaacagttagttgattcttcggacatattttcacacataagtggtgtgaactctttcaaatgcaattatccaatccagtcttggatttgagttggattacttacttggtcttatgatttacaaaaataaaacaaaaatagtattgttatagaggtctgtaatttgtatatttattagtacattttttggccatgactcatagtttgtcgaataagtagaacataagaaaagagagagatgaataatgggtgtaggcaggtaatcatgaataaaattgtagtgagtgagaggggttgtttatgttacatagaacattacaaaattttgtagatatatattatatggtatgataattatgatgtctattaatgtatttgatgggtgttgtataaataataatcatttgaacattataaataagcagttgtgttcaagtttgtcactaatttttagtatacgtggttcaaaatttgaaataaataatagtgtattatataaacttactaatacaccttctagatattaatttgaattttagtgaaataattgaatattatttacgtaatgtttatttccagcgtgcttggcatttcaaattttaaattgcatagaaaatacttagcaagaagcaacaaaaaaaaggcaagcaatagtgtctcgatccaatctcacgccaaaggtccaacgacaatcatacttttgtcattttatgttggttggtttattgattcctcgtcgtcagacgttttagaatttaatattattagaactattattggatttttgtgacaaattataagttgtttttggttcttctttcggattttctttgaaaatctttataaaaacaaattaattacgtttcacacttttatatctggattgagcacttgtatatatattataggaatatagttgaaataacacacatctacataattgtgaactataaacgaattatagtttcaagaggttttataaaagagtgtatgtagttgaccatgacccatccctaaaggtacgccatgttagatgttccaatttttctgttttattattatttatgtctaacagcaaaaaagtattgacaataaactcgtaacagaaaaatgatgttgatgataataattaaacaacatatcaatttattactagttcacaaacagaaaatgtatgcataccataaatatgagtacatgcaaacaatttagatgatgtataaacgagtagccctttagtttctacgttacagtctaagttttgtttttctttgagaatttaatattgcgtcgattaatactcggtacctacttgttagttttatacgaccagtacttgcgagttaaaaaaacatacatattaacaaaggttaccgcccattggaaataaacatgcatattaaaacccacaagattcacaatcatccattcaactgatctttcacatttccagtataagaaaacactatgaggattgtaacatcatagttattacgatataaatattgagtgacgaattagaatgataattaaattatttgatttaattttaagtagttaaagatgtttaacaagatattacattatatccaccaatcatataattaaattcatgtatattgttgtgaaaatgttgaccgcatctttataagatgcagaaactgcggtcaaaattaaaataaaaagaagttaattaacagatagtgagatgagtgtgttgtttgatccaccgaacacacacgcacctcccactaaaagccaattaaccaaaagttgtgaaaacaagacttaagtggaagactgaaacaaaatcaaaataatataataaaagtggatacaacgcgttaaggtttgtacaagtacacatatctttgatcattctcatatgttttgttgcttcaaagctttgcccactttgttcgtactcatttgattccttaggagagaagagggaaatttgtttatgctttaaatttggtgagactgacgaaagaatgagcaataatccacaaggaggattttcatcttagtcgacaatatttcgttgaatccaggtaaaaagcattgccatgattttaattttttctttccttcaaaatagtattgtagggaataataactatcaaactgaattatgtgatcgaaaattttaactgtcgttaattgaggttgaagatgcatacaaattctgatcactgcatgttatttttgcaggttttttttggtttcattttaaaaagctttgtaaataataacacataatttacaggtttgtaccaaataagctctgttttagctttgggtttcaaattctgttttacggttgttgtttgtttccaatatttgatgcatttggttttgagaatgtaatctggcaaatgctttactactaactttgataagaatctgtaaacctgtccttacactagcatagtttttaagtcaacttattatgctgtcataatctgtaaaacagaggattttttcttgatcaggaattcctgtggcatttggcaatagag

SEQ ID NO: 7113 - DNA, 3000 bp, Unknown
  misc_feature (1)..( 3000): cDNA_ID_1816771_gDNA_ID_1621128_Annot_ID_56397 3000 nt of promoter + ATG
tggtgataataaccgatggtgatgatctctgaaacaaccgtaattgatcggagcgaaatcacatcatcatcgtttcgtgattgaatgagaagttacaaacgttgcactgtaagcaccttacacattttaactaattaagctttttcactattgtaatgtgttcataacattataacaacagaacagaaaagaacttagaaaaaattgtcaaaatagccaaatcatttgaatgtcagatacatattgtcagaaaataaaaatatcttgctaccaaaattctcaaatttgtatctagacatatccatcaaatacaagcaattgattgatctgatcattagacaatggcattggcagcactagcaatccttggccaaagatcagcacactctttcccaataggaccagtaattgcagaacctttcatttctcccttggggttgacaatgactccagcattatctgtgcaacaaaaaaacacagaatcaatacttgctttcatacacaatcactaacaatgatcaatttaaggattatatagagtccatatggagcagatgcaagcgttcaagcaataaagcatctgtaacgaaggacacaattaaattttccagacttgtacgagcatcaacaccctctaaacgtgtcggtggatacttgacttaagcctggtgatatcaatcacataaactgacaaaaatcatagaatcagtaatactaaaacaatgggaatgtagagttcaaatggagcagatgcaagcgtttgagcataatagtatctgtaacgatagaacacatttaggtgtaccagattttgttttgtatttatacaccctctttatgtttcggtggatacatgacacaattctggaaatgtaataatctaaatctggcataactagaccatatactatctattcataagctagatgaccaatagaacaaatcaagctattgataattcggagtccaagtagtgtaacggtattaaacacacactaaatagtgttggtgaacaaattacgaatcctattagggttttaagagagaaagtaagtaatctaaccttcgaagtacatgaaaacaccatcctttcggcgccatggtttgcgttgcctaacgatgacggcaggaagaacctttttcctgagatcaggcttaccctttttgacggtggccatcaccatgtctccgacgcaagcagaaggtaatcgattaagacgacctttgatacctttcacggaaatgatgtagagattcttagcaccggtgttatcggcacagttcaccgtcgccgccaccggaagacccagtgacatcctgaatttgttaccagaggtacctccacgccctaatcgaaaaaaatccaaatcaacaacgattaaaacgaggttcgaaaagctgaataaacacatattgatgaactgaaaatgtaacagatctaacaactgagatagaggaaaagtgcgaacctcgcttcgacattgttgacggcttgaaggaagaagaaacgatttcggtttaatatatagtgacgcattcttcttgtagggtttcagtaggcttaaaaaatggaagaagaaacgatttcgttttttagcccaagttcaaagtatattaggcccataaaagcccaagcagagttttaaattaaatcagacgcgtcttatcactatttggagagtcccacatcggaaaggtgagagagtttgccaagggaaactttagtatatatagacttcactctccatattctcgaaccacgcagccatgtggtgagcacatagcgaactattctttcgccttttactaaagaataccgtgtgctctccacgctaagtggcatacgcctatttttggagggttcccactttactgtgggtcccaacatctctcagtttaatttttggtctcgaagtatctgagaatcctttgtggcaactctaactgttagacaattaaatctataacccggttattaaaccgtatatacccagttaaaatgcaaacagttatttaaaatatcctctattagagtctttgtgttttttgcctgttgatggatatatgaacgagtttgctatctagaatcgatagaataagctttgaggttatataagatatttggattggtttctggtgaatccattatttgtacaagtttcatggtcgtaagttgtaataactgtatttcttcataatcttctgttatagttgttttcatagaactcaatttgattagcaatatttgtcgaatcctaaaatctgaaattgcttgaggattatgagattccatatttctcaaagttaaaagataactgaaagaatcaatgatcaggtcctgaccagtgccacttgattgatatatagttgaccttaattgaaagtttgaaacaaatcccatcataagatcataaaaaatatagttatccagttaacaattaaaggacaccgtttaagtaactgctgcagacagaattgagattaagtattgacccgaatcttatcttcttttctccggatacatcaactacaacaacaaccaggtgcaaaagtatgttgagtaacaagtttcccaacaatgttttatgctggattctgttgtcaacaaaagtgaggttggattttgtttttctctctcaaaagattgtgtatatggaagagaatacatatggaatttacgaaaaacaagagattcggcttggcaaaagttacttggaataggagatttgctaattatggttaagttttcatgaggcttcctcattttactcacatcctctctccttccttagcacagagaaatttgttgtcgcctagctttttccaagttgtctctcgtcttcctccacctcctcatttttctctgtttttttgttcgttgtctctcatttttcccttattaaaaacacataactccttctctctcctcacttctcggacatctgatttcttaaacccgtatccgtctggtttctatttccttcttgcctcccctccgtg

SEQ ID NO: 7114 - DNA, 3000 bp, Unknown
  misc_feature (1)..( 3000): cDNA_ID_1816768_gDNA_ID_1621128_Annot_ID_56398 3000 nt of promoter + ATG
cagagtgagacaaaagccatcgacactagcaaaaactcagacataatgccgacattatgtaaccttgtcgcctccttgtcatggcgcaacgctactccaacaaccgatatatgccattgggctgatggatacccacttaacatccatctctatgtggcgcttttgcagtcgatatttgacatacgtgatgagaccttggttcttgatgaaatcgatgagcttttagaactgatgaagaagacatggataatgttggggatcacacgagctatacataacttgtgtttcacttgggttctgtttcatcagtacattgtgacatcacagatggagccagacttgcttggtgcctctcacgccatgttggctgaagttgccaatgacgccaagaagtctgatcgcgaggctctttacgtgaagctcttgacctcgacattggcctctatgcaaggatggactgaaaaaaggtatttctttttgccttgtaaatggacttgatcacacaaaactgaatctgattgtgaatgtgtgattataggttgttgagctatcatgattattttcaacgagggaacgtgggattgatcgagaatcttctgccattagcgttgtcttcttctaagatcttgggggaggacgtgacaatctctcaaatgaatggtctagagaaaggtgatgtgaaattggtggattcttcaggggatcgcgtcgattactatataagagcatctattaaaaacgccttctcaaaggtaatagaaaacatgaaggccgaaatcgaagaaacagaggaaggagaagaagaagcggcaactatgttgcttcggctagctaaggagacagaggatcttgctttgcgcgagagcgagtgttttagcccgatacttaagagatggcacttggttgcagctggagtcgcctcggtttcgcttcaccaatgttatggttccatcttgatgcagtacttagctggtcgatcgacaatcactaaagagactgttgaagttctgcaaactgcggggaagctcgaaaaggttcttgtgcagatggtggcagagaattcagatgaatgtgaagatggcggtaaaggccttgttagagagatggttccgtatgaagtcgattcgattatcttacgactactaaggcaatggattgaagagaagttacaaacagttcaagaatgtttgagcagagcaaaagaagctgaagtatgtttattaaagctttacttgcagttcaagtatacaaaatgtatcatctatacactcaatatttttttctgtagacatggaacccgaaatcaaaatcagaaccctatgcacaatctgctggagagttgatgaagctagcgaatgatgcaatcgaggagttctttgagatccctattgggattacagaggatcttgttcatgatcttgctgaaggattagaaaaactcttccaagaatacaccacattcgtagcatcttgtggtaagtgaaaggatacaaatttctcatttcatacaaaccattggttactaattggtgattgttttgttttttgtcaggttcaaaacagagttacattcctacgcttcctccacttacaagatgtaaccgagactcaaagttcgtgaagctttggaagaaagccacgccatgtgctgcctcgggagaagaacttaaccaaatgggtgaagccccaggtggcaaccacccgcgtccttccactagccgaggaacccaacgcctctacattcgtctcaacactttacatttcctaagctcacaacttcactctctcaacaaatccctctcactcaacccgagggtcctccccgcgacgcgaaaacgctgccgcgaacggaccaaatcatcgtcttatttcgaattcactcaagcaggaatcgaatctgcatgccaacatgtctctgaggttgcagcttaccggttaatcttcctagactcatactctgtattctacgaaagcctataccccggagatgtcgcgaacgggaggatcaaacccgcgttgcgaatcttgaaacagaacttaacgttaatgaccgcgattcttgcggacaaagcgcaagcattggcgatgaaagaagtcatgaaggcttcattcgaagtcgttttgacggttcttctcgcgggaggacattcccgagttttctgtcgaacagatcacgatttgatcgaggaagatttcgagagtttgaagaaggtttattgcacttgcggcgaaggactaatcccagaggaagtggtggatagagaggcagagacagttgaaggagtgattcagcttatgggccaaccaacagaacaacttatggaagactttagcatcgtgacatgcgagtcaagcggaatgggtttggttgggacaggacaaaaacttccaatgcctccaacgactggacgatggaacaggtcggatccaaacacgattttgcgagttctttgctatagagacgatcgtgtggctaatcagtttttgaaaaaatcgtttcaattgggtaaacgaagatgacacaaaagagaaatagtcaaaagaatgtcatctcgctaagacgtgatctgttgtatattttgagattaagatgttacagaaccaaaaaaaattgcttgttcattagataaatgagaaaaatcttgaaaatgtaatgtttttggtttatacattaaacccggtttagagacaaccgagagcgtgtcacccatgatctaacgacatcgtattgtcgattcgatgccatcaatcgtataacttgaccttccgttccctctctccaacctatcgtcgctcgtaagcttctctcagttcttcttccgcctatattcaattagggttttgaaatttgtgttaaagttcggatttttggagtagtagcttgtgtttggttctctgaaattgactagaattcatcaatgcttcaagtcctgtgacgaaattttatctcgattctgattgattacatcacaaaagtaaacatttttcgatgattagtga

SEQ ID NO: 7115 - DNA, 3000 bp, Unknown
  misc_feature (1)..( 3000): cDNA_ID_1816759_gDNA_ID_1621128_Annot_ID_56401 3000 nt of promoter + ATG
ataatgacaatgtcactagcccctaatgatgttcatcagaaccaaatccagtttgcgttagaaagaggaatccctgcttatcttggtgttttaggtaccaaaaggcttccttacccgagcagatcattcgagtttgctcattgttctcgatgtaggattgattggcttcaaagagacggacttcttcttcttgagctcgatcgggtactaagaccgggaggttatttcgcgtattcgtctcctgaagcttacgcacaagatgaagagaatttgaaaatctggaaggagatgagtgctcttgttgaaagaatgtgttggagaattgccgttaaaagaaaccaaactgtggtttggcagaaaccgttgagtaatgactgttacttggagagagagcccgggacacagcctcctctctgtcgctcagatgctgatcctgatgcggttgcgggtgtttcaatggaagcttgcatcactccttactccaagcgtaagtatttgcttcttttttctgttccgttggttattttgagttttgaggaattaggaccagatcttttgttttgtatgccatatgtcacagtcatgctttgttttttttaaatacagatgaccataaaaccaagggaagtgggttagctccttggccagctaggttgacttcttctcctccccgtcttgcggatttcggttattcaaccgacatgtttgagaaggacacggtactataactgccatcttttcgcaaccattgatcttacttaatcatcattcttccacagatttattgaaaaagcacattgctttgcttatcttctttgtttacaggaactttggaaacaacaagtggacagttactggaatctgatgtcatcgaaagtcaaatcaaacactgtgaggaacataatggacatgaaagctcacatgggttctttcgcagctgctcttaaagacaaagatgtgtgggtgatgaacgttgtctctcccgacggtcccaacactctaaaactgatctacgaccgtggtttaatcggaacaaatcataactggtacacacccgaaacctgaaaatcgaaaacattctctcacttgtcacactagttcatattttcaccattctttttttttgtttccggttttaatttaggtgtgaggctttctctacatatcctcgaacatacgatctgttgcacgcgtggtctatattttcagacattaaaagcaaaggatgcagtgcagaggatctactaatcgagatggatcggattcttagacctacgggattcgttatcatcagagataagcagagtgttgttgagtcaatcaagaagtatttgcaggctttgcattgggagactgtggcatcagagaaggtaaatacaagttcagaactcgaccaagacagtgaagatggtgagaacaatgtcgttttcattgtccagaagaaactttggctcaccagtgaaagccttagggacagcgagtaaaaaacatatcaaaagcaaagagagagaaattgttttatcccacaaagtttttatatagttttattttgatttttgtagttgatttgtacgacataaagcattattatataaaatactaaaattattcattgtttcttactttcttgaaatattctttaatttttctgtttcgatgtttcttatgtattatgactgatcttatcttaagtcttacctctttttagcatttacgttttcaactctttaggatatgtcgtattatgtgttggctataatgtgtttggttagaatgttaactttggtgtcggcataatatgtttaattattgaagaaaaagtaaaacagattataaatttaaaaagcatagacttttggataatttcataattaatagaagaagataactattgacaaattcaatttagatgttgattagttcaacaaaaaataaacttagacattagtttgttctcaaaatgagaaaaggatcaatattattgatttatttctatgaccatttaaagaatgtttacaaatgtggttatctatttgattaactatttttttttttttgaataattgggaaaactgtgaaattttaataaatgccgacaaaaagtaagaaaaacaaattattctctatatagtatatactattttaaaatatagatggtacagaagtaaaaggcatccaattcgaaagtttaatatgtaatttatacaagaatttaatataactaatgatgggacctattgtttttatttgttgttgtattattatatggtgacttgactaagatgttttcttctaataataatgccaaatgaaaaaaagataaggtaaagcttaatttacataaattagcatgtgggaagagacttcacagtttatacaaataagtacgcaactattagtagttgttgacctttttgtctaattcaacaagataagcctctcttctacttttgtgaaattttccgtaatcaaatccgtaatcagatttccccatcaatcgataattttctctcgccgcgttttctatttttctcgctcttcccttttaattttcatcccattttcttgaaggagatttctaattattctgtgatctaaagtctgaagctttgtttggttgcatctcgatgatgatgatgatgatggttgattgtaaatgggtagtttcggtttggttgtagcagaagctaagtttgtcaagttaataagagtattttagttttttttttgttaaatcgatttgtgggttcatcatcctacgatcgaaagtttccatctttgataatttgagattctggggatttttactagaatttctagttttttttttggtttgttgatttcgtagctagaagaaatcgatctaggtgtgtatatatatatctattcaatcgaattttagtgaatcgattggcgatcttggtgagagtaatttcagagagatcaaggttactagagcaccaataaaaacacttatttggattgggagatagaaaaatg

SEQ ID NO: 7116 - DNA, 3000 bp, Unknown
  misc_feature (1)..( 3000): cDNA_ID_1816751_gDNA_ID_1621128_Annot_ID_56403 3000 nt of promoter + ATG
acggtggttcatgaactcgattctggtcatgcccacttttgtagaatccattaaatatctaaagtctatatggcttaaaggtgagaacttgattctcattagtcattaccaagtagaatctataatcaaaatccactgcttttactttacaaaaggaaaaaggtaaagataaaaaagttctctcaaactttgaatcctcgtataccccttattaatggaccattgcctacggtttatgattcgatttcggatagtcgtaaaatagaagcaatctaagttttttggatgtatattttggtgtcaacttggtgtttggttataaaatatttgggtgaagaaaaatagaagtaaaattaaaataatccacattagaatttcagtttaatctagtgatttggttttggtatgaatctgcaagagtagcatttctttttgcaattgcaacacaataacaccattcctcacaaatcacaattgcacaaacccattatcgaagagctcatcaattttgggctaattgctaaagcagaaaaaaataatcgcaaaagataaccatgcaactgccaattttcttcttttcatgggtaaaccaaatcagacacattgaaaaaaacgatatcctggtttagaaacagaccagggacaatactcatcaaagagaccaaagaggttataaaacagtgtttggagatctttcaaacacacttcttattcggacaaagccctgaaaggctttaactgatctcacaccttatagatgaaaattttgctccagaagggtttaagagaggcatgagtacgccaagtccttctcttccttgagctcctctgcagtcaaatccatcttcttccttgatacttcatcaatcggaaggcctaaccaaacaaaatacacattagggtctgcagaatctaggatttcataattgatgagcatttgagtttgtaagtgcgtcatatttaccttggacaatactccagtctccattgcgacaagttacagggaaggagtagataagtcctgatggaacgctgtaagagccatcggagtatactcccatggaaacgaacgtaccctgacaatttgaatcaaagaaagaactcatattagattaactgttacaaaaaaacagcactgcaaataacggggaagagttttattatgaacctctggagttccaaggacccagtcacggatgtggtcacaagcagagctagcagcagagagcgcactagacaacttcctcgccttgatgattgcagctccacgttgttgaactgtagagataaattctccgtccaacctacagaatgagcaatatatttaagtgaaactagattttgcttccagagaagagaaagggtcttaagttctatggcatgttatacataccatgcatcgtccttgacgagctcacggacaggcttctctccagacgaggtctgcactttagcatggttgacatctgggtactgtgaggatgagtggtttccccagatgatcacgttcttaacatcagacactggcacgctcaacctctcagagatctgtcccaaagccctgttgtggtcaagccttgtcaaacaagagatgttcttttcagggattgatggtgcaaattccttgaggatcaatgcgttggtgtttgccgggttggccacaacaagaacctgaaaaaaaaaagacaaaacgagagcgaatgtgtgagcaagagagtcgtaaactagaacccaatagagaacacaaagcatctgttacactccaatgaacagagaagattggatgcagtggcttcatttaacttaaaaagcaaacagatcgtatcaccttgcagttaggagcggcatgcttctccaaggcagcagcctgagacttgtagatggaaacattcttggacatcacatccttcctctccataccttctttcctcgggaaaccaccaaccataacagcaacattgactccagtacatccctcaacggcatcagttgtagcaacaacacctgataataatacacatcaaatattcatcttctcctttcccacttatacaaaacaacttatgacacggaatgcaaatatccacagcaaaacaaaacccttaactacctttaagaagagggaaagcagcatcgatcaactccatcttaacaccgttcaaagcttcagcagctggaggaatatccaacatgtggaggataacaggttggtcagcaccaagcatgataccccttgcaatcataggtacaagagcatatccgatttgtcctgcataatcacaatcaatagttactttcagtagctgaggagatctaaagtcacaacttaaactctatccaactatataaacaacggtttctaaatcagagttcgatccatgaaataacttttactaaaattagatatgcgaccaactcaatcaatcgttggtcagcgttgaatccaacggaacaagagttgacctatatttcattgatctatggaacaaccagatactatgcagagatctgactagattcagcaagcgattcactagccagagatctagaagttacacgatctaatcggatatagatgaaagttatacctgcagctccagtaacgagcacacgaactggttctttcgccatcggatctagatcggagattatcgccggaaaacggatcgaatttgggatattcgacttttgagagagcgtagagtcagcttttgtctgaccgtgaagctcactcttgcgtatttatcgaagatatcgaaggatgtaccgccacgtcatctaatataatcatattatctcgaagaaataaatcgaaatctgagattagacctatcatattaggaaaacaagatattattcaatatatatttttgactctaatgggcctcttacattaggcccaaatcgtttagcccagagtattcaaatacgtgaatcaaaacagtagataatggtggcgataaggcgagaagaaccacgtccacgacaacctccggtatg

SEQ ID NO: 7117 - DNA, 3000 bp, Unknown
  misc_feature (1)..( 3000): cDNA_ID_1012835_gDNA_ID_1621128_Annot_ID_56404 3000 nt of promoter + ATG
gctgcgttttgccgccggatctgatgaagaaagagagagggacaagaagagacgagagtttttaaagtttccatttacatcttttggattatgtttttaacgatatcggaggctgtgtgtattactatatatagagaagctttctttaccgttgagaaaaagtagtaacggatagtttctgaattttgaagtaagttaccgtttctaagttaccgttcccgttctgacatctcaacggttaaatcacagttaccttgtccgcaacacgtgttacaattaaaaaagttttattcttgctgggctgtcgagaccggcccaaacccatcaatttgttttttaatttttacatgtccgatatgaggcttaaaggataaactggatttgatttaaggtccattatatagatcaataaaagcgttcaaacgttatgcgcaactgtggtacgtcattacatgggagttctgtatatccgtcatatcaaaacaactgtaagaaagcaaatcaagctatatataacttatggactttcaccgtgagctcacaaactcatgagaaaccttcttttctttcaaacgaaagaagggtctttgaacctcttgaaaacggcgtcaatgtctgccataacttcctgcgaaaacggccgctccgtcatcagaaaagcatcaatgtcttctttaagttgttttaccgatgtggccccgatgatcgtgctcgtcacaaagggcctgtcacgtacaaacccgagtgctaactcaaccggagttaaaccgtacttcttcgccacctcaacgtattgtatggttgcttcctgaaatcagaacaaagataaaattgacctcaaaacacttttacgaatatggctttacaactagattcgagctaatactgtttcttaaattgttttacgacataagaagaagtaagcatagttggatcaagaagaaaccttggctagtgatcccttgtaacgttccatatatcctgggaaaagattcagccttgcattttttgtagcttcttggtctgtagccaagtatttcccagacaacgagccgcctccaagaggggaataagcaagcaagccaacattgcaattttttgggtggcatacttctaccagatcaactgtggttttaacccaaaacaaaagagtttagaacatgctcctccgacacacttgctctcaaggtattctagaaagatttaccttcataccgacatctaactagcaagctgtaaccattctggatgctcacaatctttggtagtccttcgagttttgctgtgttaacaaactccgtcactccgtatgaagtttcattcgagacaccgatatagcgaacctgttgcagaattcgaggaacacttcaaaactctgtgtttgaggttatataactcaatataacatctgatttttaaggagtagcactacctttccttcaactatgagatcctgaaaggctcttagttgctcagcgaatggcacactaggtctccatttcgacgtttcatagtaaaaatcaccgaagagtggtacgtatcgatctggcctggactgaaaaaaagatcagtgtcatgattttctgacatttgatgatgaaaaacgaaatattttgcgcatgaaatagaaagacacttgctcaaacaatgtagaatatgagttaagacataaagcaaaaataaggcgatgttaccagtgtatttgaagcaagtcaatgtaatcagttccaaggcgcttaagacttttctcaacactttctttgatattagcagcatctacacgcagaatctcaccactgtcccttatgtaagctgacctttctgagtacccacatactttagttgccaaaactatctgtatacagaaacaatgaacatcaatatcaatttttataacttcgattaggttttgctgatatcatatacattcgtgaccaatatgcatccaaagtatgataaatggttgataccttgtcacgttgctgagacttcaaccagctactgatataaagatccgttttaccttgcgtctccttcttcatcggtatgggatactggaaataaacaatgatacttgaaaatttaccacagactaagcagattccagaaagctaaacacaacagtgctaaattcaccagaattatatataaagtataaaacattcacataaacacttgcaatcaaattcaccaggcaagaagagaaagatgaacaatgaagataaaaactcacagcttcagcagtgtcaatgcaattgatgccctcttcaattgcataactcagcatctcatgagattctttctcagtattttgctccccaaatgtcatctgaaattccaaatttcatcaaaacttcaaaattgaacaatggactacaattgcaggagataaagagagattgttcttacagtgcccatagtaacttcgctgatgttgagatcggaatctcctaatttcctatactccatagcattcttcgtcgacgctttcgccgaaactctcaatattctcctccgagcattcggcgatagagtaacacggcggcgcgtgaatgccaaacgaaagactcctcgaatgttactgctgctgaccaccggagtgaccgttgagtaggtgacgtaagatgacgccataccggaggttgtcgtggacgtggttcttctcgccttatcgccaccattatctactgttttgattcacgtatttgaatactctgggctaaacgatttgggcctaatgtaagaggcccattagagtcaaaaatatatattgaataatatcttgttttcctaatatgataggtctaatctcagatttcgatttatttcttcgagataatatgattatattagatgacgtggcggtacatccttcgatatcttcgataaatacgcaagagtgagcttcacggtcagacaaaagctgactctacgctctctcaaaagtcgaatatcccaaattcgatccgttttccggcgataatctccgatctagatccg

SEQ ID NO: 7118 - DNA, 3000 bp, Unknown
  misc_feature (1)..( 3000): cDNA_ID_1816720_gDNA_ID_1621128_Annot_ID_56413 3000 nt of promoter + ATG
aatccaaaatttaccaaagaatattaaaaaaatcaattaccaacatagaaaattacaaaatatcgaaaatttcttaactcttgtccttttatctatttggtcttcaaaaatcaaaattctgttggtggcagtttttttcccaaacaaaccattgttgcagtcagttgtatgtttggcattgttcgtaacttttgttaatatttcaataaatattaattgtgttataaaaagcaaaagaatgataaagacgatatgaactttagaccaaggagataatataacttttttttccctataccaactttagactaaccaacaccttgattacctatttattttcttgagagattttgtgtgccacatataatggaaagaatcatattctagtttaaaacaaaaagcaatatgtctttgaataattaattaatctcctattataattatcacaaaaataattagcggtttaggttctctagaaataacctttattcaaaactgaagtcagatacgacaaatttattgatgtgatatcatattattttacgcatattaaccttgtccgttggatttgtaaagttgtaacggttggaacggatttgcaagacaatttttaaccatgtatatgattttttttacaaatagtaattgcatgtttgaggtatccgataagcttattggacagcataaacctgaatattaaaaaaataggtttgaagtaaaataattatatctattttacaacaagaaaaaaatgaaacttaacgaatctaactaacggttctaattcataaccccagaaaaaccttctcggaccaatttttaaaaatcactgaaaaaaataatatgatccaacaaaagaaaacggcttaaatcccaaaatcatataaaaactaattgataaaatacaaaatgtggctaattctagaatcctacaatagataaggaaccaaaagttgtaaggaagaatgacaaaggtaatgcttggagacatcagaagctcttctgaagcctacctgcctttgtgtgtggaggagaagagaagaactctaagcagctttaggcttgggagtcctcttcttcagaatcctcttggagctcgttgttgaattcttcattccgatgaaaaatagcaatgccccgagaagcgcaacactctgtgataaaacattgattcaaaagaatgagaatcatagaagaaggttcagaagagccataaaggaatatactttattcagactaggttcagctcgaagaacatggcaagagcaagccaaaacgaataaatgaagaaaggtgtatagacaaacctgcaagaattcagtcaatagaagagagaattggcggtcctcgggtccatagttgtagaaatcatataaaatgggactgacaaccaccaagtagacagcctaataagaaacaaagaattgaaatccaaagtcaatacaacaacttaactttttgaatacttaaacaaaagtgaagaaatcctaaccagaagataggcaccaaagatgttgccgataacaaagagtaagcctcctaggcctttcagagcaacaatagcccacacgacttgtttcacctttcaaaattagttttccaagtcagacgcaacatatatatatagacagcataagagacatgaagacaaggaatcaacgcaatgggcatacctctaagttgggcaatgatactcccaatatggaagagagatgtgctttggtcagatcaagctttggagctaactctttagctgctggaccaccgtcagttccaaagtcattgaacctaataagaattccagagaagcatagttcggatttcgtaagataatcgacaaggggatacttataaagcctctacacatatgactagtaaactttcaagcaaacagagatgtgtatacaaacaatttagagagctaaatggtgtttttcaggatggaattggactagcagaacctagaaaccaatccaccgtatctcacttcaccatatatcagacacaaatagtgaagaaacagactcttggtcatctaagtagatagagatcatatgaacaacagagctattaaaaggctcaagatcagagataccacagtctcttggaagctaactctattttaaaagccttaaagagaggttctcaatcaaatcggatctagcaagataaaatcaagcaagggattatttagacaagccctagatttaaccctagatgtcgcttagaccaaatcaaacagtttagcggaagattctcaatcaaatcggatctagcaagatagaagttcatcgaagaagatgtcgaaccctaatccaataaccggagaaacgagagaagagatggagggaataaagaagaaaagactcacatttgccaagcggagaggatgaataaagaagcgaagagaactcttccaagaaaagagaagaaacccattttctctatgtctccttgtgtcgttctaggtcgcaggtggtctgatttgtcgtcggagagacggatcctttctcggtgttagcttaaacttcggttcctctgcttttgtctttttttttttcagagagaaaaaagattaatttatataattaaccaattaaaggtggaaaagaaaagctaaaccgaattgaaccgaagtatctaaattaaaatttaaaccgaatttttatcatttttaaaactcaaccaagaagaagatgaaaaggcaccgtcatgctgacataagttccagtcccaatcaacaaaaccggacatacgtttttgatcaagctagagcagaatcaattgatcaagaaccaaactaaaccagcagcaaaacaggacgtacgtttttcaaccatacaattctcaaattgtcgtttctatcttgtcttctctcaccacaagaatgcaaaaacataaatccatttttcttgataaccttcttcttcttctttttgtatatgtatgaagcagctttttgtgaatgaatcttcgaaataggttaaagaaacaaaaatg

SEQ ID NO: 7119 - DNA, 3000 bp, Unknown
  misc_feature (1)..( 3000): cDNA_ID_1816716_gDNA_ID_1621128_Annot_ID_56416 3000 nt of promoter + ATG
aaatctttctcttacttagttttgcaaaattatcacattaaatgttttacaagataagttggtgtagtagttgttttgcgagtgtgagttcggtttatcttggtatagtataacatcatccggtttactaaggctttaagttgttgggctgtttagtgttcaaacatttgattaaaccgattaaaaagctactatacattaacagccaagggtcgaagaataaacaagacagtgaatttttaaagctgtcgtctgatccacagataggtgaaagtttgatttcgttattaattagtgggaaacaaatggagatttgctgaaacgtactctcgataacagttcatattcaagactcaagagaatctcgtatattctaaggaagacgtacctaaacagaaagttggtcccaaaaaacgagagaaggaatgaaagatcaaggatacatgttttatatacatgaaaaatactaaattttaaaagaagtattaaacgtttttataatgtcaccggaaagaagatgtaaatgtattgatcaaatcatctgactataaaagtaattcaaatcaccatttttttaaatcaatttgaatatttgatgaatttccgtatataaacaatcagtcccgctcttgctgtataaatgaaacgtctatcaaacattagctagtcttgtactggattgcctttacagacaaaagattatactgtatatgtatgtggtctcatgcaaaaaaagtaaaaatgattctgtgtacatctgttttgatttgcatatatattggcttaagtggcaaaggtgcatgcactatttctatttctttgataaaagttttatgatgcatgcattcttaccagtgatttctttaaaaggagaagacatttgttttgtaatagtgacgagaatgtagacagaaaaggaaaggaatcagcacgtgttcatcgctcgacacgtggccaataatagcattggattcagaaaaaaagaaaaagaaaaaagcgaaaaaacctgtataacaggaaaaaaatacaatctgcaccagccgggaatcgaacccgggtctgtaccgtggcagggtactattctaccactagaccactggttatttatttaaaagatttatattggtataaaaccttgaccataaaatgttcctagtgcatccactaagatcaaattcatattaataaacaaaaacataaaattcaaaccgatatagcaagattgctgttagttttgtcttctaaatctgataagtgttcgttattgtcgaggttatgtagctagtttatatattacttgtactaaatttcaatagggcaatcaaaatatacggattttcatgtgtatatatttttctaaatttgcggtttacaaagaaaagttagtggttgatcatattgatttcttgaaagggaaatattaccaataaaatgataaaattgccaagaaaaattagtagtacgatcgataatttagtgatattgggatccaaagagatgatcatgcacttagttaagactccattttctgataagagttaagtggcggtagacccacaaagaaatttgattcggtattgttattattgagtagaaaaacaaagatggagtgtttaactaaatcatgtctaataagtagcaaggtaggtcaatataacgttttacaaacgaaaaatagcattgcatatttaattatctaccaaatatcttaagtcagtcgaataaactaactcattatgttatcaaatcagccgcaaattgtgccgtttaagtcaatactatttttaacttagatatttagtgagtagacttcatacttgcatagtctagtagttatcattgtttaatgcaattttttggttttaatgtaaacttatactactatttggtcatgtaatctcactttctaaaaaaccaatgtaatcatccataatagaaataaaacatttatttaatataattaactaatttttaaacattaaaaagaatagatttatttttatacataaaataatagaaatataaatatatatatatattattataggttgtttattgtaatccaaaagcagaataaaatttgggataggtattaagagtcataaatcttgaaaatagagtcattaattaataaagctgaaaaggaaagattaaaaaaagaagaagaatcctctaaaattgaatttggtaagagtccacgtaggtcaagaagaagaagaagaagatgtcgtgctcgtgttgtgttccaaacgaaaagcgtctatgttctcttcatgtaccgtttctgggtcccacccccctttccttcttcactctccccccaattcctccctctctctctctctctctctctctctctcaccaaaacgtaaatctactctctctatcgcagcagacacagaaaaagagagagcgagagactctgctcacacacatatttacttccctaacttgtctctctctctacacattctggtgagtttcgtaagattcaacaatcgtttagacttcttcttcttcttcttctacagcttttacgttttctggaaaagagatttttggctgatcactacgttgcaggtatatgatttctcaaatgtgagatgggtttgatgttccttttcgctatttctcatctgattttgaattttctgcggattttgtgaggaatcggtagattttgatgtttgttcttgtgggtggttcataacttcatacatttaggggattaaaagaaaattaatttacaaattcggtccttgttgtgaaaaagatttataatctaaaagacattaactttactctctccttgaacaagttttgaattttgaatctttttctgattttgattttcactatgttcataggtaattgcacaattctgggtatacaaaatccaaacgttacgcatattgaattgaaaaatctcgattttgagttctgggtatgaataaaaatctcacctttttaattaattcttactcagggaaacagtaatcg

SEQ ID NO: 7120 - DNA, 3000 bp, Unknown
  misc_feature (1)..( 3000): cDNA_ID_1816712_gDNA_ID_1621128_Annot_ID_56417 3000 nt of promoter + ATG
caatgtgccttcaccttacaattgggtggtctgcgagtttatagccttcattgttctctgcggcatgacccatttgctcgctggtttcacctacgggcctcactggccttgggtcatgacagctgtcactgtcttcaagatgctgactggtatcgtctctttcctcacggcactctcgttagtcactctcttaccattgcttcttaaggctaaggttcgtgagtttatgttgagtaagaagaccagagagcttgatcgtgaggttgggatcattatgaagcagactgagacgagtttgcatgttcgtatgctcactaccaagattaggacgtctcttgatcgacacaccattctatacactacgcttgtggagttgtccaagactctggggctcaagaactgtgcggtttggatcccgaatgagatcaagacggagatgaatcttactcatgagttaagaccgaggattgatgatgagaatgagaatgagcattttggtggttatgctgggttctcgataccgattagtgagtctgatgttgtgaggattaagagaagcgaagaggtgaatatgttgagccctggttctgtgcttgcctcagtgactagccgagggaagtcaggtcctacggttgggataagagtccctatgcttcgggtttgtaactttaaaggcgggacaccagaggcgattcacatgtgttatgcgatattggtgtgtgtgcttccattgagacagccgcaggcttggacttatcaagagcttgagattgttaaggtggtggctgatcaagtggcggttgcaatctctcacgccgtgattcttgaagaatctcagcttatgagagagaaactcgctgaacagaaccgagcgcttcaggttgcgagggagaacgcactgagagctaatcaagccaaggctgcgttcgagcagatgatgagcgatgcaatgaggtgtcctgtgcggtccattctcgggttgcttcctttgatacttcaggatgggaagttacccgagaaccagactgttatcgttgatgcaatgaggagaaccagcgagttacttgtacagcttgtaaacaatgccggagatataaacaatgggacaatccgcgctgcagagactcattatttcagtttgcattcggttgtgaaagagtcagcttgcgtggcgaggtgtttatgcatggcaaatggttttggtttctcagctgaagtttatagagcattgcctgactacgtcgtaggtgatgatagaaaggtctttcaagcgattttgcatatgcttggggttctaatgaatcgaaagatcaaagggaatgtgactttctgggtttttccggaaagcgggaactcagacgtatcagagaggaaagatattcaagaagcggtttggcgacattgctattcgaaagaatacatggaagttagattcggattcgaggtaactgctgaaggtgaagagagtagtagtagtagtagtggtagtaacctggaggaggaggaagagaatccgagtctcaacgcttgccaaaacattgtaaaggttggtcatttgtgttttgtatgtaaatgtgctaatgacttggtttaacacttttatcttgttttgtgacagtatatgcaagggaatattcgggttgttgaggacggtctaggtttggtgaaaagcgtctcagttgttttccggtttcaactccggcgatcgatgatgtcgagaggcggtggatattctggagaaacgtttagaacctcaactcctccgtctactagccactgatcattgacgtcaggaagggggggaggggaatgtagtgcaaaagaaagatttaaggggtggaatctgagaatttgtaaaaacagtaggggctttaatgagattaacagagagagtactaaaacgttgtcgttcggttgtaaaaacctgaaagttaactaggttttaacctatcgtgtaggcaaaaggtatgatgcagacttgttgtaacttgctggtgataacagaattcaaagtaaaaaaatgtgtcggaggatgttccttacggatttgtgatttacaagcctaccaactcctttgtcaaatattgtgacgttttagatgaagcttataaatttattgatttctgatccagaaaccgtatacaacttgtatccacaatatgtatccaggtacatattaacttcgaccttttaattaacttttgtttttaaaaggtttatgtgattttttttttttaacattgaggtgattcgtgcgacctctctttctctctatttatctctctttcttttcctccgtcgtcttttttggtttgttctctctctgtagaatctcataggagctgccattagcccattcaacgaattagcttctctttgctctttcttccaccatctcaggttcgcttcgatctacaaccaataagcttcttctatatctcctcctttgttcttcggattttgcgaggctttatgttccgattacagtctttcattttgataccacaccgattttgattttccccgatcgttgatttcatctgggctttgttttgttttccgatgtctttgatgaaattatgaggtttctctggatattttagctgattgaaatgatatattgcttcgccgccctctaatttttcggctgatttttttttgtttgtttgtaattttaccaatctaattttgaaaattggaaattagggtttattgcccatcgattatctgatgtgggttttaaagggtttcgattttttagccatgaattcgttatactcacggataaaatctagaaatgattgcggattggtatagtttgagagagccagatcgttgaatatctttgtccatttcaaatcatgacttggcatattgttttctgggtatacataattgtggggattacagaattcaaaatctaatttatttgctccaatcgttaattgctgatagttgaaggagagagagagctttgacgaaacaatttcatactgggga

SEQ ID NO: 7121 - DNA, 3000 bp, Unknown
  misc_feature (1)..( 3000): cDNA_ID_1008621_gDNA_ID_1621128_Annot_ID_56418 3000 nt of promoter + ATG
ttgtttttgttcttcgatgcaaatctaggatggcaatgatggagaagaggtcaacaaggaagccgatgagcgtgatgagagacgtttaactgaattgggtagacgaactgtggagatatttattctttcccatatcttcaggtaacaatgtgtaatatgtttctatacggtatgccattgtgttcttccttgatgtgcttacatatattacttccatatctctgagaactgcagcactaaaatcgaagttgcacatcaagaagctatcgcgctaaaaaggcaggaagaacttattcgtgaggaagaggaagcgtggttggcagaaaccgaacagagggccaaaagaggagcagccgagcgagagaagaaatctaagaagaaacaggtgtgagactttcttctccttctgcttgtcctgtacaacttgttggatgctgatcggagtttctttggttcttgaatatttataggcgaaacagaaacggaacaaaaataaagggaaggacaaaaggaaggaagaaaaggtgagttttgcaacacatgcaaaggatctcgaggaaaaccaaaaccaaaaccaaaacgatgaggaagaaaaggattctgtcacggagaaagcacaatcttcagctgaaaagcctgatactcttggagatgtgtccgacatatctgattctgtggatggttcggctgacattcttcagcctgatttagaagatagggatagtagttctgttctttgggatactgatgccttggaaattcatcctccatcatcagaagggagcagtagaggaagaggcatttcgatatctacacccaatggaattacagaaggaaagagtcattccactatggatgatagttcttcaacttgttctaatgattctatccgatcgggggtaaccaatgggtcctaccaagggaattccttgaatttccgaaaccagaagtcgccgaacaagtaagtttgtttcggctgtcctttgtttcttgtcagtcctgaatccttagtgatacgctttgtgacttgcagaggaaagaaccaacaagtgaaagcaatgactgatgcccacagtttagcgagtgaaacagatgatcaaccctcaacacttggaacagaccccaagggtcagaattattcttccgaggcaagcaacgttggtgaatctgattgggttgttgtctcccacatccaggagccagagggttctcgaaatcgtattcctgttgggagggttcgtcattcatgcttttaatgttttgaaattagaagatcgctgattgaattattggtttcgtgcaaagaggtccagaatttcacaatttagttgtccctttttcaaattcattttgcaggaacgcaaaacggttcaatccattgtgaactcggtcgacatggatcgacctaaagagaaaagcactgctgtactttcttctcccagaaatgttgccaagaatccttcaccattaactcagacaaaaccggagaaaaagagcatttcaaccgcagacggtattccaaacaggaaagtactggcaactggaccaccttcatcaagccaagtagtgcttccttcagatattcagtcgcaaactgttggtctcagagctgatatgcaaaaactctctgctccaaaacaaccaccagcaacaactatatcaaggccttccagtgctccaataatccctgcgatgcgaccctccccaatcaccgtctcttcctcagttcaaacaacaacatcccttcctcgttcggttagctcagctggtcgtctaggtccagatccatccctacacaaccaacaaacatacactcctcaatcctataaaaacgctatagtcggtaactctcttggttcatcatcatctagtttcaaccaccacccaagctctcatggagttgtcccgaccacattgccatcatcatcttactcgcaagcaccaacatcatcttatcagtcaagcttcccttacagtcaagatgggctcttgtggacaggaagaagtcccagttctgtaaacatgggcatgtacaacaacacttactcacccgccgttactagcaacagatcgctgaaccacatggacgttcagatagcgcagcaacaagcacaaagcatgatgacggatgagttccctcacctagacatcatcaatgatctgctggaagacgaacagtgcagcaacatggtgtataacggaagcatattcaatccacaaccgcaagtgttcaacgggcagtactcatcataccatggtgagttattgtctggtggcaggaccaggagtttcggagaggaaggattgcattacatggcacgtggaccatatggtacagacggaatgatgccgagacagtggcaaatgacgaacatggacttgtcgttgccagcaatgaggagcaatggaatggaagatggaacatcatcagcagctaattaccatcacagttactttggtttggacgcttcgaatccaagttttacgtctggtattaatggctacaccgagttcaggccatcgaatggtcattgatcagcaaatggagagaggggatttgtaatgtttttattttttttaaaaaggaaaaaaaatcatgaatatacaatttgtgtaaagagagttgtcttcttgtcatcctctacgtttcaaatggtttttttttttttaaatatagtataagatagttttcgcatagaaaaactcttccctgaaagtccctgaatagtttttataaataaattatactcctctttatctttaatcaaaagaaactgaaatctgtctaatataaaatgtgtgtgtgtgtgtgtttttttgtctaatttatttttttctttctttgtctaatttgattagatcacttctttatttgaatgagtaaaaactagaaaaaaatgtgagccatttaaatctgattcatatcaaaaaattttcgatttaaaaaaaaaaccctcaaaaggtgttgatacggaaaaagaaaagggaaagaagaagaga

SEQ ID NO: 7122 - DNA, 3000 bp, Unknown; identical to SEQ ID NO: 7116
  misc_feature (1)..( 3000): cDNA_ID_2105637_gDNA_ID_1621128_Annot_ID_172384 3000 nt of promoter + ATG

SEQ ID NO: 7123 - DNA, 3000 bp, Unknown; identical to SEQ ID NO: 7115
  misc_feature (1)..( 3000): cDNA_ID_2126339_gDNA_ID_1621128_Annot_ID_172381 3000 nt of promoter + ATG

SEQ ID NO: 7124 - DNA, 3000 bp, Unknown; identical to SEQ ID NO: 7114
  misc_feature (1)..( 3000): cDNA_ID_1816768_gDNA_ID_1621128_Annot_ID_172378 3000 nt of promoter + ATG

SEQ ID NO: 7125 - DNA, 3000 bp, Unknown; identical to SEQ ID NO: 7113
  misc_feature (1)..( 3000): cDNA_ID_1816771_gDNA_ID_1621128_Annot_ID_172377 3000 nt of promoter + ATG

SEQ ID NO: 7126 - DNA, 3000 bp, Unknown
  misc_feature (1)..( 3000): cDNA_ID_1567547_gDNA_ID_1621128_Annot_ID_172376 3000 nt of promoter + ATG
caatcccacgttccctcgttgaaaataatcatgatagctcaacaacctataatcacacattcacaatcagattcagttttgtgtgatcaagtccatttacaaggcaaaaagaaataccttttttcagtccatccttgcatagaggccaatgtcgaggtcaagagcttcacgtaaagagcctcgcgatcagacttcttggcgtcattggcaacttcagccaacatggcgtgagaggcaccaagcaagtctggctccatctgtgatgtcacaatgtactgatgaaacagaacccaagtgaaacacaagttatgtatagctcgtgtgatccccaacattatccatgtcttcttcatcagttctaaaagctcatcgatttcatcaagaaccaaggtctcatcacgtatgtcaaatatcgactgcaaaagcgccacatagagatggatgttaagtgggtatccatcagcccaatggcatatatcggttgttggagtagcgttgcgccatgacaaggaggcgacaaggttacataatgtcggcattatgtctgagtttttgctagtgtcgatggcttttgtctcactctggcggatgatttctcggagacgcattgcaaagttgttggtcttctctagagggattgatgggtgaatgagaagaccagcttcaaggactttgagttgccgtctttgccaaatttgatactcatgtacatcaccaaactccgatggtttcacgtgacggagaagctctaacggaaggattattgtctctgctcgcctaccggtctaaaaaataacagttataaacattttattaattaatcaagaaacagagtttcattcacaatttaaaaacagagcaacttacttggccaacaagcgtcctcattagggttttccgtagccgagtgtcactctgttctgtcaccttcatttgctgcctcatgatttctgcagaggttaacggtcgtcgaggccgagcaggcgggactgtaaaaaacccagccccagggctaaagtgtcctgaaccacttcctatgcttccattattacctggggatgaaggagctgagacggcccctacaactgtccctactgtcgacattcgcctagaaggagatcgtttaagcatctttaaccctagcgcccgttttactcggcttgttggtgttgtcaacacttcttttcttcctaaagacccgaatccagagccgttagatgatccagatcctcctcctcctcctattccatccccttgatggtcaccagcattgtgcttggagtagaatgtgagagcatttctacctccaaatccaggtgatgatcgacatgcggcgaaaaagatctcatacgcggtttcacggatttcatcccgatcaagaccatcaagcttcccgaatggccaaagaagatcggtatcaggacaaacctcaaagccaaccatgtcgaaaaaggactccctccgagaatgacgaaccatcacggaggggaggcaagaaggaaatagaaaccagacggatacgggtttaagaaatcagatgtccgagaagtgaggagagagaaggagttatgtgtttttaataagggaaaaatgagagacaacgaacaaaaaaacagagaaaaatgaggaggtggaggaagacgagagacaacttggaaaaagctaggcgacaacaaatttctctgtgctaaggaaggagagaggatgtgagtaaaatgaggaagcctcatgaaaacttaaccataattagcaaatctcctattccaagtaacttttgccaagccgaatctcttgtttttcgtaaattccatatgtattctcttccatatacacaatcttttgagagagaaaaacaaaatccaacctcacttttgttgacaacagaatccagcataaaacattgttgggaaacttgttactcaacatacttttgcacctggttgttgttgtagttgatgtatccggagaaaagaagataagattcgggtcaatacttaatctcaattctgtctgcagcagttacttaaacggtgtcctttaattgttaactggataactatattttttatgatcttatgatgggatttgtttcaaactttcaattaaggtcaactatatatcaatcaagtggcactggtcaggacctgatcattgattctttcagttatcttttaactttgagaaatatggaatctcataatcctcaagcaatttcagattttaggattcgacaaatattgctaatcaaattgagttctatgaaaacaactataacagaagattatgaagaaatacagttattacaacttacgaccatgaaacttgtacaaataatggattcaccagaaaccaatccaaatatcttatataacctcaaagcttattctatcgattctagatagcaaactcgttcatatatccatcaacaggcaaaaaacacaaagactctaatagaggatattttaaataactgtttgcattttaactgggtatatacggtttaataaccgggttatagatttaattgtctaacagttagagttgccacaaaggattctcagatacttcgagaccaaaaattaaactgagagatgttgggacccacagtaaagtgggaaccctccaaaaataggcgtatgccacttagcgtggagagcacacggtattctttagtaaaaggcgaaagaatagttcgctatgtgctcaccacatggctgcgtggttcgagaatatggagagtgaagtctatatatactaaagtttcccttggcaaactctctcacctttccgatgtgggactctccaaatagtgataagacgcgtctgatttaatttaaaactctgcttgggcttttatgggcctaatatactttgaacttgggctaaaaaacgaaatcgtttcttcttccattttttaagcctactgaaaccctacaagaagaatgcgtcactatatattaaaccgaaatcgtttcttcttccttcaagccgtcaacaatg

SEQ ID NO: 7127 - DNA, 3000 bp, Unknown; identical to SEQ ID NO: 7112
  misc_feature (1)..( 3000): cDNA_ID_1816779_gDNA_ID_1621128_Annot_ID_172375 3000 nt of promoter + ATG

SEQ ID NO: 7128 - DNA, 3000 bp, Unknown; identical to SEQ ID NO: 7111
  misc_feature (1)..( 3000): cDNA_ID_3049838_gDNA_ID_1621128_Annot_ID_172374 3000 nt of promoter + ATG

SEQ ID NO: 7129 - DNA, 3000 bp, Unknown; identical to SEQ ID NO: 7110
  misc_feature (1)..( 3000): cDNA_ID_3049843_gDNA_ID_1621128_Annot_ID_172372 3000 nt of promoter + ATG

SEQ ID NO: 7130 - DNA, 3000 bp, Unknown
  misc_feature (1)..( 3000): cDNA_ID_1816706_gDNA_ID_1621128_Annot_ID_172410 3000 nt of promoter + ATG
ctctttgtccaaataattccataatattttgacaaggaaaacattttaaactcatacaaatactttgaagataatattatttatcaaaagttcaaaactatcactgtatcacatattgacgcaaaagttttttttttttttttaacgttctataataacctaaagagtgtcaaacattgactaatatttgaagtttttctaatgcaaactaaaaaagaaaaaagaaaaagaaaagaagaaacagatccctcaaattaatgaggaaaccccgaggttggtttacgaacccaagttgagtaaaataaaagattagtagtaatatgtggataagaaaattgtaaagttggctttatggttaaagaaaatgggaaaaaaatagtggtggttagattgaagtggtccagatacgccgtcaaagcaaaataaaactccaaaatgtagcggcccagcccatttaattactcctataaagatggtccaattgcaaatgaaaatgtgttaaaatttcggaaagcattatttctactacgaaggaatttaactaacttaataaagaaaatattctaaactttggaccacaccaattattatacaatgtgttgatttctattgtaaatcatttatatcaacaaaagagtcataagtacactctaatttcgttggttaagtgctaaaaatcttgcgcggtttagctttcggattagattttataaagagtgctataatcaaccagcgattctgtgatcagatgtgggacctgcatcttctgtcattggttacacgtgtacggttgatacggtggcttgagatcttctactgctctgtagggcaagcaaatatttgagtgacatgtgttatgattaatcatgtcggcaaatacaattacgaacgaattatcatcattatcttcacttctttggctaaattgctaatggatattggaggaatttattaggttttaatccgacatataagagtatatacaaaagaaaaatattaatttttcaaattttattttagaaaaagtttcatgaaatattttgcgttaactgctactatagtaaattcgtgattgttacttaatggtctaatttatcctttaaaaaaccaaaacaaatcatttttgtgtgattagttgttgtagctaagacattgtcattttattttcagtataagttactaaattcgtttatatatataattaaattgcaaagtatgctacagtatgacatataatgagtgcagaaaaataaaagatgatgccataatactatagtgaatgagaaaagcctgcggatattcatgcctaataaaagtctttaactccttatggataagatatatatgggaatacaaaacatttaatttatatttattttttatcttacgttccactgacggattataaataaattttttaggaaaaactttatatttgtttgtgtgtgcaaactttatattacatatattagtcatcaaatgcttctatatattgtgaccaattcacaaataatgatataaatatatatatattcccatcagtttttcttggtataaatacaattaattcaattcaaacttatgacctgttctgtcaagaaaacgaatctagtaatttatgactgaaccaagaagagaatgtttctcaccgtacagaagaaatcaatgcgtgatgagtactgagtagctgttagcagtcacctctaattgtatgaatttattttgttgaaatatgttcgttaatcgttagtacttgttgaaagtcactacgtacgtatatatgtagataaaaaaaaaaaaaaaattcttttaggattattgttacacgtataatgtaaagttataacataagttcttaacaactctttgcatagtaccgattcggacttcgatttcgaaagccatgcatgagaaaaccaaaaaatggagccaaaacttagatccggttcaattcgagtaggttatgtcaaagacgtaaacatctacaataggagctccatataagtagaatacaaccaatgccacgctgtaacataaacaaagacagcgagaatctgttaaagatctctcaggttccaaaacaaaactacaagaccccattatgatgttactgacatttaactaaagccttgtgctagttgatccttaaggaagatgtcctgtcgtgatgctcagttttatttcaaattcatatatacgtgtgtgtgtgtgtgtggtgatcatgattaataggttagagacagagagacaaaagttgtgggctttaacaaaccccagtaaagaacaataagtaattttgtcacgtaggctctgtttttggctcttcaacacccaaagtacctgttttttgaagatgtgagacataaattattacttatgatctcaagtcaataaactcatcaaatctgaactacccacaatccaaacattgaacactagctacctttacatatagagttaattaaccatccatctattgagaaaacgagtaaaatatgtattcggttgttgttcttggtaagaaaagattatgagcttacgatccgaaatttcttggttgtgataagttattaatgggagatagagagaggtgatatgcccatatggcataccacatgtggtgggggattcgaagatttgatctggaccgtctatcacaagaaagaaagatgaaaatattttgtttttgggtttggacagatgggagaaaaagaaagtgtccccacaaatgtccccaagaagatgggacacacttttgcctcaaagttgctgttactgctaccgacaagcttagctttttttcctttgtccttaattcagaaaacagtttcttctctctctaccagtatctatctttattctcctttaacttgtataaaacactcagcttcctcgaagcctctcatcttcatcatcagcagcttctctatatctctcctctctttcaaggataataaccaaaagcttttctttttatcttctcctgcaattcttgaagaa

SEQ ID NO: 7131 - DNA, 3000 bp, Unknown
  misc_feature (1)..( 3000): cDNA_ID_2993590_gDNA_ID_1621128_Annot_ID_172409 3000 nt of promoter + ATG
tctttcttttctatattattttaagttgtacagaaaaaatgaaccattttgtggtggagaacaaggttcaatagttcaatacatattatgtgtttagaactaagcaacataatatagatgtaaatatgtaacttatacttagtaatgtacatatcaaaaattttaaaaatatgactattacacactttaaactaaatatgactcgaacaaaagtaaaataatagaatggagaactgaaatatacttttctattaggttctttaaattctagccaattgatcgttttaacccatatacatatataagactgtagagcaagtgttgacgtaaagtaatttgtttgagtctcaaaagagttgttgctttcacatacaatcacattttacattttagtcaatgtaaacttattatttggttgtggatcgtttcaattgcatgcatgcagcaatgcatgtcatttggctgcattccttaaatgcgagaagtatattccaacaactaatgtaaatgagaaaactataaaaaaaaaattgaagatggacacaaatgaaccagtactattgatttatttttctgtgtggtagaatgttgagagttgtggccttgtattgtccacatgaaagtacacctggtcctcacacgttcttatcttgcaagttcataattaacacacatatatacctttgaaaataactcattaatttcgacaccatgcatataaaatacatgattagacctatatataattttcccaaaaaatgaaaaatatatataatcaagtgaaaaagcattaccaaaattacacatcaaattaagatggtctctatcgtgtgacaaagaaaatgtggtctccatatgtatccttgagaatactgatgatatatggatttggttgcattggttcaatctcattaaagtttcgcatacaatccatttatgtgtgcgggcgcatttttttgtaatcatgtaggctggaccgagaatttatattattcactggtttacaatttcatgtgaattccatagtgatcagtagatatatatattgatcagacaaagtagatacacattgataaaacacgacaaaatgatgtgatatataagacaaagtgacccaaaattcgattgaaaaatttggggtacgttgatttgaaaactcatgagagttttttgggatagaaacaaaaggagagaaaagggttaaagaggaggatgtagacaaggcaaggaacaaaagtagggtttaagatgttttcgcccctgaattttatttgatgtaacttgtccctttatcatctccatgtttttcttcttctcattaatttaaattttggctttggaatttatggtgatgttaattgtaccctctcttcctttggattttgatgccactcatgtcccctctcatagattttattagggtaggaatatgcctttttccctctttattttcatatttattgaatttacgttggttaattatggttagtacgcttggtgttatttaaacgtcccgtattcacagtttacgcctaactgattactttgaactaaaaccagtgtctagtagatcactaaagtcgaattttgaacgaaagtttgaaaattcgcaaaagcgccgtgaaaatacaattccaaaacatatcatttttgtttttggaagcgtgattgatgaaataaaaacaaaatatgttttggaagtgcgacagaatttgtttttttgtttagaaatgcgataatatagacaaattaatagaaaatgtaatacaaatttaggtgctttcataactacaaaaaaaaaaaaaaactaccctattgttgaaaactttcatactacaagaataacacaagcaatataaaagaagaaaaataattttcaataatcaaaaacagacattatattttagtagtcaatttaatctgtaaatatctgtaaagaaaattaatcaccaattttattgttaactacaaagtggtgtttataatattgcaatttatagtttgttaactacaaagtataaacattaaagagtaatgatgcgtttttatgtgtctagatacacatttcgctgtacgtgtttataggtgagtttttaatcaataaatattgaagatgtaccgtatgctttattttgtattggcatgagaataattatatacaagagggctgcgcttttattgtgggatgaataattgaatcatgtggatgtgatatgcataattggaaggttccggcgaagaatcttacggggaaaaataatcaaaatcatgaatatatattcattagttaataattatatttagaagtcaaaaagcataatatagttatattaataataatgtacatctctattgtaacactctcatatgagatgtctgcgacctcgccactcaaaagaatatatatttataaactatacgttgatatagtttttaagaccatatggtatatacatatatttagttagataccccatatcaattaatcggttcatcaccacttaattcacttggttgcttcgaatgtgtttcataattcacttgtaattttaaaatctttccttcacttgtgctttcgcttgtaatctcaaaatgttatatatctcttttaacgggagaaaaacgattaaagacggattaaaatatatatccattttgtatagtcaaatgcaataatatatacataatctacaagataaatcataagaaagattcaataacagtaatagagtaataacagtgattactgattagtctaaaagactaaaactcgaggatgatgacttaatcaaagggcttagattcatccacgtgtctaaaacccgtttaatcaaagatctcttaaatacgacatacacatgcagctacctcctagacagagatataatacagactcatctcactttgtattatttgagtgtttttataaaaccatttttccatcttcctcatcaccttcccaagaagaagaacaccaaagaagaagaaaggttaataatg

SEQ ID NO: 7132 - DNA, 3000 bp, Unknown
  misc_feature (1)..( 3000): cDNA_ID_1808541_gDNA_ID_1621128_Annot_ID_172406 3000 nt of promoter + ATG
agaagagttactatttcttgggttaatatgccaaaaaaaataaaaatatgtataggtaagcattaatgttttggtgataagagatttcaaaatggggtatgtacacgtactctttatccataaaatcataaatgctagaagacctttccacaacaacaaaaaatgagccctttgtaattattttatccaaacataattttggaacaattttgtgtaatcatatatatgttaaaaatgcagcaaggcagctcggatttgaggatccaaatgaatacccacaactatgcaaattagcaaatggatatttgttgaaaacaaaagggtatgatgagaatgtggatgagtatttggagaatgaagctgagcgtgattctctctatgttcatctccttgaagaatttgatagatgcattctcacttatttttctttcaattggacccaatcttccaacctcatctctcaggtactttgatttcaatcaaattcagtatatttttatttggtagtctgataggtgaagtaggctatttactacaaccattagcgatctccaataatgtgtatgaataataaatattatcctataacacaaaatgacaggctttaagcgatgagtcggatcagaaagttccaaaactcaaggatttcgtgatggcagcaacaaggtgattgattgttccatatccatgactttatatatgcatacctatagttacatacatataaattgcgttacccgtaatcgtcgttgcgtaatgattccaactaactgtaccaagcgtaacatataatgtagaactgactattaatctataactattaacaaacattgtagaactaattaatggctttgttaataatgtaggaaacagaggtttgagagagtaacaaaagatctcaaggtgaaaagggtaatttcgacattagtagaagagatgagagtcattgggagcggaagcagtgagccacactgtacggaagtaatgtctccggtggctcataacaaacgaagtcccgtccttctccttatgggcggaggaatgggcgcaggaaagagcaccgtcctcaaagatatcttcctagagtataactcttttttcttgtatttctttaacatatggtggttataagcctacttaatctttctttaaataaccagaaataatattttgtaggtcgttttggtcggaggcacaggccgacgcggtggttatagaggcagacgcgtttaaggagacggatgtaatttatagagctcttagctctagaggtcaccacgatgatatgcttcaaactgctgaattggtacgttgttcttagttctagctagccatcctcgattgtgtatatatatttggctttaacatgctacatttctggttatttccttatatatattttaggttcatcaatcatcaacggatgctgcatcgtccttactagtaacagcattgaacgacggacgtgatgtgataatggatggaacattgtcatgggagccattcgtcgaacaaatgatcgaaatggcaagaaacgtccacaaacaaaaatatcgaatgggcgaaggctacaaggtgtccgaagaggggacgataaccgaaaaatattgggaagaagaagaagaagaaacgaaagaaaatggcaaacaacaaaatctgaaaccttacagaatcgagctggtcggtgtggtttgtgacgcttatcttgccgtagcaagaggcatacggtaaagattcatcaagttttcacattttcgaaaatattttgtagtctttgttactcgttgttagctgctattatcatgctaatcgtaaccaaattttgtttttttataggagagctctaatggtgaagagagcagtgagagtgaaaccacaattgaattcacacaagagatttgctaatgcattcccaaagtattgtgagcttgttgataacgctaggctttattgcaccaatgctgttggtggtcctccaagggtaaattagtcaaaagtcaatatcaaatctattacgatgtcgtttttgggagagatactgatgtgtgtgttttaattggttggtggagcagcttatagcgtggaaagacggaaatagtaagcttctggtggatccagaggatattgattgtctaaaacgggtcagcagtctcaacccggatgcagaatccatttacgagctttatccggatccaagccaattaagcaaacccggttctgtttggaatgatgttgtgttagttccatcgaggcccaaggtccagaaggaacttagcgatgcaatcaggagaatcgaaaaggcccaaccaaaaaattgatgatatttgtgaactagacctttgaaattatcttcttcctgaatttgtcatttgtttccgtcagctttttggttaaataagttaataaaatggtttttgttgtgagttgacatagctagtggaattgagacccatagtcattggtcacgcacatcaaccaagaacaaattgcagtcgataaactaatattttgataacagttacgacttgatcctatcgtatataacttcgatttaacaaacacaagtcgtaatttctaaaaaacaattaactcaatttgtttgaaaataaaagtttcctttttcttcgtaacaagtgaagtcaaatgtttttcactcgtatctcttacaacgttttgatgagatgataagagaagagtgggcccacatatttgcttaacaatacacgttttagggttacgtgtcactaatgttattgggttcatttaatctgggcttaaaagaggcgtgtatcatgttgtaatattcccatttgggctttcatataatgaagttgggccgacaaaaaaaaaaaggactagggttcccaagtatcccactatatataattttagtcgaagaaaattcttttatttttctcttgcaaagacctctcagcagccaacgacagttatcaaagcttaagccgttttagggttttatccttttgctgagatccaatc

SEQ ID NO: 7133 - DNA, 3000 bp, Unknown
  misc_feature (1)..( 3000): cDNA_ID_2126383_gDNA_ID_1621128_Annot_ID_172405 3000 nt of promoter + ATG
cactcctcaatcctataaaaacgctatagtcggtaactctcttggttcatcatcatctagtttcaaccaccacccaagctctcatggagttgtcccgaccacattgccatcatcatcttactcgcaagcaccaacatcatcttatcagtcaagcttcccttacagtcaagatgggctcttgtggacaggaagaagtcccagttctgtaaacatgggcatgtacaacaacacttactcacccgccgttactagcaacagatcgctgaaccacatggacgttcagatagcgcagcaacaagcacaaagcatgatgacggatgagttccctcacctagacatcatcaatgatctgctggaagacgaacagtgcagcaacatggtgtataacggaagcatattcaatccacaaccgcaagtgttcaacgggcagtactcatcataccatggtgagttattgtctggtggcaggaccaggagtttcggagaggaaggattgcattacatggcacgtggaccatatggtacagacggaatgatgccgagacagtggcaaatgacgaacatggacttgtcgttgccagcaatgaggagcaatggaatggaagatggaacatcatcagcagctaattaccatcacagttactttggtttggacgcttcgaatccaagttttacgtctggtattaatggctacaccgagttcaggccatcgaatggtcattgatcagcaaatggagagaggggatttgtaatgtttttattttttttaaaaaggaaaaaaaatcatgaatatacaatttgtgtaaagagagttgtcttcttgtcatcctctacgtttcaaatggtttttttttttttaaatatagtataagatagttttcgcatagaaaaactcttccctgaaagtccctgaatagtttttataaataaattatactcctctttatctttaatcaaaagaaactgaaatctgtctaatataaaatgtgtgtgtgtgtgtgtttttttgtctaatttatttttttctttctttgtctaatttgattagatcacttctttatttgaatgagtaaaaactagaaaaaaatgtgagccatttaaatctgattcatatcaaaaaattttcgatttaaaaaaaaaaccctcaaaaggtgttgatacggaaaaagaaaagggaaagaagaagagaatggatctagaatcggtgaaaaagtatctggaaggagatgaagacgaaaaggccaaggaaccaatggtggcgaaattaccacacagattcctcgaacgattcgtaaccaatggtcttaaagtggatctcatcgaacctggccgtatcgtctgctccatgaaaatccctcctcatctcctggtaacaaccacatgaacaacaaatccctaatttcgagaaaaaaagaatccctaatgacttttgtgaatttgttgaggaaagaacgcagggaaattcttacacggaggagcaacggcgacgctggtggatttgataggatcagcagtgatctacacagccggagcttcacattccggagtttcagtggagatcaatgtttcataccttgatgctgcttttctcgatgtaacttcctttccttctttcttaaatttattagatgtctttctttgcaaaattgattgacatatatataaaaaaaaacacaggaagagatagagatagaatcaaaggcattgcgtgttggtaaagctgtagcagtagtgagtgtggagctgaggaagaagacgactggtaagattattgctcaaggtcgtcataccaagtactttgctcctcgttccaacctttgatcgttcaaccaacctttcttcttttttacattcaataaacaacatcaaggtgtttttagtctttgtcccatttgcttcttattattattgatactaataaaactacattactatatgtttttctaataatacaaacaaccttactttttctctatatgtgtttacctcgatgttgaactaagctttttttttaatatacagatagatcctgtttaaaaaatttggcttatatatttgttactgtgaatatgatgatcatttcaaggtgatgatgcatttgtaaagtattgatgaggtttgtggtggtaacttattagaattgtttatgtttcactatttttagtttcgcattatgattactttaagttttgatacaaagttggtaccatccaattatttcaatcaagttgttcattcctgccttttcttttactgttttctcacatccaacagatatgtagatcttctgttactacttttgttaatgtatgtgaagcaaaattcaaattaacatagacacatgaattcattaatcaaatttaatcagtgttcatgtatattatcaaactttgtagctcttatttgaaccaaaattcatgtatttttatcatcaaaatactccctttctttcttcttaaacttttatcaaatatatgagccacacgagtatatgacctttgattcaaaagaaaaggggaatagaatactgaacaaaggaaaatgacgcaggtgatgtgatcagttttgtcgaaaaagaatattagttgagatatgttggtttcatacttttgatctttttttgttagtttatgttattactgtatctattagacgatgaattacattatgcatagataaacaattaaatcactagtcattttggcaatcatactttgaaaaaccaccccatccgcaataagtcaagtcatcattaaattaccacatcatgcatgatatcaaatttcatataatattaatatctagtagtagctagtagtactatataataaacattaaataaatcccactagatgcattcttaagagaaatcttccaagaaaaattcagacatattagatgagaaaagaaaaatccaaactagaaatcaatgttgtgttgagttagtgcttaccctcgcagtctcaatctccttcccaaaaagacttttcaaaccaaaga

SEQ ID NO: 7134 - DNA, 3000 bp, Unknown; identical to SEQ ID NO: 7121
  misc_feature (1)..( 3000): cDNA_ID_1008621_gDNA_ID_1621128_Annot_ID_172404 3000 nt of promoter + ATG

SEQ ID NO: 7135 - DNA, 3000 bp, Unknown; identical to SEQ ID NO: 7119
  misc_feature (1)..( 3000): cDNA_ID_1816716_gDNA_ID_1621128_Annot_ID_172402 3000 nt of promoter + ATG

SEQ ID NO: 7136 - DNA, 3000 bp, Unknown; identical to SEQ ID NO: 7118
  misc_feature (1)..( 3000): cDNA_ID_1816720_gDNA_ID_1621128_Annot_ID_172397 3000 nt of promoter + ATG

SEQ ID NO: 7137 - DNA, 3000 bp, Unknown; identical to SEQ ID NO: 7117
  misc_feature (1)..( 3000): cDNA_ID_1012835_gDNA_ID_1621128_Annot_ID_172385 3000 nt of promoter + ATG

SEQ ID NO: 7138 - DNA, 3000 bp, Unknown
  misc_feature (1)..( 3000): cDNA_ID_1816790_gDNA_ID_1621128_Annot_ID_172371 3000 nt of promoter + ATG
cttctcatttcttaacactctgcagacagtccgcatctggggatgttccgaggatgggaactatacctctagacatacactgaaagatcattctgccgaggtaaggatgtaactgaagaacttctacaggctacagtctcatacagttttacgttttatttatttttggtctgtttaacgtaaaagcaatgatgtggttttcaggtgcgagctgtaactgtccacgcaacgaataaatactttgtgtcagcatcacttgacagtacatggtgcttctatgatctgtcctccggtttatgccttgctcaggtctccaaaattttaatccacacctgatacctgttatccagtttcagatttcttcttttatgctaatataacaatgaaacatttaccttctttattgtaatgtgaattagactcgttagaataaatgtttctgccatgcgtctttctcattattgttgttattcaggtgacagatgcttccgaaaacgacgtgaattacacggctgctgcttttcatcctgatggtctcattcttggaactggtaccgctcaatctattgttaagatttgggatgtaaaaagtcaggtaaaaactctttgaccttccttgctcatcaactgttgtcacttgtaagtttgttctcacttcactctcatctctatctctgtcgtttgataggcaaatgtggcaaagtttggtggacacaatggagaaatcacctctatatcattctctgaaaacggttatttccttgcggtgggtacattgactgattgacctaaactaagtagaaagaaggatagcaccaggttccttttgactgaccaatatttactattctttaaattgtacagactgctgcactggatggtgttaggttgtgggacttgcgcaagttaaagaacttccgaacctttgactttccagatgcaaactcgggtattcaactacctgagcactcttactagtctattttgttgagtgagttttcatttcttaaggcctgaatgagctttttttgtgcagtggagtttgaccatagcggatcttatcttggcattgctgcttcagatataaggtgaggtctactttgatacacaatgttgggaattaattgatataggagctcactttgataacgagatattgaaagatagttgtgcaaactcaattaacctgctatcaccagaaatgcagtttgggtatatgtatacgtttcttctgcaaatcatactaatcgaaaacttgtgcttcaatgttgtagagtattccaagcagctagtgtaaaagcagaatggaacccaatcaagactcttcccgatctgtccggtacaggtaaatgctacatgttaagcttttgaagtcactgctcttccttgttttattgagtctatcattcagacattgtaactacataaatgtgcaggtaaagcaacaagtgttaagtttggactcgactccaaatacatagcagtcggttcaatggaccgtaatctcaggatatttggtttacctgatgatgacaatactgaagattcagcacaagattcatgaagagatatctcaaaagtctcatcatcaagagtagctatatcctcaattctcgcgatttttgttgtatctttacagttctgttggtactttcctgatggcccctctcacaatcacatatacacacctgagctctctccctttctttctcagtcaacaattttcctgtaacaacatcgtaccttaaggatctgcagttgatctttctctctttgatctgaaagagtccacataaaacaaagttagctgctcactataaaagcaaatgaagaacaggcatgtaaatgatcttcttcatcattcaaatcagtaggacctaaacggcaacaattaaaaaacttgtgttatatagaaagggtcatgaatcttgaagacaatgaaatgaagacaaaaagattgtgatggtggtcatagaaattagaaaaccctgagacagacagagattttgactgtactgtggtcaaaacacacacttcacaatcttcccattcccccaccaatctcagattccttttcacttcctccaactctttctctctctctggccttttttttttttttttttcctatttatagctcatctttagtaattccgttattggttaaatttcctaaacatgtttttggtatcaacaatcaagtaagtgcaagaaagtttgtatctttctctaaacccaatttccaaagtaaccaactactaaaccagaatgttacacaaagtaagtcactaaatgactttaaaaacaagattagactttaaactagattagagacatacttatttggaataagattcaaaggtcactagtagctagtaggtggtaaaaaggaagctaaacaacaaataaactcttattaaaatctttcaatcaataaatatttattgtaatttgctgcagtaaatcaaacattgtacagtttcagaactgaatggctcagaagcgttaaaaggaaaaagagactctctctctctctctctctcccctaatctcctctcacatggtcatcaaaagccaaagccaaagccaaaaaaaacaaagaacccagaaacctagaagacagaaacaaaaatcaaagctttactgagccaccaagcaaccaattacatcaactctaaaacccataaaaccaacacaaagattccatctttcaatatctctacaatgagaaagccaatgctttgattttttcccccaatctttcttccaagatacctcaaagcaaaaagagaccacaagaagcaaaagagtctacatacaaaaatgggtctttcaatctcattcctcagcatcatcatgatgatgtgtctactgtttccagatctcaatgtcgtagtaaaatctgctacaacggaatacacaaccttaatctacaaaggatgtgcaagacaacaattctcagatccatctggtttatactcacaagctctctctgctatg

SEQ ID NO: 7139 - DNA, 3000 bp, Unknown
  misc_feature (1)..( 3000): cDNA_ID_2126383_gDNA_ID_1621128_Annot_ID_56419 3000 nt of promoter + ATG
atgacggatgagttccctcacctagacatcatcaatgatctgctggaagacgaacagtgcagcaacatggtgtataacggaagcatattcaatccacaaccgcaagtgttcaacgggcagtactcatcataccatggtgagttattgtctggtggcaggaccaggagtttcggagaggaaggattgcattacatggcacgtggaccatatggtacagacggaatgatgccgagacagtggcaaatgacgaacatggacttgtcgttgccagcaatgaggagcaatggaatggaagatggaacatcatcagcagctaattaccatcacagttactttggtttggacgcttcgaatccaagttttacgtctggtattaatggctacaccgagttcaggccatcgaatggtcattgatcagcaaatggagagaggggatttgtaatgtttttattttttttaaaaaggaaaaaaaatcatgaatatacaatttgtgtaaagagagttgtcttcttgtcatcctctacgtttcaaatggtttttttttttttaaatatagtataagatagttttcgcatagaaaaactcttccctgaaagtccctgaatagtttttataaataaattatactcctctttatctttaatcaaaagaaactgaaatctgtctaatataaaatgtgtgtgtgtgtgtgtttttttgtctaatttatttttttctttctttgtctaatttgattagatcacttctttatttgaatgagtaaaaactagaaaaaaatgtgagccatttaaatctgattcatatcaaaaaattttcgatttaaaaaaaaaaccctcaaaaggtgttgatacggaaaaagaaaagggaaagaagaagagaatggatctagaatcggtgaaaaagtatctggaaggagatgaagacgaaaaggccaaggaaccaatggtggcgaaattaccacacagattcctcgaacgattcgtaaccaatggtcttaaagtggatctcatcgaacctggccgtatcgtctgctccatgaaaatccctcctcatctcctggtaacaaccacatgaacaacaaatccctaatttcgagaaaaaaagaatccctaatgacttttgtgaatttgttgaggaaagaacgcagggaaattcttacacggaggagcaacggcgacgctggtggatttgataggatcagcagtgatctacacagccggagcttcacattccggagtttcagtggagatcaatgtttcataccttgatgctgcttttctcgatgtaacttcctttccttctttcttaaatttattagatgtctttctttgcaaaattgattgacatatatataaaaaaaaacacaggaagagatagagatagaatcaaaggcattgcgtgttggtaaagctgtagcagtagtgagtgtggagctgaggaagaagacgactggtaagattattgctcaaggtcgtcataccaagtactttgctcctcgttccaacctttgatcgttcaaccaacctttcttcttttttacattcaataaacaacatcaaggtgtttttagtctttgtcccatttgcttcttattattattgatactaataaaactacattactatatgtttttctaataatacaaacaaccttactttttctctatatgtgtttacctcgatgttgaactaagctttttttttaatatacagatagatcctgtttaaaaaatttggcttatatatttgttactgtgaatatgatgatcatttcaaggtgatgatgcatttgtaaagtattgatgaggtttgtggtggtaacttattagaattgtttatgtttcactatttttagtttcgcattatgattactttaagttttgatacaaagttggtaccatccaattatttcaatcaagttgttcattcctgccttttcttttactgttttctcacatccaacagatatgtagatcttctgttactacttttgttaatgtatgtgaagcaaaattcaaattaacatagacacatgaattcattaatcaaatttaatcagtgttcatgtatattatcaaactttgtagctcttatttgaaccaaaattcatgtatttttatcatcaaaatactccctttctttcttcttaaacttttatcaaatatatgagccacacgagtatatgacctttgattcaaaagaaaaggggaatagaatactgaacaaaggaaaatgacgcaggtgatgtgatcagttttgtcgaaaaagaatattagttgagatatgttggtttcatacttttgatctttttttgttagtttatgttattactgtatctattagacgatgaattacattatgcatagataaacaattaaatcactagtcattttggcaatcatactttgaaaaaccaccccatccgcaataagtcaagtcatcattaaattaccacatcatgcatgatatcaaatttcatataatattaatatctagtagtagctagtagtactatataataaacattaaataaatcccactagatgcattcttaagagaaatcttccaagaaaaattcagacatattagatgagaaaagaaaaatccaaactagaaatcaatgttgtgttgagttagtgcttaccctcgcagtctcaatctccttcccaaaaagacttttcaaaccaaagaatggtgaaacccttaggaggtaatggtcttcctctctgcatctctctcttcgtttaccagtaaacaaacaacaaaaacgtatttgaaataataaatactattgttttttatttctttttctctctctctctctctcttattgagttttgttgatttctttgctatagaaggaacaagagatgtctctaatgttggttgtaaatcagttgatctcctcctagcttctcttggtggtcttgccgccgctgtagcagctgcttacgccggagaattactccttcgacgccggaaacttgatcaaggtgcttcc

SEQ ID NO: 7140 - DNA, 3000 bp, Unknown; identical to SEQ ID NO: 7132
  misc_feature (1)..( 3000): cDNA_ID_1808541_gDNA_ID_1621128_Annot_ID_56420 3000 nt of promoter + ATG

SEQ ID NO: 7141 - DNA, 3000 bp, Unknown; identical to SEQ ID NO: 7131
  misc_feature (1)..( 3000): cDNA_ID_2993590_gDNA_ID_1621128_Annot_ID_56422 3000 nt of promoter + ATG

SEQ ID NO: 7142 - DNA, 3000 bp, Unknown; identical to SEQ ID NO: 7130
  misc_feature (1)..( 3000): cDNA_ID_1816706_gDNA_ID_1621128_Annot_ID_56423 3000 nt of promoter + ATG

SEQ ID NO: 7143 - DNA, 3000 bp, Unknown
  misc_feature (1)..( 3000): cDNA_ID_1816838_gDNA_ID_1621129_Annot_ID_56424 3000 nt of promoter + ATG
cgttgcgtttcataaaaattgtaaacagctttccaacagacttttttttcttaataggctttaaagcccaacgtcataactgtctttattaaacatgataaacggtagcataaaatctagacgaaaaatcaacattgttagacatgtaaatcatatgttaatagatttttgattattgggtacagaatttgtggttgttatagctacatgcatttatatatgtagtactattcaacttttcttgttgttacatgatttctatacgcttgattcgcattaatcacacttgttctattcatttgttccttgtttagctatcaccattcgatctcgtatatgtacccaacccaagtactgagtaactatttttataaatttatccaagtacgagtgaatcaagtatttatttttttagaccaacttttattctctacatatacttgaatcttgggatacgtataatataaaccaaccctctttagattttaggattgtatttttgtgcatacacagaaatctgagcatagacaaatggatagaaaccacatttgctttatttctatagagtttggacattttttggctatgattttgtaaaattgttgtgtgctccgtgttagcgtttgccgaatgtgacactaattttgatcgaacaaacaaaaaactgaacataaattaattaatttgcacacatgtttaacatctataaaaaaattaaaaaaaattgcacacataaatatagacaaatgtttggaataagtaaaacatgaatccaagtgttattaaaatcagtattttgttactacaattgcaccaacaaaattgtatgttcaaaaatttagcgcagtacgaatcattaataacttgtccctaactactaactatattcagatgtatgcctaacttgtaaatgttactcatggttgagtagttgaatgttgaagagcttacgttataattaaatgctcgctttgattgatgcaaacaatttcttcactataataagcgaaaataatagaaataataaagatggaaaactaacaattaatagtagaactatatatatatatatccacatataaattctttttttttttgaggggtggtttaaaactagctatttagctggatgctcggctattcggatttgtgtaaaatacttctaaatattgagcaataggtaaatatagtgaatatttaaccatgacaaacaataaaacacacacacatcagaggaaacttgggaatgaacgtgaacaataaaaaaaaaattaataatgataataatagtgggcatagagatggttcttcaacgaattatttcttgcccaagtagcaccgtttggttagaaattcttcgacatttatagttcaattaaaaattactactccataattttgggtgacttaccacacaatctttccacaaatcttcgacacgcaattcacaacagtatcatagtttattatcacactttagtaatttatgccaaacctcactacgcaagcaaactatgattcattagatgtgtggacaattacgacgacagcaaaaaaataatatgtgtggacacacaatgacaaactcacattgaactatcttgaaataaatttatactaaatcgtagcgaatatataatcagtaaatagaagttaaactgaagatcataatcaactaaaatgaatatcgtaatcaaattgatgataataatgatttcagacacaataatggtgacggtgttgatgatgaaaaggatctgtggcataacaactgattgaattcaatgcatcttcatgggttttattccgttagctttatctttcacgtctttatattctttaaactttgttatgttattgacatttaaattcatttgtatgcatgttatgaagagatcgtataactacaaaaatataaaggtaaatctttcattttaaaaagaaaatgtttctatacgtgtaaataattagtaaataacacatatttcctcctgcgcgtagcagttcaacaaactctcttcttcgcgtagctagaagctgcaataacataaagaaatgatatatttataaattatgtgaaaatgaaaaaaaatattagtccgcaatatccacgtatcattatgcgccacgtaaacaaagtggacccagaataacccttgtttccagtagaaggaatcaatcagtggcaagaaagaaaataatgaatttcattaaatcgccactctcgagccatcaaagtatcaaacaattgattggagttagttgtatccttcgcctacaaatttttccttactctgttttataagtatataatagttccactaaaatcattttggatacaacctcaatagatctcagcgtattgtttcctgtatgttcaatgaatccatcctccatgcaatctggagactggagtataaaataacacgtatggtatggtatttatttctcatagctagttccttaacagttggaagaatttatacatgacccggccctttaaaacctatccctactacaagacatttgggttactttccatcgacttttgaatgtgcatcaggcatgaaaatcctttaattatgcatattttataatcaatgcttaaattactataaacacaaaaattgtagtgatatattagaaagataatttaaattgttacattgaaaagataataaaaaattataaatagacatctgatataaaaatggatgaagtatagcatattaaaaaaacatatgtttttggtcaaaacagaatcaatgcatagttagctcaccgctacaacaataaccatagggactacgtaccatccataactacattttcttaaattgcatcctctttctaaaattttgcctataaattcacaataacacttcaactttttaggccataagttatctctttctctacaataagcaataaatctcacctcccttttttttttttttgtctcgctacttttgattatcatttaaaaccaaaaaacctacc

SEQ ID NO: 7144 - DNA, 3000 bp, Unknown
  misc_feature (1)..( 3000): cDNA_ID_1816834_gDNA_ID_1621129_Annot_ID_56425 3000 nt of promoter + ATG
agaaatccattcctctgttttactaacccttaagatgaagtccttatagtttcatattaatgatctatgctttaatattttttgatggacagttgatgcccatcctggagacgctgtataacgcttcaaagagaacatcatctaatcaaatatacatgatgctaattgtacttctcatacttagtcaggattcatctttcaattcaagcattcacaagatggtacgtgctatttccaatcatagggttgaaacgatttttctcaacttcagtattgtttctgattatgtgtcatttgaatagatactgccaagcgtgccatggtacaaggagcatctccttcatcagacgtctcttggttccttaatggtcattattctcataagaacagtgcagcataacctttctaaacttcgggtatggctttagattcatatcttagcaatgaaaatgtttttttcagacaaattcgttttagtttggcagtttgggtaggtgctaggtgcagctttataagagtgatgtcacgttaaaatcttagccagatatcaaaataacttttgtgacaaattctgtttcttgggctgttacaggatgtgtatctgcagactacttgccttgctacgttggctaacatggcacctcatgcccatcatttaagtgcatatgcctcacagaggcttgtcagccttttctacatgctttctcgaaagtatgcaattagttcctcgtctttttatgacttcataaatctgtttttgtacatattcctgtataacggatcatgaattgtttaacacaggtataacaagttatcggacttaacaggtgataagctccaaagtatcaaaataaacttgtccggagaggatgttggcgtttcagaagatctggtatgacatagttagttcaagcacaagaatatttcatgtgatcgttgctattccttgatttctggtacacttttttacatgtatcttggcaactgcaggcagcagagttgcagatctttactgatttcctgagacttgtcctagatatattaaatgcaattttgacgtacgcattgccgagaaatcctgaggtatcacttatttttctcagcagcatgaatcgcaaaaatcttttctagttttgcctgctctgattcttggtttctgcagattgtctatgcgattatgcaccgacaagaagtgttccaacctttcaagaatcatccacggttccatgaactggtggaaaatatatatacagtatgctgcataggctttactcgtttgatctttgtagctacgacttcctcttaaaattcagaaagaacagagtttctgattgatctatttgtttctcacttgcctaactgatcaaatataggtcttagactttttcaacagccgcatggattctcaaagatcagatcgagaatggtcagtgcagaaagttcttcaattcatcatcaacaattgccggtcttggcgaggtgaaggcatgaaggtaagcaacctctacacatatccatcactgaaatatttgaatcctttcccggtagctatagttgttaaaagctcttatctttcttccacttttctttttgttaccgcagatgtttactcagcttcacttctcatatgaacaagagagccacccggaagagttttttattccatatgtttggcaactagctttttcccgatggtaaccaacctaatataaacaaacttatctctttcttctatactacttgtcatcacgatgttgtaacaaagaacaccgctcacattcctctctcacgtttctttttgttcgcagtggattcggttttaacccagacgccatcaacttattcccagtgccacacccagttgaagtaagtacctaattccatccaaaagttagcctttgactgaatctcgtactttctgcgttttgcgtttgcatgaggaaacattgcaattgatgttatggattcactagagttaatacacaaccaacgcaaacacaagtacacaacaatcactagggttagatcgttccttgtaagttttggaagtggcacttgaattgatccttccaacggaatatgtgcagaaagagatagaagacgaaagaggagaagaatcagaagggaaagcgaaggtacaagagttgaacgaacagagaatcgtcttcgacccataaatatttttcgatataggagagcttggattggggccgtatgtgtatatatttatacggtttagggttcaaataagaaaaaaataccaaaaagacgttaattactttatccaatttatatgtttttttaacaatgtagctttcagtctatagattttatttcaatccattaataggtatcctctcttgtgtaataacgaattgagcttatggagtcttaaaccaaatattttccataacctcggaaaagttaaccttgcgaaagttaaaatgatcttacaaagtatacaaccttcacatctaagaaactaaatcaataacccgcttaatcccacgactatacctaaaagaatttccattatttatagaggaaaacccaaattacagaaagttactattctcaagaatttcttttttttttaactctttccttaagcgcgtgaaaggatttaagatgagtttgtaaagaagacatttttacaaatttcagatacgtttgtaatatatcggttatacgtcttgtcgagaatctagggtttctctctctatctctctctctccttccatggatttgtagcgcctccctttctccatctctccatagcttctgggctcgattcttcttctcgggcttcttaaccatgttcaattaaacttcgaattctcgtcctcaccttacagatctcggtgagaatttccgcctgtttaacctaattatccactttcaaaacctttgaattttctccgattcgatttctcggagatccagtggaggtctctgattcgttgcggtacttcaacggaagctattgggtgcattaaaatg

SEQ ID NO: 7145 - DNA, 3000 bp, Unknown
  misc_feature (1)..( 3000): cDNA_ID_1816830_gDNA_ID_1621129_Annot_ID_56426 3000 nt of promoter + ATG
gagcttgcggttccctgaaatcaaaactccaactcttttaatcttgagttagatgcaaaagtttgattctttaatacacccaagaaaattcaacagcttgtgtgaagtcaagggtacttcatcaaattcttaaagcacattgcaaaactaaacataataagtggtttagagaaagaacctgcacaaagtttgtcccttttctttcgagctagatatgaaccaaactttccgaagagagggagattcaaactgaacaaagattccatcatttggtccgagtttccatttccttgagcctacacctttccacacctgtgagacatcgtttaaccgtcagtccatatatacaaaccagaaagaacaagcttagaaaaagacagatttgattcacctgtgggtaggatatactactctttggtgttactaagcaagcagccttggaaaatgactcttctgcgtattgcctcagatacgtaaagcagttactgtgcgtgtccggagactgaaaagcctgaagtagggaaacaaagtagttttatcagacaaaaaaaagatttttgataagattcaagttggatgcccttaataccttatcgatgttgacagctggtgcgtacttgtctgtttgtgttttctctttgtcaagaaggaaatagactctagtatcgactttagatgtctcgtgccacgacttcacagctgtttccatagtctcaacaataaaagaaaacatctctttccaacactcttcagttccatagttttcagactgcatgtgttaaattcagaatctgagttggaacaatcaaatataagcaacgaggaaggcttagactgattctctggaatttcacaagaagagaaaaagaggactaaccatttcagatttaaaactttcaagatgcttggccatgtcaacattagatcttaaattctcaagttcttgagctctctgtttctccttctgcaactgaccgagcctcttgatctttctagaaacttctgtgctctgtgggttgtactgcagagccatttcaaatgcagccaaagcctgagatacaatcatcacagttttaactaccatggaatagctttgtgatagaaaaaatttagatggaaccaaaataagagaaacatatacatcttcgtatttttccatggcttcaagcacacaacctttcctgaagtacccctgaagaagatagatcagaaaaaccatcgtttacgtaaagacacacacagatactttatgttattgatgatgaaaccgaaagcacaaaaaaacattgtcatgtattgattttaccttctcccactgagggttgagtttaatggtagtctcagcatctgctaaggccttgctaagcttaactagactcaaaaatgcagcagctcggttactgcaccggataaacaaaaagctttattacactttaaaaatctactcacattaacacataacactgttccaattcacagaaccttaaaaccaaaaacctcaacttttagtattctaaatcacaattgatcttcccaaatataacaaaaatgttgtaatactattattcaagttaaaagcctaatttgtctccacctaaacaatctcattttctaaacatatcgcaagagaacaaaatcagatctttctgagaaatcagctcaaatagaatgaaacccaacaatcagattcgaaagactgtagaagacaagtaaaaggaaacctgtaaagagtagcgttagaaggatcgagcttgatggcttgagtatagagagctgcggctttaagaaagttgccagctttgaagaactcatttcctttttcctttagagatttctctgcttctccaccattcgttgccttgcctgctttctcggccattatttctagaggtttgtaagaaagccaaagaacatgaatcccccaagtgtgatttgcttttctattttagggtttacagagggacaagagacttccacttctgctctgttcctcttttagttttttctctaaatattattactttttgttcatcatttgagttctctcacttgtgcatatatttttaattaaacataactaagaatattgaacatatggaaaagcccaataacgattaagtttgaactaataccttgagcaatttcagttctagaatcattgaagaaatgaaaagcccaagaaaataaatgggcctcaaatttgtaaatacagtaaaaaagattcggccacatcccactccaccgacaaccgacggttcaaagacggtagtagctagcatcaatttgactccatttcgtttgaattatcccaaatccattatctctgtttttattccacgtagactagtaaataataatttcatttctctagtagaatagaacaagtcatctgttaacttcaaaaaaaaagtcaagatttggtttgaggttaatctatacagaaaatattatataagctcttgtaaaagagaaaacgtaagaacccataaagtattcgaatcatatttatgagagtttggtgggaattaatttggtagcacgtagcctgtatttttcaaaattaggaaaacacttatttaacttcattaattacaagtgctgatggaatgaataatcaaaaattgtcacatttagtcgctaaattatttgtatcaaaaaatcaatttggaaataaacttacgcaggaataatagttttccaacattaaaagaaaaagattataatataaataaacaaataaaataacgcgtcctctcttttttttttttgctcaaaagtctaaacccttggtatcgaagcatttggtttaacagtttgaatcttcaattaatctcagatttagatcgagagagaccaaattgagagcaagatctttgcattgttcatctcttgctttgtaatgccgttgttcttcatcgtaaccgactcggtggacgcgatcaattgactcgttctcttttggatccttgttgactcggcgagcttggcttaggagacatg

SEQ ID NO: 7146 - DNA, 3000 bp, Unknown
  misc_feature (1)..( 3000): cDNA_ID_3049861_gDNA_ID_1621129_Annot_ID_172434 3000 nt of promoter + ATG
ggagaagaagaagaagaagaagcttcgagttctttggagggagagggacagataccggttatttcctctcgttaaccgaataccggtttaatactattgtcccggtttgatctcaatagctatcatgagcctcgattgtgtgtatatgagagagtattatgggcccaaatttaacacacatgagatttttttttttaaagtgaaatttctgagtcgaataataaattccagtgacagtgagactgagacaccggagtctaaaggaaaggtgagagcgggggacaatgtaagaaaaaggtcggtgagaaataaaacgacaagtgatagaacttttcttagtaccatagttgaatttaaggtggtgggccattcaatgggcctaacttggcccgtacaatctgtaacatcatttagtattgaattcacattcaccaatcaccaatcaccttaccaaaatagtgcgataggaattaaattgtgtttggcttggtatttgttaaatcatcaatagacaataatagtttgataagacttacaacaactgaatatttataactcgcaattagccctgttaacattccaggcagtgcctgcgtttaagcaacaatacagaggcttcttttaggtcatatgtcaacacctaaaacaaatagataacatgtgagagaaatgtgttaggtatattacactatgattagttcttttgttaaaggaccacgcaccactatcattatccacgttacacacggtttgaacttaaagaagatcgcatgttccactatcttttttgttgttgtttgtcctcctcaattgaacaatttgcatacgtaagcgacatttggttcatatacagtgttcatgaactgagcaacatatatactgtttttttttcatctaagaaaagctacctttttgaaatttgtatttatgcaaacgaaagataatggaaagtgagctggcatggaccgaaagtggtacaaaaaaagtttgaacaaagccattactataccaaacaaacgcaaatgacaaaaactacgcagcattaacaactatattacaattgtcattatttatgtataacattataatacactatcaaggcttctagattgttacatcatctccttaattcttccaagttacatcatcatatatagttgaaattaatttctattattcgtgagaatataagttgattggaagaaggaagattcagtctatatatatatttgaaatactatatgtggaagaacgtagaattccctattgcgaactagaaatgtgttgacgtaccgtgtataaccaaatgtaatatattaatcaaaggacatattaacgtacacattttttactgcatagtcagcaataattgacatttaatcatacatgtattagaaaatggtatgccacgtaagacgcattaccttgcatgaatggcatgtgtagtaagtcgtcatccgcatattgtccaaacaaacaaacaaataaacacatacgggcaagaattaaaaaaaaatcatcttttgttggtcttatatagttgcttatctgaatagtctcacactctctcacttgagagcaagagtgcatgtaattatactatagtattagtacatacgaacaatttggtggtgagtataagtttggatctttggactatatataaagtcattaatttcatactcttacgctattcttttatatcttttaatcaagttgacacatttgtctcattgttttggtgcagagatgatagattggttttctttcttttatatatatgtattgaaacgataacgtgtatgtctccactttctacaaatgaattttaaaaagctcaatgtgtatacataggaattgataaaccagtgattatatagtattttgtaatatactgacacctatacagttttattttagtaatatttgtagccttgtagacaatacataatactcatcacgtcacgtgtagaatattccatggaccgtataaggttcctcctccattgtatcccacaattaattagacacagcttagattagcaaaatggtaatttctttcgtttgagttatgattggcgatttcgtataaaacgaatcgagagaataaaaacgtaaaagaatcggaatatgattcattgcttaccatggttaagtttaatgataagtgcttttattgataacatatatggtcaaataatacaataatttgatcataaagagtaaagacaattgaaaaatgaaatcaccaaaaaagtcagatcacatacagacacattgacgcatcgacgtcaagcatcgtgagcgcacaaagagcttacggctttattattaacacacacactaagcaaaacagtaagtccacgagaaagcatccaaaaagcccaaaggaaccacctttattttttattttattttaggcaaaggaagctcctttattaaattcccaatcttcttccactactttgcacaatctttaatcgatccaaccaataaattttgcattttttttcgttggcgaatgaaggattagagagaaacagaagaaattgttaatttttttcttgttgattttaattaaagagaagagagatctctcttctcgattgctctcaagaacccaagtgacgtctggtttcagctgatttgtttcttctcattctctatcttcttctctgggaaatatcgattttgatctattaagagctggtgagagccaaagtttcctttttgtttgtttgtttgtttgtttgttgtttgtatttttgtatctctgtgatcgcttctacgtgttgggtcatgcagagaaactcattttgttttgatttgcaatgtgtcaattccactttgaaatataagattcatcgcctctctctcctttgttttttttcttcttctgcagctacgagctttgggatgtggtgagatgcttgttctatctcgaacaatccgccggttgttgattttaaacaaactctctatcacaaatctttcccgatc

SEQ ID NO: 7147 - DNA, 3000 bp, Unknown
  misc_feature (1)..( 3000): cDNA_ID_3049865_gDNA_ID_1621129_Annot_ID_172433 3000 nt of promoter + ATG
catctcaccacatcccaaagctcgtagctgcagaagaagaaaaaaaacaaaggagagagaggcgatgaatcttatatttcaaagtggaattgacacattgcaaatcaaaacaaaatgagtttctctgcatgacccaacacgtagaagcgatcacagagatacaaaaatacaaacaacaaacaaacaaacaaacaaacaaaaaggaaactttggctctcaccagctcttaatagatcaaaatcgatatttcccagagaagaagatagagaatgagaagaaacaaatcagctgaaaccagacgtcacttgggttcttgagagcaatcgagaagagagatctctcttctctttaattaaaatcaacaagaaaaaaattaacaatttcttctgtttctctctaatccttcattcgccaacgaaaaaaaatgcaaaatttattggttggatcgattaaagattgtgcaaagtagtggaagaagattgggaatttaataaaggagcttcctttgcctaaaataaaataaaaaataaaggtggttcctttgggctttttggatgctttctcgtggacttactgttttgcttagtgtgtgtgttaataataaagccgtaagctctttgtgcgctcacgatgcttgacgtcgatgcgtcaatgtgtctgtatgtgatctgacttttttggtgatttcatttttcaattgtctttactctttatgatcaaattattgtattatttgaccatatatgttatcaataaaagcacttatcattaaacttaaccatggtaagcaatgaatcatattccgattcttttacgtttttattctctcgattcgttttatacgaaatcgccaatcataactcaaacgaaagaaattaccattttgctaatctaagctgtgtctaattaattgtgggatacaatggaggaggaaccttatacggtccatggaatattctacacgtgacgtgatgagtattatgtattgtctacaaggctacaaatattactaaaataaaactgtataggtgtcagtatattacaaaatactatataatcactggtttatcaattcctatgtatacacattgagctttttaaaattcatttgtagaaagtggagacatacacgttatcgtttcaatacatatatataaaagaaagaaaaccaatctatcatctctgcaccaaaacaatgagacaaatgtgtcaacttgattaaaagatataaaagaatagcgtaagagtatgaaattaatgactttatatatagtccaaagatccaaacttatactcaccaccaaattgttcgtatgtactaatactatagtataattacatgcactcttgctctcaagtgagagagtgtgagactattcagataagcaactatataagaccaacaaaagatgatttttttttaattcttgcccgtatgtgtttatttgtttgtttgtttggacaatatgcggatgacgacttactacacatgccattcatgcaaggtaatgcgtcttacgtggcataccattttctaatacatgtatgattaaatgtcaattattgctgactatgcagtaaaaaatgtgtacgttaatatgtcctttgattaatatattacatttggttatacacggtacgtcaacacatttctagttcgcaatagggaattctacgttcttccacatatagtatttcaaatatatatatagactgaatcttccttcttccaatcaacttatattctcacgaataatagaaattaatttcaactatatatgatgatgtaacttggaagaattaaggagatgatgtaacaatctagaagccttgatagtgtattataatgttatacataaataatgacaattgtaatatagttgttaatgctgcgtagtttttgtcatttgcgtttgtttggtatagtaatggctttgttcaaactttttttgtaccactttcggtccatgccagctcactttccattatctttcgtttgcataaatacaaatttcaaaaaggtagcttttcttagatgaaaaaaaaacagtatatatgttgctcagttcatgaacactgtatatgaaccaaatgtcgcttacgtatgcaaattgttcaattgaggaggacaaacaacaacaaaaaagatagtggaacatgcgatcttctttaagttcaaaccgtgtgtaacgtggataatgatagtggtgcgtggtcctttaacaaaagaactaatcatagtgtaatatacctaacacatttctctcacatgttatctatttgttttaggtgttgacatatgacctaaaagaagcctctgtattgttgcttaaacgcaggcactgcctggaatgttaacagggctaattgcgagttataaatattcagttgttgtaagtcttatcaaactattattgtctattgatgatttaacaaataccaagccaaacacaatttaattcctatcgcactattttggtaaggtgattggtgattggtgaatgtgaattcaatactaaatgatgttacagattgtacgggccaagttaggcccattgaatggcccaccaccttaaattcaactatggtactaagaaaagttctatcacttgtcgttttatttctcaccgacctttttcttacattgtcccccgctctcacctttcctttagactccggtgtctcagtctcactgtcactggaatttattattcgactcagaaatttcactttaaaaaaaaaaatctcatgtgtgttaaatttgggcccataatactctctcatatacacacaatcgaggctcatgatagctattgagatcaaaccgggacaatagtattaaaccggtattcggttaacgagaggaaataaccggtatctgtccctctccctccaaagaactcgaagcttcttcttcttcttcttctcctgcttctgtcgtcgtctaggttaatcgaatatttcactatttgctttctatctttctgctgcgaatcaatg

SEQ ID NO: 7148 - DNA, 3000 bp, Unknown
  misc_feature (1)..( 3000): cDNA_ID_2993617_gDNA_ID_1621129_Annot_ID_172429 3000 nt of promoter + ATG
ccacccataacaacttccttgtttggaagaatggccttggtattttaactttctgtgttagtagggctttttgacggatcttttactttgaatcttaactatcctttcccttattgtttaaccagagcttccgctcatcaccaaaccttgctgctgcggctgaagctgctgctcttgcggtgatccgcccagtggaggcaaaatacccggctctgcttttcaagcaacagcttgcagcatatgtggagaaaatatttgggatgattagggataacttgaagaaagagctctcagctttaatatctatgtgcattcaggtttcattgacttctctctttgcagctatatatttttgtcctgactttacgttgttgtatcctaatgctgtgaccactcgcttgttgcgttgcaccttgataataaatgtgttttactattgtaacaagtcctgttctgtcaaaactttgaacttcaggcaccgagaatttcaaaaggagggatacaaagatctgctagatctcttggaaaagattctcctgctattcactggcagagcattattgatggtctcaattcgctgcttgccatattgaaagataattatgtaaggaaatagtaaaagttccatgacattattctgttttcaaatcctcaaattctcatatgtttcatggtgtacaggttcctttggtactcatccagaagatacacactcaaactttctcgttcgtcaatgtgcaactatttaacaggtaaataatacttgagaattacatctaatggtttctacacaccttatcatcgatactcgtcaaagtacaaaccttcctatggttgatatttctcaaattcctatggaagatataagccaagatcactagtgttttcttacttggttttttccttaacatcttacaatagccttctactgcgtaaagagtgttgtacattcagcaatggagaatttgtaaagtctgggcttgcagagctagaattgtggtgcggccaagtcaatgaagtaagttcctacctcacgttttccttccggaaaaagtttctttcggctcattatatcattctttgattttgcagtatgctgggccatcttgggatgaactgaaacacatcagacaagctgttgggttcctggtatgttttactcttgtttaatactaacttgtggaactcttgtttcttgaatcttcaaaaacgaatacttctcctctcgtaacttatcaggttatccaccagaagtacagagtatcatacgatgatatagtacatgatctttgcccggtaaagctccttcttagtttctagaaacacgtttttgcctagactccatacttaatggctttcttgtttcactttattacagatccttagtgtccaacaactttaccggatatgcacattatactgggacgactgctataacacccgaagtgtgtctcaagaggtaatatcgagcatgcgtgcgctcatgacagaagaatccaacgatgccgacagcaattccttcttgttggatgataattccaggtaactcgaatcatttcttaaagattaatatcagtagtagaaactaaaaccggtttattgttcgcagcattcccttctcaatagacgagatttcgaattcgatgcacgaaaaagactttgcgagtgtcaaaccggccaaagagctactggaaaacccagaattcgtattcttgcactagtgagaagctcggattctaaaaaagctcttcctctgtttctttttagtctgagtgggggaggggtgccttcttgaaccaaaaggaaagaagattacaaaagtgtaaatttttacttcttgtggggttgtttctttcttgcaaaacctctgtgatttctctctcaccaattcattcatttatttatttgaccccatttcaaagttttttctccattttagacccaagattattatctggtttttttttttcacggctcaagttctacacgatgaagatcctttgttgttgttgtacagaattaatctacttaatttgttataaacttgccccaactcttttcagtgatttttttttaaaaaatttgggactcaatcaaactccattacacctggtgatattggtttaaaaccaacgtttctgacttcaacagccgagattcaaagacttcaaaaccttccaaaaaaaaacaaattcataactggttcggaaagataaattgacaaacccgagagagatagaggaacacgaacgcttatagtcgatcgcaaataggcctttcacttgaggtgtctgtctcaagttcgaattctaaaagttttatggttttttttgtttaactgtgttttatgttgggccaaattgttttttgcttttaggcattaaatttagtcgggccggccctgcacataaaattaatatgatgaaatgttttgggtttgatactttgattcatagaaaaagtaaattagtctctactgatagtaatttaattaaatactagtatttcattattttgtaagaaattttagaaagggaaaaaaaaaaaaggttacgcgaaggaaaccaaaaaccctttagggacttggatagaaaaaaaaaaaccattttgtgcatcttcttcaagctgcgccgctttctcactcttttttatctctcaaatttgaccttctccgttgttctttcgcatcgctcaggttcgtttcgatctcgaattacatctcctacggattcaatatttgttcaacctaattgttcccatttctatcgcacgaagattagttcggggaatctaatcgtaatcataatgtttttttagattgcgaatcgaaattattgtgatatttaggtaacggagctcaggtatagaatctgtgtgtcgacttgattagggcagatgtagaaaaacctgagaagtagtctttttcagattaactagggttagggttctgatttgatgctcggttttaagcaggagcagaagcttcaatctttgataatg

SEQ ID NO: 7149 - DNA, 3000 bp, Unknown
  misc_feature (1)..( 3000): cDNA_ID_2128719_gDNA_ID_1621129_Annot_ID_172426 3000 nt of promoter + ATG
agaggagcaagacggcgccctcatcagctaaaaacctacattgccagattgcgttattacacagtagcatagaaagcattgaattaagaatttgatacaggatgcatctctatcaatacaaaaataaattattgtagagaaaaagctcaagaaaatataacttacatgccgagagtatcaaatagtgaagcaaatggtatccgaacatgtggaccagcagggtgggcatttccctccacatctgagcggtcaactgcaatcagagtaatagtttagataaacacatcgaattcttcttattcagaataatgaagaaaaaaaaatctcacattcaacatctctagcatttgctagagccttgctaaaagtattgtcagaggaaaatacatggactttagaaactgattctgaggtcgcactgtcatcacttttatccgtcatagactcatcactcatgatagacttgtgatagttaattaggataagtaaaacatgcaggctgcactccgctagtggatttttagatccgccactgttacttacaagatagttcaaaggcaagagcactaaacttgctgtatatgcaacagaaaagttttcatgagtacatggactgtttcatgtagctagttaggaaaacataattgaacggaaagtcggaaaggcaatagaaaaagatcaacatttacaagttagtacaataatacatcatatatgaagtaatatacgaacacctaccagctgcagaaccaactctctctaaaatgccttgtgaatctccatcagaatacatataggattttgcatttggaggagtacggtgtcgggaaatataattaagtagcaaccttctgactactagagaaactagagacttttcctgaaaatcgttgaaccaaaggaaatggcggaaattgatatgaggtaatatctatgctaaagacaaagaaaaaagtaattaatttggttacctgagtcattgctgcatcaataaaagggttcgcatctgttggtccatgtgaaggtccagagagaagctgtgtcgacattgtaacaagcatgaagttgagaagttcctgatgtagaacatacgagttgggacttgccaaataaatgatgaaaatcaggagaatgaaacatctaatactgaaacatataaggaataggtgatatagagaatcagcattggcatacctcacttcatttgatccaatgaagctcagaacactatgcatgacaaaattttggatgtcttgatctgccatcaaaacactcttaattagccagcttagaaataccttaacgctggaaataactattatgagagtcattacccattacaaatccatgtggaactggttcactttcgtccagagaaagatgcaactcctgaagactgtcactttttccattctcaatcaaatactttaaaaagacggatgaaatatatgttgcattaacagctttcttatagagagaagactgatcatctgaagcttgaagaagctcttgcaaacaccaggacagatgaatcaatagttttgcaaggtgcctagtgtagccattactttgtgctgaaacaaaaaaagaaaataagatcatcctcctactttcactaggtcatcatcaacattcaatttcattagctcaaagtgaattcgacaacacatcctttacaatttcaacactaaccgaaaagttcacaggcttgttgaacccgatcactaggccagcgagaactcaacggaagctcaagtagcttgttccagaaatcagacgctaaaggaaacgatttctccccaacaaaagtggcaatgaggtactcggccaccgaaacatcatcaccaccggtttttcgcggcgttgaaggcacacctcccatgtctcctaagccaagctcgccgagtcaacaaggatccaaaagagaacgagtcaattgatcgcgtccaccgagtcggttacgatgaagaacaacggcattacaaagcaagagatgaacaatgcaaagatcttgctctcaatttggtctctctcgatctaaatctgagattaattgaagattcaaactgttaaaccaaatgcttcgataccaagggtttagacttttgagcaaaaaaaaaaaagagaggacgcgttattttatttgtttatttatattataatctttttcttttaatgttggaaaactattattcctgcgtaagtttatttccaaattgattttttgatacaaataatttagcgactaaatgtgacaatttttgattattcattccatcagcacttgtaattaatgaagttaaataagtgttttcctaattttgaaaaatacaggctacgtgctaccaaattaattcccaccaaactctcataaatatgattcgaatactttatgggttcttacgttttctcttttacaagagcttatataatattttctgtatagattaacctcaaaccaaatcttgactttttttttgaagttaacagatgacttgttctattctactagagaaatgaaattattatttactagtctacgtggaataaaaacagagataatggatttgggataattcaaacgaaatggagtcaaattgatgctagctactaccgtctttgaaccgtcggttgtcggtggagtgggatgtggccgaatcttttttactgtatttacaaatttgaggcccatttattttcttgggcttttcatttcttcaatgattctagaactgaaattgctcaaggtattagttcaaacttaatcgttattgggcttttccatatgttcaatattcttagttatgtttaattaaaaatatatgcacaagtgagagaactcaaatgatgaacaaaaagtaataatatttagagaaaaaactaaaagaggaacagagcagaagtggaagtctcttgtccctctgtaaaccctaaaatagaaaagcaaatcacacttgggggattcatgttctttggctttcttacaaacctctagaaata

SEQ ID NO: 7150 - DNA, 3000 bp, Unknown; identical to SEQ ID NO: 7145
  misc_feature (1)..( 3000): cDNA_ID_2128715_gDNA_ID_1621129_Annot_ID_172425 3000 nt of promoter + ATG

SEQ ID NO: 7151 - DNA, 3000 bp, Unknown; identical to SEQ ID NO: 7144
  misc_feature (1)..( 3000): cDNA_ID_3049877_gDNA_ID_1621129_Annot_ID_172424 3000 nt of promoter + ATG

SEQ ID NO: 7152 - DNA, 3000 bp, Unknown; identical to SEQ ID NO: 7143
  misc_feature (1)..( 3000): cDNA_ID_1816838_gDNA_ID_1621129_Annot_ID_172423 3000 nt of promoter + ATG

SEQ ID NO: 7153 - DNA, 3000 bp, Unknown
  misc_feature (1)..( 3000): cDNA_ID_1715200_gDNA_ID_1621129_Annot_ID_172422 3000 nt of promoter + ATG
aacttatggcctaaaaagttgaagtgttattgtgaatttataggcaaaattttagaaagaggatgcaatttaagaaaatgtagttatggatggtacgtagtccctatggttattgttgtagcggtgagctaactatgcattgattctgttttgaccaaaaacatatgtttttttaatatgctatacttcatccatttttatatcagatgtctatttataattttttattatcttttcaatgtaacaatttaaattatctttctaatatatcactacaatttttgtgtttatagtaatttaagcattgattataaaatatgcataattaaaggattttcatgcctgatgcacattcaaaagtcgatggaaagtaacccaaatgtcttgtagtagggataggttttaaagggccgggtcatgtataaattcttccaactgttaaggaactagctatgagaaataaataccataccatacgtgttattttatactccagtctccagattgcatggaggatggattcattgaacatacaggaaacaatacgctgagatctattgaggttgtatccaaaatgattttagtggaactattatatacttataaaacagagtaaggaaaaatttgtaggcgaaggatacaactaactccaatcaattgtttgatactttgatggctcgagagtggcgatttaatgaaattcattattttctttcttgccactgattgattccttctactggaaacaagggttattctgggtccactttgtttacgtggcgcataatgatacgtggatattgcggactaatattttttttcattttcacataatttataaatatatcatttctttatgttattgcagcttctagctacgcgaagaagagagtttgttgaactgctacgcgcaggaggaaatatgtgttatttactaattatttacacgtatagaaacattttctttttaaaatgaaagatttacctttatatttttgtagttatacgatctcttcataacatgcatacaaatgaatttaaatgtcaataacataacaaagtttaaagaatataaagacgtgaaagataaagctaacggaataaaacccatgaagatgcattgaattcaatcagttgttatgccacagatccttttcatcatcaacaccgtcaccattattgtgtctgaaatcattattatcatcaatttgattacgatattcattttagttgattatgatcttcagtttaacttctatttactgattatatattcgctacgatttagtataaatttatttcaagatagttcaatgtgagtttgtcattgtgtgtccacacatattatttttttgctgtcgtcgtaattgtccacacatctaatgaatcatagtttgcttgcgtagtgaggtttggcataaattactaaagtgtgataataaactatgatactgttgtgaattgcgtgtcgaagatttgtggaaagattgtgtggtaagtcacccaaaattatggagtagtaatttttaattgaactataaatgtcgaagaatttctaaccaaacggtgctacttgggcaagaaataattcgttgaagaaccatctctatgcccactattattatcattattaattttttttttattgttcacgttcattcccaagtttcctctgatgtgtgtgtgttttattgtttgtcatggttaaatattcactatatttacctattgctcaatatttagaagtattttacacaaatccgaatagccgagcatccagctaaatagctagttttaaaccacccctcaaaaaaaaaaagaatttatatgtggatatatatatatatagttctactattaattgttagttttccatctttattatttctattattttcgcttattatagtgaagaaattgtttgcatcaatcaaagcgagcatttaattataacgtaagctcttcaacattcaactactcaaccatgagtaacatttacaagttaggcatacatctgaatatagttagtagttagggacaagttattaatgattcgtactgcgctaaatttttgaacatacaattttgttggtgcaattgtagtaacaaaatactgattttaataacacttggattcatgttttacttattccaaacatttgtctatatttatgtgtgcaattttttttaatttttttatagatgttaaacatgtgtgcaaattaattaatttatgttcagttttttgtttgttcgatcaaaattagtgtcacattcggcaaacgctaacacggagcacacaacaattttacaaaatcatagccaaaaaatgtccaaactctatagaaataaagcaaatgtggtttctatccatttgtctatgctcagatttctgtgtatgcacaaaaatacaatcctaaaatctaaagagggttggtttatattatacgtatcccaagattcaagtatatgtagagaataaaagttggtctaaaaaaataaatacttgattcactcgtacttggataaatttataaaaatagttactcagtacttgggttgggtacatatacgagatcgaatggtgatagctaaacaaggaacaaatgaatagaacaagtgtgattaatgcgaatcaagcgtatagaaatcatgtaacaacaagaaaagttgaatagtactacatatataaatgcatgtagctataacaaccacaaattctgtacccaataatcaaaaatctattaacatatgatttacatgtctaacaatgttgatttttcgtctagattttatgctaccgtttatcatgtttaataaagacagttatgacgttgggctttaaagcctattaagaaaaaaaagtctgttggaaagctgtttacaatttttatgaaacgcaacgttttaacgtttgtgagaaacgcagcgttttagaaacttaaaacctgtcttttgttggtgactgcacacggtttggtcatcatcacttcggcgatg

SEQ ID NO: 7154 - DNA, 3000 bp, Unknown; identical to SEQ ID NO: 5042
  misc_feature (1)..( 3000): cDNA_ID_3049857_gDNA_ID_1621129_Annot_ID_172437 3000 nt of promoter + ATG

SEQ ID NO: 7155 - DNA, 3000 bp, Unknown; identical to SEQ ID NO: 7149
  misc_feature (1)..( 3000): cDNA_ID_1816826_gDNA_ID_1621129_Annot_ID_56427 3000 nt of promoter + ATG

SEQ ID NO: 7156 - DNA, 3000 bp, Unknown; identical to SEQ ID NO: 7148
  misc_feature (1)..( 3000): cDNA_ID_2993617_gDNA_ID_1621129_Annot_ID_56429 3000 nt of promoter + ATG

SEQ ID NO: 7157 - DNA, 3000 bp, Unknown
  misc_feature (1)..( 3000): cDNA_ID_1816818_gDNA_ID_1621129_Annot_ID_56430 3000 nt of promoter + ATG
ttctactgttagaagaacgcttctcgttgtatacgttgatttctagggctttgtgtctgaggtcgttgacgtcaataacgtggaagacgagcttctcgttccagattgggttcaagtctttgggtttgaccttagtccggagacgttggttctcgaactgcacttccacaaaaggtgacgaagaatcttcgccatcttttggcatgagattgtgggcccctactatctccaccacgagcctctcattgccagtgccggttttagcttcagtcattaccggttagaaacaaagagataacaacaccaatggagaagattaaaagcacaagacaagtgaaaagacagtgactagagagagaaagatagagttatagagtctttgtgtatgcagcagacattaacaagagagggcgtgccaaggagagaatctggattttgtattttcttacaatattaaactacgtctcagatatttctcaattttaacttttaaaagatttttttatcatgacagttttgaataatgaataataggttgagtttgtaaattagcaacaacaaaaaaaaatatacgaacgatagcttttcaataaatagaagagaacataaaggaagggaacttcggagaaagggacataacagcctcgagcttcacgcacctggtcgcgcgtggatttaacaacgtgtctcaaccaatggaatggctctgctctgtacttaccgtctgctttttgctttcctcctgatccagtaggacccattttatttcctctgtacaattaaaaacgaaagagacatctataaacgtggtattcacgcgcgcttagactaacgcgtgaggaataatgaaaagaacaggctcaaccttcgtggcgggtcaaacctcaaaggtctatagaacaacaattttgtctcaaaagagtattcgtcagacctcagaaaacatttattgtactataatattagtaattcttgtattttgatattctttagctttagttttcaggataagtggggatttttataaaaatttgtaattataaaccatagattttatttttccccaataaaaatattacaatgtactgatgtagtgattagtgagtaaattaatactccctttgctttccacgagcagagcttagaaaaggttttggacttgagtttgcaggtctgtccttgtccttgtgtacataacgttcttcttgcttttttagagttcccaaaaaaccaataatatatcggcatttatttcatttgttacacttgtattttcatttttggtttcatgggttgtatgtcttgcttctttctttaattttctttttttctttaattttgttctgcagactttgtgcatgccagtgttaaataacaaaatcaaaacaataataataatacaaacttcgtccttgtaatgactgccgcgtggcatccagttcatagtcctcgtaaatcccacttgtgccttgtgagacctctggctctcatcacacaactcaaaaattcaaaatacgtaaacaactgtcatgttgaatcacgatgtttaagttttacttaccaacactacacgatttaccttttattttctaaccgtacgagctaaacgcacataaatattctttagtttgtctcgggcaacgtatattatattttgttccacaaaaacgataggattctagttagataaaaagtttcatcccaagttaaagtgaccgtatatggacttgacgttaaagcccaatatattgtgacaaaagaaaaactcaacactgataaaaggggcccatatattattgtctgcgagggaaccttactaagtcatatgctacatggggatgatagttgatgattgtctgcgagggaatctggatactatatgttttaaattaaagaattgtgattttacatataatgagcacctgttgtatcaaaaaaatcaatcaacatgtctcactaaaaaaaacaaaaaaactgttatatgagttgtatattattactactgattttaaaaagaacaaataattagataattgattttttttgttatgtaagaaatcggacaaaattagtttttccgcgtccgaaatacaagctcgtaataacaaagaaaagacaggggtaatttggggatgtaattgtcataattcaacgtctacttatgatgctgtcattttaattaaagtaaatattttctccaaaaacaaatcccaaaggtgggggaggtaagggaagagggaagcacgaaagccaaaataaaacgaaacttttttttataatctgagaaagtttgcgacattacaacaatcagaagaatcaacgcgtttcggttttgctaattccctttatttttctgggcattgaatctggtttcttgaagcattctcgtatacgcattgtcggtgtatttgtcggtgtattggaaggcttagttacaaagaagaagttcaatgttgctctgatttcagctagatccagagaataagcaaaataacattgagtttcttattcgttaaacaataatggtaaaggtttctttcattcatgggtttttcatgttttttttttcgtgattgcatttaaattcgtttcgttttatgatgatggatagggtttatgttttgatttatttcctcgtgtgatgtcgtttttgattgaatctgagttttgtaattgagtcattgatgatgagttttgagtttggcgattgtgattttttttttcaatctttgagctgtttcgagtcatggcatcgttgagtccctgtacgacagagatttgacttcaattcagacgtgtctgatagagtttggtgcttagtcctataacttgtctgattctctatttagctactagtggttacagagacgtgtaggtacattgctacggtttcaaattaccttaaaagccgaaattctatatgctatttgaacctaaatgcaagtttcttgattgcacattaggagatgcaatcttcgaagctttgagtttgttgtaatg

SEQ ID NO: 7158 - DNA, 3000 bp, Unknown
  misc_feature (1)..( 3000): cDNA_ID_1807894_gDNA_ID_1621129_Annot_ID_56432 3000 nt of promoter + ATG
ttactaaaaaggtgagttcaaattccagtaatccagagtggaatcaagtatttgtcttttccaaagaaagaattcaatcatccgtagttgagcttttcgttaaagaaggtaataaagatgagtatacgggtagagtcttgtttgatttaagcgagatcccaacccgcgttcctccggatagtccgttagctccgcaatggtacaagatagagaatagaaacggcggtagaggtaatggagagcttatggtttcggtgtggttcgggactcaagctgatgaggcttttgcggaggcgtggcattcaaaggctggaaatgttcacatcgaggaactctcatcgatcaaatcaaaggtttacttgtctcctaagctatggtatcttaggatatcagtgattgaggctcaagatgttgcaattatggacaagggatcaagtctcatgaggtttccagagctttcggcgaagcttcaagtagggagtcagatactgagaactgcaatcgcatctgcaatccccacaaagagcttttcaaatccttattggaatgaggatttgatgtttgtagttgcagagccgtttgaggattgcgttacagttgttgtagaggatcgtcttaatggtggtgcaataggaggacaaaacgatgtggctgttgggagggttcagattccgatttccgctgttgaaagacgaacaggagatacactggttggttcaagatggtttagcctagataacggcaacaataacaaccggtttggttctaggattcatcttagattgtcattagacggtggctaccatgttttggatgaggcaacaatgtataacagtgatgttagaccgactgcgaaagagctttggaaaccgcaagtagggcttttagagattgggattcttagtgcaactggtttgatgcctatgaaggttagggacgggaaatgcggtggaatcgcggactcgtactgcgtggctaagtatgggcctaaatgggtcagaacaagaactgttgtggacagtctttgtcctaagtggaacgagcagtacacttgggaagtgtatgacccgtgcacagttgttaccgtcggtgtattcgataatgcacgtgttaatgaaaataacaactcgcgggatgtgcggattggaaaggttaggattaggttgtctacgctagagacaggacgggtttacacgcattcgtatccattgattgtgttgcatccctctggagtaaagaaaacaggtgagcttcatttagcggttagattatcttgcggtaacgctgttaacatgcttcatatgtatgcgttaccattgcttccaaagatgcattatactcagccgttaggcgtccatatgcttgaacgtttgcggtatcaaacgctaaacgcggttgcggccaggctgagtagagctgagccaccattgggtcgtgaggttgtggaatatatgctagatcatgatttccatgtttggagtatgagaaggagcaaagctaattttttccgactggttaacgtgatttccggtttggtcgcggttgctaagttggttgaagttatgagaagttggagtaaaccggtttactcgacggtttttgttttggctttcttgtttatggttctgtttccggagcttctattgccgtgtttgcttctttacacggctgcggttggcgtttggcgtttcaggcggcggtctagatatccaccgcacatggacgcgcgtatctctcacgcagaaactgtgtttcccgatgaacttgatgaagagtttgacacatttccgacaagcagaggatttgatgttgtgagaatgagatacgatcgagttaggagcatcgccgggagggttcagacagtggttggtgacatggcaagtcagggagagagggtacaagctttgctaagctggcgtgatccacgtgctacgtttctcttcttgatgttctgtttattggcggcagttggattttacactgtgccggttaagttgacagtagctatttccggtttgtattatctgagacctcctcggtttaggaggaaacttccgtcgcgagggcttagcttctttagacggttgccgtctagagccgatagcttgctctagaacatgtcaagagtgtatttaactatttatcgtcttcttagattactagggactttagtttttggtacgatttattggttgtatgtatttattatgttttcggttaggttaacaaccggtgtttgaacacatgaatgaaagaccgaaccggttaaggcattgtaccgaacctgttgtgttaatgattaggatgctttgctgttcattacaaaagtttgctaactgcttgtagttttttcgtttttggtccccgcgtgatgaacttgttaagtgtgtaaaacaaattacacataagacataactcaattaatatacccctactgattcattaaatttaagaatttgccaacattgtatgaattgcgattcaatcctccttcgtgtccatgataagatatattacgaattattatagcaactaatttttcagataaatctcaaatattatttggatcaatcgaggaattatcaaaaattcaaaattatatattaggattacaaatagggttacagtgttctataagtttttatcagggtaaaaatatgaaataaagaaaatataagggtatgtttaaaattatgaagattgtgtttagataatcaagaacagggcatttccaattagagagaaaaaaaggagatccttttaatgtatcgcagaccatcctcagctatggcctcctgtttttccttttaggtatcttcgtagctcttcaccgtaaataatcccgacccatctagaggacggagccgccggcgaggaaattcaggcagattagatcggcgatttggccttgttttcaacgaagatcgtcttgttagggtttcgtccgcatctatggattctctgtcaaatggggtattgatatgaatttcggctttcgtg

SEQ ID NO: 7159 - DNA, 3000 bp, Unknown; identical to SEQ ID NO: 7147
  misc_feature (1)..( 3000): cDNA_ID_1816810_gDNA_ID_1621129_Annot_ID_56433 3000 nt of promoter + ATG

SEQ ID NO: 7160 - DNA, 3000 bp, Unknown
  misc_feature (1)..( 3000): cDNA_ID_1816806_gDNA_ID_1621129_Annot_ID_56434 3000 nt of promoter + ATG
gtgtttggcttggtatttgttaaatcatcaatagacaataatagtttgataagacttacaacaactgaatatttataactcgcaattagccctgttaacattccaggcagtgcctgcgtttaagcaacaatacagaggcttcttttaggtcatatgtcaacacctaaaacaaatagataacatgtgagagaaatgtgttaggtatattacactatgattagttcttttgttaaaggaccacgcaccactatcattatccacgttacacacggtttgaacttaaagaagatcgcatgttccactatcttttttgttgttgtttgtcctcctcaattgaacaatttgcatacgtaagcgacatttggttcatatacagtgttcatgaactgagcaacatatatactgtttttttttcatctaagaaaagctacctttttgaaatttgtatttatgcaaacgaaagataatggaaagtgagctggcatggaccgaaagtggtacaaaaaaagtttgaacaaagccattactataccaaacaaacgcaaatgacaaaaactacgcagcattaacaactatattacaattgtcattatttatgtataacattataatacactatcaaggcttctagattgttacatcatctccttaattcttccaagttacatcatcatatatagttgaaattaatttctattattcgtgagaatataagttgattggaagaaggaagattcagtctatatatatatttgaaatactatatgtggaagaacgtagaattccctattgcgaactagaaatgtgttgacgtaccgtgtataaccaaatgtaatatattaatcaaaggacatattaacgtacacattttttactgcatagtcagcaataattgacatttaatcatacatgtattagaaaatggtatgccacgtaagacgcattaccttgcatgaatggcatgtgtagtaagtcgtcatccgcatattgtccaaacaaacaaacaaataaacacatacgggcaagaattaaaaaaaaatcatcttttgttggtcttatatagttgcttatctgaatagtctcacactctctcacttgagagcaagagtgcatgtaattatactatagtattagtacatacgaacaatttggtggtgagtataagtttggatctttggactatatataaagtcattaatttcatactcttacgctattcttttatatcttttaatcaagttgacacatttgtctcattgttttggtgcagagatgatagattggttttctttcttttatatatatgtattgaaacgataacgtgtatgtctccactttctacaaatgaattttaaaaagctcaatgtgtatacataggaattgataaaccagtgattatatagtattttgtaatatactgacacctatacagttttattttagtaatatttgtagccttgtagacaatacataatactcatcacgtcacgtgtagaatattccatggaccgtataaggttcctcctccattgtatcccacaattaattagacacagcttagattagcaaaatggtaatttctttcgtttgagttatgattggcgatttcgtataaaacgaatcgagagaataaaaacgtaaaagaatcggaatatgattcattgcttaccatggttaagtttaatgataagtgcttttattgataacatatatggtcaaataatacaataatttgatcataaagagtaaagacaattgaaaaatgaaatcaccaaaaaagtcagatcacatacagacacattgacgcatcgacgtcaagcatcgtgagcgcacaaagagcttacggctttattattaacacacacactaagcaaaacagtaagtccacgagaaagcatccaaaaagcccaaaggaaccacctttattttttattttattttaggcaaaggaagctcctttattaaattcccaatcttcttccactactttgcacaatctttaatcgatccaaccaataaattttgcattttttttcgttggcgaatgaaggattagagagaaacagaagaaattgttaatttttttcttgttgattttaattaaagagaagagagatctctcttctcgattgctctcaagaacccaagtgacgtctggtttcagctgatttgtttcttctcattctctatcttcttctctgggaaatatcgattttgatctattaagagctggtgagagccaaagtttcctttttgtttgtttgtttgtttgtttgttgtttgtatttttgtatctctgtgatcgcttctacgtgttgggtcatgcagagaaactcattttgttttgatttgcaatgtgtcaattccactttgaaatataagattcatcgcctctctctcctttgttttttttcttcttctgcagctacgagctttgggatgtggtgagatgcttgttctatctcgaacaatccgccggttgttgattttaaacaaactctctatcacaaatctttcccgatcatggattttattgagatctcgttgatctttcgagagcatttgccactactggaactatgttcggtcatcatcaacctcctactctttcttgtctttctatttgctgtctccgcgaggcagattctcgtctgcgtgagaagaggcagagataggctctctaaggacgatacggtttcagcttctaatcttagcttggaaagagaggttaaccatgttagtgttgggtttgggtttaatctgtctttgctctgttgcttatatgtgttaggcgtccaagttttggtgttagtatatgatggggttaaggttagaagagaagtcagtgactggtttgttctttgctttccagcttctcagagtttagcttggtttgtccttagcttcttagttcttcatttgaaatacaagtcttcagagaagctacccttcttggtgaggatatggtggttcctggcgttttcgatttgcctctgtact

SEQ ID NO: 7161 - DNA, 3000 bp, Unknown; identical to SEQ ID NO: 5042
  misc_feature (1)..( 3000): cDNA_ID_1816798_gDNA_ID_1621129_Annot_ID_56437 3000 nt of promoter + ATG

SEQ ID NO: 7162 - DNA, 3000 bp, Unknown
  misc_feature (1)..( 3000): cDNA_ID_1840625_gDNA_ID_1621130_Annot_ID_56444 3000 nt of promoter + ATG
caatataaagaaccaaagagatccttacgtcttagaaatcgcgtcaaagatcatctgcccttctgcggtaacaccaaaaccaatcttctcgacgttactgcataatacattaatcaaaatcagtgataaaatcgaaacaatcatagagattttcacaacaaattgcaaaaactatcacctaatagcatgattctctttctctatgagtccatcaagattaaccaaagtatttttagcgagacgttccttaaccctccccagattcttcatctccgttatgtaattcacattcaccatccgtaaggatttcgaatccagaggtttaggcttcgtgccttcttgtaaaatcactaatccgtcaaggaatacgcgaaaacaaacacaagaagatgaaatcaagaaggcgaagtagcagagataagaatctacgagctgcgagtagcgatttcgaaaaaggatatcgaaaacggcgaagttgggttcagaatcataagccaagacgatgccattgaactgatctccggtggtcagcttgacagcgtataccttccccacctcgaatttctcgtcctctcctccgctgtctactttagccaccgtagcacttgctggtttcatggcggcgaacgaactctccggcggtttctaaatcgcggttttgaaaaagtgacggttgcaaaatatcttggtttatggcgcgtggacaattaataacaaactgtaaccgtaaatgggcttctgttcagagctatataggcccatataaacctatcctgggtcgtcactatttaagctattaccaggcgtaatttattaatatagcccaattagagtttagaccagcttactcttgactcttgagctttgcatataagttttttttttttttacagaaatttcaattattttcacaaagtatatacaatactattcttatccactggtagaccttttgttacttaataagatgtttatgctagatttatttttattttacttttattttattttattttatttttatgtctttttgttaactgcttatgatgctagatattaagaggaaaatgaagtgatccagctggcataaattaaactaatcattttatattttgtcaaaagagaaattattggaagctggtgagctactacatcaccattatctcctgtcactacttttaattttcaaatcctgagtgtcagtctttgaatgttggttctaaatctttactagatttgttttttcttttcataataatatttaaatttaaataacaattaactgaaatcgcagtgggatgatttgaatcttggtcatctgacaatttgtttttttaccacgaatttggaaaaattaagtttaatgttttgaccattaattttattgatgattttattaggcaaagatgattggtttgggtaacaatttgaatgatcagaaagaggagggcacatggaagaatggaatggaccgaagttaacggagatgaagacaacaagtcgaaacactcatcgcaaaacaaaactatataacacatctttcatcacatgttgtttgagtctatcttccacatgcgttctacacataatgtttgtgtccactttatattattgacatttaacagctattaattatgatgtagtggacaattactatctcaaaattcttgttttactagcagctagattattaaaattagtgatttatatgtaagtttttgatccacatttttttttcagtattgaaattgatatatatgtgtagactagcatttcactgttatatttacccatacttgatcataattaggtcaagtgtactattcagtacaaactgcatgcgtcgtgaatctgtgaaatcttattttgaactacaaatacaaatgtatcttttattgctctaaaagtttttaccgtctagtaaaatgattacatgttggtgggtaaaatgaatcatctctgcgttgactatgccatgaaatcattgatgccgtacaacaggcatcactgtttctatcataaaaattgtgtaaaagtgtcaaactttactaacgtcactcatctaacagttaaaaaaagatgtgtgaagtgtctaaaactttactaacttcatttaacagtgatttaattattcctcatgagacataaataaatattcgaatgattaagacttcacttcagataacgcttaagaaaagtcttttgaactacgttgcttacgtgtcaccatctaattataggatattaggattaattaacttaatcaaaccacatcgcggcatctgtgtacactgacaattataccctgacacgagcaaagccagaaagaatgtcatcgacgcacattatccaaggctaatttcgtcatttaccatattcagactaaagccatcagcgtctgtacaatttcagactggcggccactcactgaacaaagacaacttccttctccaccacaaactaataaatttgtattgataatttgatataatcttaatatattttagcaaccaaatgatgatactatgatagtccaaacatattaataaatctccttaacaaacttttaaaacctcattaacgaaaagtgaacagaatcttgagtaaaaaaaaataaaaaaaaaatcgtgcatatattcatatgcggtggacaattatttagaatttctctacgcaacaaaaaaaaagtaaagaaaacctacttacaactccggaaaattatttatatatttttcatgtggaaaatattgtaaattaagcacaaataatagcattgacatagacaaataataaagattttgagtaaaatatacctccatggtccaaaaaggaccaaaaccattgaaccactcgtctcgtctcttccacataaaacaagaacaacaaccaaaaaacgatgtgacatatacttagaaacaagctccatatcaataatcaaaaacacgaaagccaaaataaaagagagaaaaagaagataagttgttctatgttcctgaaatg

SEQ ID NO: 7163 - DNA, 3000 bp, Unknown
  misc_feature (1)..( 3000): cDNA_ID_1807177_gDNA_ID_1621130_Annot_ID_172475 3000 nt of promoter + ATG
agcctgaagactcgtcaattcttcccaaagagtttgagtacgagtatgatacgatgacaaatccagattgccttgacgaagagagtgaatctgttgacgcagcttgtaaagtcgagggaggctagatttgtgaaatcgagtatagagatctttccagattgcagcggctgtgggaaaatacaagatgcttgtatagatctcctttgatacactattcagaagccaagacttaaccatactgttacaacgacgccagattttgcaataaggatcatcatcatcaggttttggaatagatccatccacaaatccaagcttattcttagcttcaatgctagtagtcatagctataatccaggttccatagttgtttccatctaacagttctggagctaggactaaaccaggatgatcggagctaacaagatgataaggactatgactattatcaggagaatccgatacctcaaagtgacgcgatgagctatattgagctggttgatgaatcgcagcatgaatcgaggatcctggagctctcgctgatgaaccagaagactgctcatgaatcttcggtgaagcaatgacaggaagatccggtgaactactccgacgaacactctttccatttcgtttacctatggagaatcgaaacagctaaccaaagagactgaatcgcaaaggagacgaaaggaaaacgtgtagaagagagaagaagaacaatgagaagatgaacaaactccggtgagattccggtgagattccggtgagatctaatcggagaagtttgttacgggactgagatcgagatattttgctctgataccatattagtaaaacaatctcattctcattaattagcaaaagagtacaattgggggtttatatacaaactgacattggcctaaaccataagcctctaaaccaaaattaagattggtttataaaataccaacctttacagactctatatgaaatctatactaaccaaactaagtttatatacaacaatctaagttatatacattaataaatacaaaccttcacctaagaaaatatctttaacccgacataaatttgttactacggacatgtttttgtttaattggagaaagatatatgattgtgtatggtgtctattgattgattgtcacagaagtataggcattttctgttattggcaaactaagaaagaaaagacattttccactagttatgtaatgcatcttcgaaatacccaacggaccaaacctgctcatcctttccgtttttgatattatataacaatattttatatcttttaatcgctaaaaacgaatattatataaatgtattggatgtccaaaaaaaaaaatgtgaatggaggctttcatatgctatatcactatcaaccaatcacagaacatctttgacagaaggttacctatgcacgtacactacacatacgatgctctttgtttatatctttgcttatagtttatcgatgctaaccactgtaagaattaagtaaagttaatgccaatttaacattaagttaaaattactgtaaaaagtaaattagataggctgccttttaaaaaaattgttgaattataaccatatttgcttttcaaacatgcatgtcccaagtaacagaacaaacaaaaaaaagaagaagtttggcgtaatgctcctataccatgggttagtgctctcaagcgggtcatgtgtacaccaacaatatcaatttttgggtgtttgcttttaactgaaaaagtaaacgcatcgaatctttattatgatttcgatgaataatgataaaatttgggacaatttcaattcaagtgaggaaaacgtgtctgtgccttcttggtaaatctaacactgaaatttgacacgcagttgcttctatagtcagtaattccaataaagcatctaaaattgcatttgaatatttaatcatagtcgtccctatcaataattgtcaccaacaaagataaagggtaaataagaaacatataatgaaaattgaatggtcgtagttttatatgttagttggaaccaaagattcttcaatctatcatccactcagagctacgtggacagtcgatattttgggttatataaaaaaaaacaaaattgtactataagacaaaagaaaacagtattaaaaaaaaaaaaatcaataacaagattatatcttatcccaatgaacaaaatgaaaatttagttattttgaataatgttacaggttttaattaaattatactatatcacaaacagcaagagtcagatacatcgaacggtccagctttcctcctttatttttttctggctatcgttttgatgcaaagttgtttcgttaatcgtgaaaattaaaaagctacagcaatcttctccgaaacttcatacactcgccgacaagagaaacttcatccactcggatttctcgtaacttgcagcactaaacatttcatgaaactattcacaaaagtccacgaaccttgcaattggccacaaaatttaaaatacttatatacgtaacgacaacctatccatatttttctttctaacgatccaaaactggccacgcttcgactccatggtgatattaactagggaagtggctaatggcaaacaagtgcttagaagtggtaaattcaaataataaccgtcgattatttctttctaaccgttattgaggttaccaattaaaaaaagtgatcacaaactaggtcaatgaaaagggagattttttgttttctttgggccaatgaaaatagaaactaagatggacaaaagaaaatattataattggacaaaacagagtcatttgagatttaaaacagagaagtaataaaggtcaaatgtttttgtggtgagctctcaaaaacagacataaaaaaaagaagcagaatcattcccatttataacaaacctaaacctctcttttcttcttctctttacctttttcattccaaaatctctctctctctctctctctttctctggctcgggaagaag

SEQ ID NO: 7164 - DNA, 3000 bp, Unknown
  misc_feature (1)..( 3000): cDNA_ID_1816858_gDNA_ID_1621130_Annot_ID_172472 3000 nt of promoter + ATG
attaccagagtgatccatatttcattcataatgaccaaaaaggaatactaaaaaacatgagttatatggataataattatgcctaaaatgtccctgttttcctttgcagaaaaaataatattacagaaacgtcattactatttaattccagcatggcaataaaatcacatttatttacaaaactgccattgtcgtttttggtgaatatgtggctcttgttgcaacagatttgttttcgatcacagattttttggtcaaccacagattgtttacaacagacttgttttgtaccacagactttactggattaagttacgacagatttttattttttcgcagatttgtttatcgtgacagatttgttttatatagtctccacagatttttctaaaatttcaaaatttagaatgttgaaaccaaatctgtcactgatttattttccataccgcaaatttttccttatggtagcagcagattttctatttgtaaccaaaaatctgttgtgttataacagatttgttaacccaaaaaaatgttatatagtcatgacagagttgttttgtgtaatcacagatttaattaacttgttaacaaatctggtgttttataacagatttttgttaaaaaataaaattactagacagtcccatagtgataacagatttatttttagtgataacagttttgtttttcagtgttaaaacataacagattttctcatatcaatgttatggccgatttatttatgactagaataaactttttagtaataatagactttttgttagcagatttgtttttaaaatttcgaatttttttgttacatgagatttattaactagccctcaagtaaaaattttccggtttgattgtaggttaaatccggtttgattcaattttttttttttttgaaaaagaaattttcataacgtcacgacagacttttattaatgtcggcagatttttacataatattgtcatatttgaattttaatgaattttattagtcataataaattctccaagggttttcataaccgttttttttcttcttctattcctaccatcaaatcaattatttgtgaattgatacatgtcaaaatattattggtaagctaaaacaagtcaatttataatatgcaatatcaaaattaaattgtttttttttagtatttttaaaatcaaaaacgaaatatgtgaagaagattcttctttatctaaattttgttcaaaattattatttaaaaaaaagtttgttctcacggattttcgtttttgttttaattatgtaatataggttttggttttcttttttatccacgatttcctttttgattttataattctgttgaaaaataatttggttttgctgatttgtcaaaattttattggtggagtgacttgtgctttaaaatataaaagatttgttttattttttattttttgttttaatttgattacaattaatcattaaggttatttcgtctttttaccaaagatatggcttactacagtttttgaaaccaaacgtgtgtcatttaagttatttatgttaagagttgagtcaatctaagcaaatcttactaaaaaaatttattgccataaatacaaaataaaaatctgggaacaacaatgaatatgagaaatttgttcatcggtaaaacctatgtaactgcagcgcgtacattagaaatcatggatctcaagaacatatcatagaacctacgtataaattacaataagcgtcgatctcaataacatttcatagaaccataagtttactttattaatttatattgtacggataattcgaaattacttttcataagagtaaaggcattccaaaacctgaaaaaaaaaaacagtttttaggtcctttaaaagaatttataagtaagaatttataagtatatcttattgtaaagcacgcgaatatctttctcttggagtttaattcgacatacattacttaaaaagtatatacactatatacatattcatgtacgtgtggtgtgtgagggaaagaaagataattaatatatatgttgggatacgagatcaagtacgagaaaagattaaggtgttgattagttgcttctaattgtcatcttcatgactagaccatactttggtatacacaactggttacttttagtttgagatgcggcggtacgaaaaaaattaaacaaattaatgtgtgtttcaaaatattaattatagaattcaacactgttttcttagttgatctctctaatgctacaaaatattctgaagattataatataaggtgctactaaattatccatggtatgattcgtatatccaacattttttctgtattatttagaatttttaacaattaatactttctccctaaacaaagtttataaaaatttcactcaagtttcactattgaacgaattggtaaacaaaaataaatgttttggctatttaaaaaaaaaaattggtgcggtaaagaatggtaaaattgtagcgaggtgataatagaaagttgttaagaaacatctcaaattacagcatcttggccgataataaaactaatatactatgtttgatcatcatatgatttatttttcgttctagcctgcttctttgattcgtagccaaacaagctggagcactcccaaagtcccgagtcttaacgttttatggcccattaacgatctaaagcccaacataaagaacctatttctatcctttgagaagttttctctgtccgacgattcatagccaattaacgctaagattactatttgatttaatctaaaatatctttagcgaaaagaaagttatttaccaaaatctaaaaatttatatgtaattatcgaaatctttttaaaaaatttgatatgtaattatcgaaatcttcttataagaacaatataccaactcttttctttaataaccctaacaaaaaaaagatacataaatctggtgcatatacacatctctctatccgtctctctctgggtttcaatg

SEQ ID NO: 7165 - DNA, 3000 bp, Unknown
  misc_feature (1)..( 3000): cDNA_ID_3049921_gDNA_ID_1621130_Annot_ID_172466 3000 nt of promoter + ATG
aatggtggcttttggaaacttgtgataggtttttgccagctgtgaactcgatggaaacagctggatgatgttttgtcttgaaagtttgtatgggctcgataaaaggagatcgacggctgagactaaacgatgagaagccttttgagtttttgattggtttgatcaaaccctactttctcacgtgcaccacacgcttgtttttggatcagtaaatttcttaaaagtaaatggattggtaaccacaaataatttagatttctagattttaacagattgttatctaaatatcgggaaaaagtgaatctaaaaggtatttttattttgtgttgatcttttatcaaaaaaaaaaaagagtacattgttatgtttaacatttttgttgttggaataacgagtaagaagcgtgtctcactacgaatattctcgtgtgtggtgccacttaataatgttttgttttcgttattgtcgacgttttgtagtgttgagtgtgcgactagcgccactcaataacattatcacaaatatattcatttgcactttagacttaaatccatttcgttagtgttgccgcgtgcagtgtataatcgtttgattcgaatacgtaacgatgaaatctacttatatgtttttatacggagaatacatctccttttatttgtgtatgtgatggaaaatattctgtaatatttaatttaagataacgtcgccatgtttagtgtgactgtgtgagttaactaatgttaggtttcaactgggtctatcggctaccaaatactactaaggtcacaaaggaataaagaaccaaccttgttatgattacttgagttctttgcatttactattagcactacaatttgtccgccatgttcatgccaaaatccccaaccaaacaaattagaagcatgtaaacacttccatctatgtgtttattatttcttaaaattatgaacaaatatagtaaaaaaaaagatgaagatattagtagtaatagatcaagcaaattaaattgaagttaggtggtggaacaatgatgtcgttttggatacggacggagaaggtagatagagagagtcatagagatgcttttctctttattcgatttggtattataaaagtgtttgtttgggtatgaagatattacgatttacgaatttcaaaactatgctttgcgtggcgagtacaacacgggtttattgagttttgtcttcacctctccacttgctttagatttttactacattccgacagctaagtagaagacaaacaaagacagttgtagtaataagcagagctctttgcctttgcttcttgtttctgatgttatcctaactttgaggcaaaccaattttatgcttcattttgttctaaaattagactttcacaaaacaaatatattttcatttttcataggaccaaaaacgtcctcatttatctgtttgttgtctgtgggtaagaaaacaacatttggagacaatagttttcccttcaattaaagaatcgacgttttgataacaatcccgaaaagttgccaaaaatggaatcgagaaactgaaacaaaaaggctttacatttgaattgagttgagaaaactaaaatgacaggagcaagttttagttgcactgtcttggatttattgaaccggattctcctgcatgagtttgcggttataatgaatgttagagaggagatatgtgatggggaataatcgcgactatagtttatggaaagtgttgccctcagttcctttctatgctccaaaagactgcgaattgcaaagaggaaatgcatatctcaggagttgagtggaggaacatatccaagtgcatgtagtccaaaggatatgaagaagaaatgtaagttaactcaagctccgaaacctttttacgtagatatttgtgaaaagctcagatggatccggaacagggctctcctgaaacaaaataaataacgcatagactaagttttggtggtgattggtacacaattgtagttagagatgtaaaaatctcgctttctttatcttggctttagctacataaacctctataaattaatattattgaaaccatgatattttattaattttttttaaaataattttaattcataaaattttagaaagaaatcaattgagacaattttatcgaaatacaattagcgttttggatgttataaattttgtagtttcggatttgaaattttaataattagaagactttgttttcgaaaataaattagacaataaaattacaaacaatatacgtgaattcattttgataggtgaattcagataaacaaactatatacataaattcaaaaatttaattaataatctcaattatcgtatttaatagctagaatattatcaaaatgaaaatgatgcatatttaaaaattaaatacttacaaaaaatcttgactgtttttatgacatagttatagaatatatagtctttgccaaaaaaaaaaaaaggttatagattatactacaacactttaatttaaaaacacattagaccagttattttattcaatacaagtttgagatgggttgtaaggaattttaatcctttcactaaaagcataccttagtatatcaatatgcaaatttatataattattaatgagaaacacgtattacataggaattctaaaaaaaatcttattatcttgtcaaattttattctaatccaatttgagagctaaattttttattaatttataatattattaatttatggaatattaatttacggagtttctattgtagtcaaacaaataataaatcttgtatataacgttgaacttgacctgacacttacgaggaatctttcttgttttcaatgataattgattacatgtttttcgtttgtttaatttattataaaatattaatgatagataaaatgacctatatgtagacatgaagatccatattttacgggatctaaacgcctataagttttgtccttccacagtccaatagaagttcaaaaagaaa

SEQ ID NO: 7166 - DNA, 3000 bp, Unknown
  misc_feature (1)..( 3000): cDNA_ID_2990311_gDNA_ID_1621130_Annot_ID_172464 3000 nt of promoter + ATG
aaacttctctcttaagccaaataaaagagagacttgtccttcttctgcttcatcttcttgctttcttcacttctttaactctttgagttatttatttccagaagcttcatagtttctggaaaatgctaatccactagcggaataaaagacagatctttaatccactttagaaaccgcgttttctgaaaatgcggttgcgttttccgatgaaatctgccgttttagcgtttgctatctttctggtgtttattccactgttttccgtcggtatacggatgattccgggaagactcaccgccgtatccgccaccgtcggaaatggctttgatctggggtcgttcgtggaagctccggagtacagaaacggcaaggagtgcgtgtctcaatcgttgaacagagaaaacttcgtgtcgtcttgcgacgcttcgttagttcatgtagctatgacgcttgactcggagtacttacgtggctcaatcgcagccgtacattcaatgctccgccacgcgtcgtgtccagaaaacgtcttcttccatctcatcgctgcagagtttgacccggcgagtccacgcgttctgagtcaactcgtccgatctactttcccgtcgctaaacttcaaagtctacattttccgggaagatacggtgatcaaccttatctcttcttcaatcagacaagctttagagaatccattgaactatgctcggaactacctcggagatattcttgatccatgcgtagacagagtcatttacctagactcggacatcatcgtcgtcgatgacataacaaagctttggaacacgagtttgacagggtcaagaatcatcggagctccggagtattgtcacgctaacttcacaaagtacttcacttcaggtttctggtccgacccggctttacccggtttcttctcgggtcgaaagccttgttatttcaacacgggtgtgatggtgatggatctagttagatggagagaaggaaactacagagaaaagcttgaaacttggatgcagatacagaagaagaagagaatctacgatttgggttctttgcctccgtttcttcttgtcttcgcagggaacgttgaagcaattgatcataggtggaaccaacatggtttaggaggagacaatgtacgaggaagttgtaggtctttgcataaaggaccagtgagtttgttgcattggagtggtaaaggtaagccatgggtgagacttgatgagaagagaccgtgtccgttggatcatttatgggaaccgtatgatttatatgagcataagattgaaagagctaaagatcagtctttgttcgggttctcttctttgtctgagttaacagaagattcaagctttttctgaagagtttgtgtaagtcaacaacattctttttacttgttattgtagttttgggttattacaaatacattgttgaggatttattttttgactgttggttgtgtaaaaattgacttgtgtgagagaagagtttgtagaagctattgatgaggactagttagaagaattctttgtttggaatttgtattttgttgtgttctttccctaaatggttatgttgatctcaattttctgtatttagagtcttttcaagaatatgcagcgagtgtgttgttagcatgaaataaaccccaagtttgttaaactatgtcattgtagattacatataagattacatcttagaatggttagaagttacttgctatggtaaagaaaagagttatttgaatctgtccgcaatgatgaagcagtgtgagataaatgaagaagaatggagacattaaaggcttggctcctcggaaacataagttttcaaactggacacacaattgtaagtatgtaactgttcacatatttaagtctgctccatagtcaaacttcaaagttcaaagaactcatcttcttttttttttgggtcaagacataaaataactcatcttaaacggcaagatttgggctgttagtgggctggattgggttgacctgttaagtaatacgatgtacgtattcctcgtttctaaatgctttttgaaaacgataatgaaaatgttaaatcacacattagaaatttgtgaaaaggatgtccgtacctgcattggtttaatgtttgtatatgacattcatatagtaaaagaatgtgaaagtaccttcgactttgattgttatcaatatcgactatttttaactatcaacattagtcagttaaactagttaataatcgcttttgtccccgcctaatagtttagttagtacaacactttcttacttaccatcttccgacaaaggtcccactgtctcttgtcttcattctcatccttgtatctgatctgatctcttcttcttctttttcttcctctctctctcactcaaatctgtaattgggatttttcgacccaaaattaacaactccttataagttttcttgataggtcctctttgtgtttttttcctcacaaagtttccaactttgaaatgtatttgtgaatcttcacttgttactactttttgtgtccatcattattttggaagtaacacaattgtgtgggctatcttcactttttcaggtaatcttacaagattgccactagattctcttttttgtttttctttttggaattgtaatgataacttttcttagtgtcaatcattgatgagtgtttggctctctctctttgcttattcaattattgaagctcactctcaattagttatatttttttaagaagaatctgagtttgctcaccaagaggttgaaaaatgctgaagttgaaagtgtctattaattactaaaccaagattatatgtgtttttcctctctttactacaattattctgctttacagtgaagctactattggatgctaaaaaattggtatagttttagctcaaatccaagttgattctggctttgttcaagtttgaaagtgataagaattttctttggttttgtgtggattaggattctttctggtgagcattaatg

SEQ ID NO: 7167 - DNA, 3000 bp, Unknown
  misc_feature (1)..( 3000): cDNA_ID_1816890_gDNA_ID_1621130_Annot_ID_172460 3000 nt of promoter + ATG
aacagaacaacgagaacatgatagcaacctcagagaggatacagttcctcaaaaagcagaagagttacagagtgaaacataccaagataatgtatacgaagttcatcacttatttggggagtcaaatttcccatcccaatggcttgaactgcatgatatatcgtaagtggctgaaataaaagcaagctctacgagtcaaaaaaaagaaaacctcaagcattctaatcatacttgaaatcacattactcatcagaaaaactgttattacccagtggagaagtagagctacaggtgaatctagaggtaactttctccactcgaaataatccttccaagtacatagctgtttagttattggagataaaggccctgtgtaatccaaaatcagaactctatagaaacaaactctttcagtaaaaccataaacagagaagtgaaaatgaagtataccacgacatggacaagaagagctcggcaaatgccacccttcaatattaaaactgtcagaaaaagatagtagtcagctcaaccaacaatagcttcaaaccaaaacgtgattctcattaagtaaagagaaaaaataagcaatgaaacctatcaaaagccaaagctccacagttacactcatacatccacattccaacacgatgtaatcccctcttgatgaagaacgagcacctagtctcatgtttttgactaacctaaagaacgaataaaccaaaaacttaaactttgagctgaatttttactaaccaaaaggcatttgattcctcactatcattcaaagtgatgattaacctgaattgtagcttcttctgtaaatgtaaatggaaaatcatttaaaagatcaacacgacgcatttgctcttctaatctctcacattcttccttgtgatagctccaatgcgaaatctacaaacaaaataaagatcaacaaattcaacaaggaacatcctaatttgcttatccacctaactacaagcgaccgatcaaatcatcactgtgaagaagaagaaggcttaagagagagttaaagcagaagttaaaacctgatgagagacggagcaataagctacagcaccacactgaccacacctccgcgtcggtggaccaacacaccgcgtcgcaaaaccacgcgcggcacactccatccgccgtcgacgaccaagacaaccgccgtttcttctcgggacgaaaaaagtattaaagaatctcggtaactcttaaggcccatttttctaatcataaggcccaatgttttcttatcgtaaagcccaattagttcttatcgtaagccacaattttgtttatcgcaaggcccattttgttctcatattaacaatgttaacctagaaaaagtattttgaacaaagaaaaaaaacccctataaaaagtattaaaaaggactgatacaataatgtatataaatatcctaaaagatcttaattttgtaaatttattgttgtatattctaaacccgcaatattagaatgatgatttagtaaacaagaaagacaaaataaataattaattttagctagaaaagatgaaataaacactcatgatttaagccatacaaatcgaagccccttgggttcagcatttctcaccaagtaaataccatcacctctggaaacccatttacgtacttgaccacatcttttattagcggctcctctgtatgctctccatatgttatacacactatgatgccttaagatttattcacgacgatttaatcagatacgcttatggattgccaaagatgatgccatctacttagagaaaaacaatggaaagcgagaacgcatgtataattggaataaaaattaatatggttttcatatatctaaaaaattggacatttgaagccttaataaattatactatgtaaaaatacttgtttatgaatgtaaattataataaattacgatttaattagggaaatattgactatatatttcacccaaatattgaatgtaaattttattttccaatacttttgcacatttaagaaattttcggatgtatttcctaaagaatattaccttttttgttttttaaaccatgcctttttgttttacacgttcataaatgcatgttccatacgcattaccataatttaatttgaacttaattttctctaggaatggtgatgatccactaccactatcattgatttcattccatattcctttgaccgactgaaattacgttggaaatagtatattttgatgaataatttatttactcggaaaaaagaggtcaagttattaatagtaagtacatatacattatcaattaagaattcaattgagttttaaggaaaatcctattaatttgtttggtattcggtatttgttagttctaaggaattgaatttcccgattatacatcattataacgttctcaagttccaaacttgcaacccacattttgtcgatattctcaaatgtgaattcattcaatttcccatagaaaacataaatttgcacttaaagttaacaattgaaatcgtatctaaatgggaatgtttttggcttttagtgttagacttccaaagcgtcaaaaatatttctagaaagagcacaaaaaataagcaacgccactacttttggacaaagtcaacgataacacacatcaaccgcaccagctccataaaagtccatctcacgaaaacgattctagtcaaactacctaaaacacccttatatttacatacaacccaatcccactaacaagggtattttcgtcaatcacaaaatttatcaccgacccgggaagaagaagaagaacagatcaactaatttctgctttcaactccacattaaaccaaaacctccaaaaagaatcatttatttaaattatcttcccgttttaagttcctgagatttttgggaattgtaaatttgaagaaaattaaacaaagacgtgttttcatttttttttttgtttcctttattgatctctctctatctctctaaatgagctaaatcgtta

SEQ ID NO: 7168 - DNA, 3000 bp, Unknown
  misc_feature (1)..( 3000): cDNA_ID_2990290_gDNA_ID_1621130_Annot_ID_172458 3000 nt of promoter + ATG
aagaatgtgagagattagaagagcaaatgcgtcgtgttgatcttttaaatgattttccatttacatttacagaagaagctacaattcaggttaatcatcactttgaatgatagtgaggaatcaaatgccttttggttagtaaaaattcagctcaaagtttaagtttttggtttattcgttctttaggttagtcaaaaacatgagactaggtgctcgttcttcatcaagaggggattacatcgtgttggaatgtggatgtatgagtgtaactgtggagctttggcttttgataggtttcattgcttattttttctctttacttaatgagaatcacgttttggtttgaagctattgttggttgagctgactactatctttttctgacagttttaatattgaagggtggcatttgccgagctcttcttgtccatgtcgtggtatacttcattttcacttctctgtttatggttttactgaaagagtttgtttctatagagttctgattttggattacacagggcctttatctccaataactaaacagctatgtacttggaaggattatttcgagtggagaaagttacctctagattcacctgtagctctacttctccactgggtaataacagtttttctgatgagtaatgtgatttcaagtatgattagaatgcttgaggttttcttttttttgactcgtagagcttgcttttatttcagccacttacgatatatcatgcagttcaagccattgggatgggaaatttgactccccaaataagtgatgaacttcgtatacattatcttggtatgtttcactctgtaactcttctgctttttgaggaactgtatcctctctgaggttgctatcatgttctcgttgttctgttaggcagtttttgttaattgcctccacttcctttatattagtttagtcccttaatattggcaaaagaatcatcagaaccactatggtgtaaaattctgatatatgatttgctgatagtttgagcttctgaagggcctcagaaggaacttgggcaacttggtgtttttgctgagctgcaagcgctcttccctggtctgcgcatttatgtagatttgattggacctgacgttccacaacatatgtgagtcctgcattccacaatctatttgattactttgtataacactagttctattttagttaggaagagtaaagatatgtttttccttttaatcactcttctttagagttctttaagctattcagtgacaacattatagctggattttctttgtatgtgttgaactattgacataatttgatggatcgttctctatttgctttctcgatgaacagggatggagaaatgatctccctttgcagatattccccttgcatgggaaaagaatgtgaatgtaaaaattcaagcaaaattctcaattccgggagcaaacctgctttggtttcggctgtgtcattacagctccgtagagggttttaccatgatcgttacaatgacataacaaaggtacccctttctactagtctaggggcaaaacaatgatttactatactgttcttatatgtaatgtccattttcgtggaccttgaattgtttgtttcctaaaagatgtaataatttctgattgaccatctcggcaggattcatttcctccacacatagtgattgctccaaacgcaggcatcgctgcatatccaagctggttgccaactattgtacgtttttccagtagctaatgtcacatccaatagttcccaggatacacagagagagcatatgtttgttattcattcatgtgttggtgtgaataatttcaggaactgataaaggagatacaagtcccagcagtattctctgattactgtgaagaagcttgtcatctggctgcttgttgcattaaaaccatcacaggacaacctctatcatcacctgtaagtctaaattataggttcattgtcctatttaactatttcaagtctatgtttattgatatgtgggttcctcctgcatatagtcaggcttatgtctcatcaaaactgtatacgtagaatagagagtcgacacatatactatataatgaagttgaaggagacaaaaacatctcttttttcttcatctttggggccacacaaaacagacacactattgtccacttctccaatcaacctttgttggaaaatgatgttttgcagataaattcttatatatttcttcagaatcatattgatatgaatgtaacgatgtatctttgaaatgcagattgagttgaatccatttagacagccaatggcagtagaggagagtactctgtttatcccttgctactcaaactgtttcatcttcgcaatgtaaaaattctccaacattattgatcaactcaatggttcactgttatggtctggatcgacgatagagatactgttccggtgtatggaccaacattatctatacaatgaatgtagaaaatgtcacatcattttgttattggttgttgtagttatttatgtggataggaccatcaagtgcatacatacaatcattgtagtcttaggtgaatattatgctatatatcatatagcattagtcatttcaagtgaaactttgcaattatctttgtcagatgtcatgagcaattgaacaatgaaccaaactgaaccagatggtaaaatccggttcttggagatattcattcacaaaccaagtttgtgtctacgtggaagatgaaaccaaagcaaagaatcttcaaacttcttgtttctaagaaaagtctaaaaccagtttggtcgatttcttccacatccaaaactaactcaatattttatctcccccaaagtccaattttccaaaaaatccaaaacacacagagagaaaaaaaactgaaacatcccaaatggatcatcatcttcaaccataacaacacgaaacccttcttctccaaaatccccaaaaccttgaaacaaagtctcaaaatttcacttcgtggatccgaatg

SEQ ID NO: 7169 - DNA, 3000 bp, Unknown
  misc_feature (1)..( 3000): cDNA_ID_2024838_gDNA_ID_1621130_Annot_ID_172456 3000 nt of promoter + ATG
gacaaaagacacgcaaacgattccaacgacctctcacccgccaacacaaaacgcaaacgcagacctcgatttatatatcttatatttaaaaccatcttctaaacggctttacctgttttttagctttaatctctcttctctctctcaaattctctcctaaaatcctaaatattaccttctccatttgtttcttttcttcttttttgggtggctacctataatccgaaaaccaccatgaggttttgtgttttcgggtttttatcgcttttcttgattgtttctcctgcctccgcctggttcttccctaactccaccgcggtaccaccgtctctacgtaacactacacgtgttttctgggacgctttctccaatttcaccggttgtcaccacggccaaaacgttgatggtctctaccgtatcaaaaaatacttccaacgttttggttacatccctgaaacgttttcgggaaatttcaccgatgattttgatgatatcctcaaagccgctgtcgaattgtatcagacgaatttcaatcttaacgttaccggtgagcttgatgcgcttaccattcaacacatcgtgatcccgcgttgcggtaatcctgacgtggtcaacggtacttcgttgatgcatggcgggagaagaaagaccttcgaggtcaacttctcccgcacgcatttgcacgcggttaaacgctacacgttattcccaggcgagccacggtggccgagaaaccgccgtgacttgacctacgcgttcgacccgaaaaacccgttgacggaagaggtcaagagcgtgttctcacgcgcttttggtcgttggtctgacgtcaccgcgttaaacttcactctttccgagtctttctcgacgtctgacatcacaatcggattctacaccggcgaccatggtgacggagagcctttcgacggcgttttgggaacattagctcacgctttctctcctcccagcgggaaattccacctagacgcagatgagaactgggtggtctccggagacctagacagtttcctctccgtaactgctgcggttgatcttgaatcagtggcggttcacgagatcggtcatcttctaggtttaggacattcttcagttgaggaatccatcatgtatccaacgatcacgacagggaaacgtaaggttgacttaaccaatgatgacgtggaaggaatccaatacttgtacggtgcaaaccctaacttcaacggcacaacatctccaccgtcgaccactaaacaccagcgagacactggtggcttcagtgccgcctggagaatcgacggttcatcgagatcaacaattgttagtctcttgttgtcaaccgtcggattggtcttgtggttcttaccgtagataaagttttttttttcttacttcaattcttttagtttgatttacctcatatcttattctttttttattaaaggatggggatatatatacacacatatttagacattggttccttttctacagtttttgatttcacatatactacttgtatataaattactttatgtcctatacctatgtttgatttcgtgttatacattttcttagctttctttacccaaacattttagcgcgttcttgtgtgtgaacccttgaagcttgggtgtccttaacttatcatagatattccatcttttgtgtgacgtctctcgatccatattgttacgatcgactcatcaatcatccactggaaatttcaaagaatataatgaccttagtagtctagttgaagagtctccatcgattcagctctgtttcatcacctatgtgcttgaatctgttgagagtgatcttagtgcggcaacaagttaacaattgttcatcactttaggatctattaccttcaatcctctattatcgtctaaaaaaactctgttttatattggagataattctcttggattttttgatatttttccctcgtatgattgcaaattagaactttgactctcttcttggacaaacgggatggatccctctccttatcatcgtcccttgttgattaccacttcataaaaatatttgttggatattagtcggaatatatctatgtagaaaacttgttaaactaaaacatttctgacggttttttcgatgaactgtttaccaatttccggcaatatatttttgagaaagtttaaatgttcacaaactgcaagtgtataaatcaaaaaaaaaatgaggaaacgaagatgggtggaattgttggatttggatatatagtgaatgtttatcagatagtgaatgtttagtcaagttataggacttatccggtgataggacacataaacccacaaacaaacttgtgctcttttttaccatttaagttcatcatacattttgagctttgttaaatttacggttctaaaatcaattttttggactactttatatatcgataagttaatacctatatattttaataatatataacagtctcatttttattaaattttttattattattatacgcttcgatttaatttcccaaaaaaggacatgataattataaaagaactatggggtcaaacgtgaaaataatgaaaaatccaaacctatctcgtaaaatttgcgtagcgattgatgagagcatgtgaagaagccactagatgagtcaggtctctttggtttggcactgcgcagcactttcaaagcccaagcaagagtccgtcgtcacgaacgtcttcttcgtctccaccgattcttcacgtattttaatacttttccgatttgtttttttttttcccgttttgaatctcatcggaattttcccccggaatcttatggtatattctattataccttttttacaggaacctgtttactctctttctgtgatttttgagtagattcggcttcgtacgattagggtttgaaggaggtgattgtggtgtctttcgttgtttgtggttttatatcactgtaagttagaattggctccagttgattttcctagggttttcacaaatg

SEQ ID NO: 7170 - DNA, 3000 bp, Unknown
  misc_feature (1)..( 3000): cDNA_ID_2044232_gDNA_ID_1621130_Annot_ID_172454 3000 nt of promoter + ATG
gaatagtgacatttttcacatacactgtgcacacagtaactaaagatcattgctttctcatttccactttggtcttggttgaagtaattttatttagtttctgaaggttgaattgtttggaaaaaaaaaaaatgatctccaaaacatgttattttgcatggattgaaaaaagcatataaccatagcaaaatagctgttaatataaaaatgtatggttttgagtttcttttgactataatttatagctcagttttcacaatctccataatattgatcacaatctccacaatcaaactttttattattagagtgtatagttaagcaaaatcccaaaaataaaaaacctagctaggaaaatattcctctaaattaatattacacactagttctaaacaatctgatacgagttgccatcgagatttgcacacgaaaaatgttcaaagggacccttttttcatctttaatctttttggactttggtcggcgttggctgattatgactcgctataccacgatttctgtcccttgttacaaataattctattagctagtctcgattctcttttttctttcttcttttgtttaagtaacctccttatctttcttgtttagtggaatacaggctccgatcaaattcagtcacatgtcatcatttctctaagatatatgtttccacgtcaacaattaatttcagttagtttgtttttatgtgtttatataatacgtaataaatacataaactataatttaaacaagatgaggatttaaaccagcccctagtaataatctaacattaaaacaaaaagtaataacataacaacgatacaaaaaaaaaaaaaatataattacaaattttggtattaaaattattttttctatacattaaatatggaaaaaatatttctcataaaaatatatgtaaatatgtaaaaattcaatcatccttatatattatgttaatttcctttagagtttaaggaaatagttttcgatggttcatgtatttctcattttatatcatattatcacttcgtcaaaactatataaaaagttaaatggtacgaaaataattcgtacttaaaacacataataatgggacatacaccacatatcaccaaaaatattaataataatgggacatgcatagaaggaaaaaaaacataaaaactgaggactgttttgatgaaaacaagaagaagcctaaaatggaattcgtaggatattacattgaaaaatatgactgtaataaatttaagaggatatcacttcaaacacttagttaaaaaccgactatagtacatcctattctttgactttatctagttatatttagtatttacatttgtataccgtctatatatgcccaaaacatgtgaaactatttttaatatagaagtgaagatgtgtccccaataattaatgaatcacatatacgtttttcaacctaaatgtgaattatttcgttaattttgggaaatcaagtttttttctgtttccaaagcatatcttataaactcactttttgttttgataatatataggcacctatttgcgaacaaatttttattatgtacacagtacactcaaaagctttatgtagttattatcattgttatagtgcctaagttgctgcttatctaactatccactaagttttttagtttggtctatatcttagctattaactttagtcgagatcatttaactactatggcggcttgacagactgaggctattctttaatgaaaaactctataatgtaaaattctttttcttagtcatatagaattatagatatctatcgtggtttcaaactttcaatctatatagtatataagtgtataagtgacattatctaaacatgtttatatcctcaaagttgtaaagttactaaacttccgaaaagatgatagaaatagcaaccagaaaaactatattgtattgacttttgactgactttagaactcaatagtgtaggccaactcaacctaacattaaatatttatgaagactaattaacaacaatcatagggagcctattaaaatgttaaagtcttgcgcatgtttgactatataatactaacgtatagttgcatttatttcaatgatataaatattttatatctcattgtactacttaagttatagattgattattcgttggtgatatttaagaccaaatcctaagacgacatatatatgtaagtgtaacccaaaaaaatctaaaagtcataaaccgtatgattataagtatatataagatacgtattatactacagaaacacacacatgtgtaacggaccaacatggatgaagaaatggtcccattgagaagaagagatctaatgacttcaaatcaagaatggtccattttccaaaatagacacgtaaatatatacaaagcttaatccccatccctctattgggtctacacacagcctagcatttttgtattttctgctctgtttttatttttttttaactttacaaattactttttaattcttattatcttcagcttttgttctgtctttttttttattttcctgataaattctcacaacttccattcatgactcgagctgggtcctttgatttgtcacagctaatcaaaacagtattagcacaaaaaagtgtatatcaatatgaccatgaagttcataaaaacatgggacctttgaaagatgttgtctcacatattcatacatatttcaataaaatccattacgtacgattccatataaattattggtcagtcatgctaaatgtaagcaagcaaacatatcatttatggtgttacatcaagttatgacagagtatgattgaggccagaaagtaacttatgggtctaatggatcgtattccaaagtaatgggctttttattaaggccgtaagaggcccatttatgtgatttctttgaagtcgctttgtttgcaagttgcgactactcagtttcttctccggcgaagaagaggataacgaaaagaaaacacatagct

SEQ ID NO: 7171 - DNA, 3000 bp, Unknown
  misc_feature (1)..( 3000): cDNA_ID_3049893_gDNA_ID_1621130_Annot_ID_172480 3000 nt of promoter + ATG
acaaacactttgtttcttttaactaactcagattcggtgagacatatcacagaagctcgcaaaaggctgtctgctagctttattcagtctttacgtttaacaatctatttttaattattcactataagatggcttcttttaaaaactttcttttttcctttatggaagctttagccctttgaacactcccttttttttcttagttatataggtaacccacttatgatcacagttaattccatgtagatcgtattaaagtagtctattgactaaatcactaaaatatcaattaatgaattaatgttgtatgatttgttatcgtttatacgaaagtaaagaaaaacaagaaaacatgacttggattaagtaactctatgttctgtcttaatacaggagagcagggaattcaagacgaccaccaggaagagcataagtacggttaaagcttgggtaagaagcagaaagagagagagaagtataattgttggcaaattaatataggtcttgtattgctgctagattctcttttcctttcatttgggatcgaatcttttaaatatgcgcaaaatatttgtgaccctacaattctgttttttttttttttaaatgtttgttttgttcctatagtgaagaaatattgagctagttaggggaggttttaaaaaaatgaagacactgattattaaaaggatttcaagaaagaaaagaagtatacgtacatgcaatgcaatcctgttttctcacgcattgcacgacttatattgggattatttctaatttgatccatcatcaaataacgtttagatgctttatttccttactcacattgtttattgggtacttgcactaaatgatcattaacatttattaagttaggtaaataattgtgtactccttttatgtgcaaaaacacaaaatgggtactattttattactaacatgctttcttatcaaatagcagtaccctatgttgttctaaataacatgctaattcaattcagatttggcagacaaaataacatggtattttagagagagcgcgcacaagtgtgtttttttaaaacaaatgaaaacatcataattacgtacctgattgacccttgtgtatatattcacgattagaaattgtagattaccaaaacactcgcacaaaatggttctatatatagacaatatatgattcttatcacatgttttgaatgaaaaaaaaagaattaagatggattttttttttgtaaagaacaattgtactttgaaagagtcttatccaatcattaaaaaaaatgtcgaatccattatttattgatgtattctgaaagcatatattcttccaaaggggcaaataaaagagatgtcgacaaagattggatacataagatattaataatttataaatgcaatggcatatatatatgatataatttgagctctaaatgccgaaatttgaaaaggagaatgtgtgtaatggttcttacaaataaaggagaccacaatgcttctttgtgttatgcttttttcccatcttttattcttttgttcttttgtggggttaactctaccactactcattttctcgctcttttttcacttattttccatatatttctaatttctaaattaattttactaatcttgaaatacaaaaaactattagacttagcttactaatttactacaccaccaacatacacactacgcaacatatgctaatatgtattaaaatgaaaagaacaaaaaatgagaaccggtattacaatttatcgtagtgtatgactagttatgagatgagaaggttcttgaaaaaagaattactaaccaaataatgtagattaattatttgcaaataaagaaaagcaagaatatatagcaaaatcatgagtttacggttcggctctataaaatcttctacaaccatccacgataaacttgatacatgaaatgtcttcttccattaaaacatgagttccacatataaaatggtttacaagtaactctcgaacatatgtgcatggtaaagcaaatatataataccattattttttctgtcttaattaagcaaaattaaacatatatataatatatgatccctacatgttcacttttaaagttcacaatttcaagagtttgaatatctttaatttgaattattaccaaacgcattagacagactaaacagagacataataatcaatcaacttctttttgtcttttttttttttttttttttgggcttccagtcttcataatcaaaagtaactgaagaccagtcttaaagctggaacatttgaactaaacatatacgactgctcctatcgctctagaaattttaattaacaattattcatagttacttaattacaaagacaacaataaaggtgaacgaataaattaaaggaaaattatgaaaatagtttaatttgtatgaaacttttcatccgcataccaaatgtcatatactcttatcttacatttttctcttgggacatatttttggagcgaacactttcgcatgtacgataaggttcagtggtctgagcttcgactacgttaaaatgatgattagggtttactaatttggaattaggagttacatttaaggttaaaagtttatgagtttcaagtttcaacgaagctttaaagtttaaacgatggttaaagttttatgattatggtgggctatgttatagttctttcaatttcgttgggccaaatgggctaaacgattaacgaccctatgaatgggcctgaaaaaatgaaagccacgtgtcagacccccacaatggactttgactcggtgcggctgccggagagaataattaattatcaactccgatgaaaagaaaacaaatacaaagttccaacaaaaatcgaaattcacaatttctcttcttctaaatccatggagtgatgatgatgatagatagattgaatccaaacacaaaccggatccgagattaaaaacaatccggattgtttatatttactttagatcggagaaag

SEQ ID NO: 7172 - DNA, 3000 bp, Unknown
  misc_feature (1)..( 3000): cDNA_ID_4255167_gDNA_ID_1621130_Annot_ID_172478 3000 nt of promoter + ATG
ctgcggttcgtttaacggtaaaaacttaacgatcattgtaactgctggcgttattggagctgttggttcattgtgtgttggatttgggatgttttggtggttctttattagagataggaggaagatgaataactacggttatggcgccggaaaatgtaaggatgatagtgattggattggtttgttgagatcacataagcttgtgcaagttactctgtttcagaaacctattgtgaagatcaaattggttgatttgattgaagctacgaacggttttgattccgggaatatcgttgtttcgtcgagaagtggtgtctcgtacaaagctgatttgcctgatgggtctacattggaggttaagaggcttagtagttgttgtgagcttagtgagaaacagtttaggtctgagattaacaagttaggtcagatcaggcatccgaatttggttccgcttctcgggttttgcgttgtggaagacgagatattgttggtgtataagcatatggctaatgggacgttgtattctcagctgcagcaatgggatattgattggccaactcgggttagagtcgctgttggagcggctagagggctagcttggttgcaccatggatgtcaaccgttgtatatgcatcaatatatcagctcaaatgtgattcttcttgacgaagatttcgatgctcgtgttattgattacggtttggggaagttagtgagttctcaagactctaaagatagctcgtttagtaacggcaagtttggttacgttgcgcctgagtattcgagcactatggttgcgtctttgagtggagatgtgtatgggtttgggattgtgcttcttgagattgttacaggacaaaagcctgttttgattaacaacggtgaagaagggtttaaggagagtttagtggagtgggtgagtaagcatttgagtaatggtagaagcaaagatgctattgatagaaggatttttggtaaaggatatgatgatgagataatgcaagttttgagaattgcgtgtagttgcgttgtatcgaggcctaaagaaagaccgttgatgatccaagtttatgaatctttgaagaatttgggagatcaacatggtttcttctctgagtatagcgatgagtttccactcatctttaacaaacaagaacacttaaaatgaatgaaaaggttttattactttcgtactccaatttgataccacttacttatctaccgttctcacttttaaccgcatttttttgtttttttctgttttgtttttgtgtgctgtataattctgtacatcatgtgatgcatccaatgaaaatgagaagaattgttttatatagatcaaactttgaagattctgattcaaaaagtctatcaagtgttagtgtttctatgagattctagttgtagttgttatcgaacgatttgaaattcgatttcaagcgaaaagacattatccaacgatgtttctgtttcttctaatgattctatggataattataatcttttctgataggagaaaaaattaatgtttcccaagtcgctaatgaaaaatttgataaaattttataagataataggataatattttttgaaaatctttgtgtaaatatatagtcccttaatatttaaattgataatcatataaattacatatatataaattgatatattaatgtactttatgcttttagtgtgtgtttttaattaaaattaaattttttgttacagcttatctctaatttttattgtataaaaaaattattatgttgtgtttttaaaatattgaatcgtaatatactttataaatatgatagcattagtttgaaaaacttggtttggagtgaaacattctctatagtttttaaattttgaatatatctcatttttgcgtgttctaaaaaatagaatatatatcattttcattttaatagttttatttttaagaaaaaaaatacgacaaatgaagtcaaaagagtatgtagaactgaattcatctaaagagtttgtatttttttttttaatttacatctatcgtttgtataagtgaattcatctaaaagatttgtaatttattatcaaaagatggttttcctaaatattaaaattttacaatatatcaaaactataaaaaaatgataacatgcacaacactaattttgtttagataaaaatttcttaattcatcttttaataaaaatttaacaattaattcttttaaaaattattaaataatagtagataaactaataatactataaattaataaaatatcacatgatctcaacatttttattttatagaggttttactgtatatggaaataagaaaggtaaaatattagtagaaaatttggaaagaatgaaacaaagtagaaaaactggaaactagatatatgtatattaaaattttggcatgcatgatattacattatacatttttataatcacattttttcaattctctgtatagtaaattttccgtaaatctcagtaattaacttttatttctatgtatctagttatatatacacgctctttgtttattttctctgtcaacagtaaaaacaacacacaagataagaagctaagttaagatctttgaataagaagaaagaagtatgtcgaaaattttgctcctcataggacttgctctccttgtaatccttgcaattgctgttatgggatacttaataatgaagcgtggtcaagaatagaagccggatgtttaatttaacggttatgtagtttttttttttttcttctttctccttagagtgttggggtgaaactataaaactttttgattttctatttgtgttgctccatattgttatcagtggatagaagtaggaatgatttctagctatttcatgtgtgtttgtgtcataatcacctaagaattatgattttttctaaatcttatggatgtcatctgacccccttaccctccatgtaaatcttaatgactaactttgaaaacaaaattttatacaataagata

SEQ ID NO: 7173 - DNA, 3000 bp, Unknown
  misc_feature (1)..( 3000): cDNA_ID_1808030_gDNA_ID_1621130_Annot_ID_172452 3000 nt of promoter + ATG
ttcaaatttcagtttcttgacttcattaatgttaatataaataaacatatactgcatgataaaaatgttaatttaactgtaaatgtgaatgcaaatctgaatgtaagccatatgttttaaatattgtctacctaaacagagaaatgaattagtagcccaacctagccataacaaataaataatgaagaaggtcttcttccgccgaagataccaaaaatatattatcttctatttcaaaaagtatcccatttgtttctaatttctatggtacaatgtagttgttgaattgtaattttctcaatgttaatttcgttatctacgtaagcattgtcaactatttacatagtacatacaagtgatagttatatattagctcttccataatttttaattcttatcaatatgaaaatattgacaaatttatacaaatctgcatagaaaacacatacaaaacaaatatgaaacaatgttaaaaaaaaaaaaaaatatgaaacattttttctaatacacctgaaaactaaaataaggggtaaatatattagaggtaagcgaaaaatctactacaatctaaaccgagatcatcccaatggtataattaaagtctaaaatctaaatcgaaggagcaaagtattttgtaaggcacacgtgaaagaaagtaactacgggagtgattaataaaaacgggccaatgatttaacacttttatggcataattaaaccaagaagggaccaaataaatatgacatattgatacaaaaaggaatgtgaagaaaatctccggttctacgaaaaggacttccactactctttcccacacgctccagaccactgtttgctttcctctgattaaccaatctcaattaaactactaatttataattcaagataattagataaccaatcttaaaatttggaatcttcttccctcacttgatattacaaaaaaaaaactgatttatcatacggttaattcaagaaaacagcaaaaaaattgcactataatgcaaaacatcaattaattacattcgattaaaaaatcatcattgaatctaaaatggcctcaaatctattgagcatttgtcatgtgcctaaaatggttcaggagttttacatctaatcacataaaaagcaaacaataaccaaaaaaattgcattttagcaaatcaaatacttatatatatacgtatgattaagcgtcatgactttaaaacctctgtaaaattttgatttatttttcgatgcttttattttttaaccaatagtaataaagtccaaatcttaaatacgaaaaaatgtttctttctaagcgaccaacaaaatggtccaaatcacagaaaatgttccataatccaggcccattaagctaatcaccaagtaatacattacacgtcaccaattaatacattacacgtacggccttctctcttcacgagtaatatgcaaacaaacgtacattagctgtaatgtactcactcatgcaacgtcttaacctgccacgtattacgtaattacaccactccttgttcctaacctacgcatttcactttagcgcatgttagtcaaaaaacacaaacataaactacaaataaaaaaactcaaaacaaaacccaatgaacgaacggaccagccccgtctcgattgatggaacagtgacaacagtcccgttttctcgggcataacggaaacggtaaccgtctctctgtttcatttgcaacaacaccatttttataaataaaaacacatttaaataaaaaattattaaaacctcaaaaaatctctgtttcttgtttatatatccaaacaaatgaatgtgttaaaccttcactcttctctccacacaaaattcaaaaacctcacatttcacttctctcttctcgcttcttctagatctcaccggtttatctagctccggtttgattcatctccggttatggggagagaatgaggagttaccgttttagtgattatctacacatgtctgtttcattctctaacgatatggatttgttttgtggagaagactccggtgtgttttccggtgagtcaacggttgatttctcgtcttccgaggttgattcatggcctggtgattctatcgcttgttttatcgaagacgagcgtcacttcgttcctggacatgattatctctctagatttcaaactcgatctctcgatgcttccgctagagaagattccgtcgcatggattctcaaggcgagcctattcactttttttctctacctctcatttttttcaatgctaaaatacgccgccggagagtgtgtagacgctaaaatacgctgatcgaatcgttacatgcagagaatctttttttttacagtagtgtggtattgtttggtttacaggtacaagcgtattataactttcagcctttaacggcgtacctcgccgttaactatatggatcggtttctttacgctcgtcgattaccggtaaatgttttaaaaacgtcaacgttagttaattctattgtctctgtttttttattatattgatatgacaaataacaaccccaaaaagtcagttttatttccctttttttttttcaatggatcgatttgtttattgacttttcttcagaaaaaaatgaaaacgactaaaaatttattagagcaaaaaattataatcggtatagaataatttagtagaaattaatcttatattggaatgtacgtaaacgatagaacaggagcgggctggggaactttttttcgttttttaattattttattgaaatttatattttcgataaaaaattacattgacgtttacataataatagtatacttttgcagtaaactttccacttcatatatcggctttattgaaaactttgtaatcatagtgttaaaacgctcctactactatataatattttaaattaattttgtaattaaacttaatagagtatatagtaatcaatgattatattaatcagctttaatttctgtaaaataggaaacgagtggttggccaatg

SEQ ID NO: 7174 - DNA, 3000 bp, Unknown
  misc_feature (1)..( 3000): cDNA_ID_1808030_gDNA_ID_1621130_Annot_ID_56446 3000 nt of promoter + ATG
tttgggattttgcttaactatacactctaataataaaaagtttgattgtggagattgtgatcaatattatggagattgtgaaaactgagctataaattatagtcaaaagaaactcaaaaccatacatttttatattaacagctattttgctatggttatatgcttttttcaatccatgcaaaataacatgttttggagatcattttttttttttccaaacaattcaaccttcagaaactaaataaaattacttcaaccaagaccaaagtggaaatgagaaagcaatgatctttagttactgtgtgcacagtgtatgtgaaaaatgtcactattcatcactcatcatgcaagtgcttgttgatatgtttgattagagactgaaaaatgtgaaaaagttacaattcatgttgttatacataaaattggagtctggcgaaaaaatcgatcaatgatcagtgtatgaatattatataggcctcattatcattccattgaaattggtagcttcaatgatctgagttcaccgatttttcaatgttttgattattcattttcaagttctcctttaaaaagaggattctagaaatgtttcctaaaactaactcaatgtagagaaaaaaaacatatattgctgaaaatgactcgacccacttgttaactattcattatatttctagtaactcaacatggactcatgatcatcattgtatataacaaaaaaaaatgcattattatgattacatatgcaagagtatatcaatagggtccgagttgactatgctacaggagaacgaaaaaaaacatttcttaacgagtagtatcaattaatgtgacgatgatagtataagatcatgtctagtgatatcatacgtaccatataattagatctgaaataaccattcaacaacgatcattgactataaggcaatagctcccatgaatcgtcttgattttctttaagaaaataagacattaacaaaaatgacgaaccctaccacgagaatgtagtcagtctgataaattgttgtaggttgggaggtgcatattttccctcctttcaaatttcagtttcttgacttcattaatgttaatataaataaacatatactgcatgataaaaatgttaatttaactgtaaatgtgaatgcaaatctgaatgtaagccatatgttttaaatattgtctacctaaacagagaaatgaattagtagcccaacctagccataacaaataaataatgaagaaggtcttcttccgccgaagataccaaaaatatattatcttctatttcaaaaagtatcccatttgtttctaatttctatggtacaatgtagttgttgaattgtaattttctcaatgttaatttcgttatctacgtaagcattgtcaactatttacatagtacatacaagtgatagttatatattagctcttccataatttttaattcttatcaatatgaaaatattgacaaatttatacaaatctgcatagaaaacacatacaaaacaaatatgaaacaatgttaaaaaaaaaaaaaaatatgaaacattttttctaatacacctgaaaactaaaataaggggtaaatatattagaggtaagcgaaaaatctactacaatctaaaccgagatcatcccaatggtataattaaagtctaaaatctaaatcgaaggagcaaagtattttgtaaggcacacgtgaaagaaagtaactacgggagtgattaataaaaacgggccaatgatttaacacttttatggcataattaaaccaagaagggaccaaataaatatgacatattgatacaaaaaggaatgtgaagaaaatctccggttctacgaaaaggacttccactactctttcccacacgctccagaccactgtttgctttcctctgattaaccaatctcaattaaactactaatttataattcaagataattagataaccaatcttaaaatttggaatcttcttccctcacttgatattacaaaaaaaaaactgatttatcatacggttaattcaagaaaacagcaaaaaaattgcactataatgcaaaacatcaattaattacattcgattaaaaaatcatcattgaatctaaaatggcctcaaatctattgagcatttgtcatgtgcctaaaatggttcaggagttttacatctaatcacataaaaagcaaacaataaccaaaaaaattgcattttagcaaatcaaatacttatatatatacgtatgattaagcgtcatgactttaaaacctctgtaaaattttgatttatttttcgatgcttttattttttaaccaatagtaataaagtccaaatcttaaatacgaaaaaatgtttctttctaagcgaccaacaaaatggtccaaatcacagaaaatgttccataatccaggcccattaagctaatcaccaagtaatacattacacgtcaccaattaatacattacacgtacggccttctctcttcacgagtaatatgcaaacaaacgtacattagctgtaatgtactcactcatgcaacgtcttaacctgccacgtattacgtaattacaccactccttgttcctaacctacgcatttcactttagcgcatgttagtcaaaaaacacaaacataaactacaaataaaaaaactcaaaacaaaacccaatgaacgaacggaccagccccgtctcgattgatggaacagtgacaacagtcccgttttctcgggcataacggaaacggtaaccgtctctctgtttcatttgcaacaacaccatttttataaataaaaacacatttaaataaaaaattattaaaacctcaaaaaatctctgtttcttgtttatatatccaaacaaatgaatgtgttaaaccttcactcttctctccacacaaaattcaaaaacctcacatttcacttctctcttctcgcttcttctagatctcaccggtttatctagctccggtttgattcatctccggttatggggagagaatg

SEQ ID NO: 7175 - DNA, 3000 bp, Unknown; identical to SEQ ID NO: 7170
  misc_feature (1)..( 3000): cDNA_ID_1816909_gDNA_ID_1621130_Annot_ID_56447 3000 nt of promoter + ATG

SEQ ID NO: 7176 - DNA, 3000 bp, Unknown; identical to SEQ ID NO: 7168
  misc_feature (1)..( 3000): cDNA_ID_1816898_gDNA_ID_1621130_Annot_ID_56451 3000 nt of promoter + ATG

SEQ ID NO: 7177 - DNA, 3000 bp, Unknown; identical to SEQ ID NO: 7167
  misc_feature (1)..( 3000): cDNA_ID_1816890_gDNA_ID_1621130_Annot_ID_56453 3000 nt of promoter + ATG

SEQ ID NO: 7178 - DNA, 3000 bp, Unknown
  misc_feature (1)..( 3000): cDNA_ID_1816878_gDNA_ID_1621130_Annot_ID_56456 3000 nt of promoter + ATG
cgcgttttctgaaaatgcggttgcgttttccgatgaaatctgccgttttagcgtttgctatctttctggtgtttattccactgttttccgtcggtatacggatgattccgggaagactcaccgccgtatccgccaccgtcggaaatggctttgatctggggtcgttcgtggaagctccggagtacagaaacggcaaggagtgcgtgtctcaatcgttgaacagagaaaacttcgtgtcgtcttgcgacgcttcgttagttcatgtagctatgacgcttgactcggagtacttacgtggctcaatcgcagccgtacattcaatgctccgccacgcgtcgtgtccagaaaacgtcttcttccatctcatcgctgcagagtttgacccggcgagtccacgcgttctgagtcaactcgtccgatctactttcccgtcgctaaacttcaaagtctacattttccgggaagatacggtgatcaaccttatctcttcttcaatcagacaagctttagagaatccattgaactatgctcggaactacctcggagatattcttgatccatgcgtagacagagtcatttacctagactcggacatcatcgtcgtcgatgacataacaaagctttggaacacgagtttgacagggtcaagaatcatcggagctccggagtattgtcacgctaacttcacaaagtacttcacttcaggtttctggtccgacccggctttacccggtttcttctcgggtcgaaagccttgttatttcaacacgggtgtgatggtgatggatctagttagatggagagaaggaaactacagagaaaagcttgaaacttggatgcagatacagaagaagaagagaatctacgatttgggttctttgcctccgtttcttcttgtcttcgcagggaacgttgaagcaattgatcataggtggaaccaacatggtttaggaggagacaatgtacgaggaagttgtaggtctttgcataaaggaccagtgagtttgttgcattggagtggtaaaggtaagccatgggtgagacttgatgagaagagaccgtgtccgttggatcatttatgggaaccgtatgatttatatgagcataagattgaaagagctaaagatcagtctttgttcgggttctcttctttgtctgagttaacagaagattcaagctttttctgaagagtttgtgtaagtcaacaacattctttttacttgttattgtagttttgggttattacaaatacattgttgaggatttattttttgactgttggttgtgtaaaaattgacttgtgtgagagaagagtttgtagaagctattgatgaggactagttagaagaattctttgtttggaatttgtattttgttgtgttctttccctaaatggttatgttgatctcaattttctgtatttagagtcttttcaagaatatgcagcgagtgtgttgttagcatgaaataaaccccaagtttgttaaactatgtcattgtagattacatataagattacatcttagaatggttagaagttacttgctatggtaaagaaaagagttatttgaatctgtccgcaatgatgaagcagtgtgagataaatgaagaagaatggagacattaaaggcttggctcctcggaaacataagttttcaaactggacacacaattgtaagtatgtaactgttcacatatttaagtctgctccatagtcaaacttcaaagttcaaagaactcatcttcttttttttttgggtcaagacataaaataactcatcttaaacggcaagatttgggctgttagtgggctggattgggttgacctgttaagtaatacgatgtacgtattcctcgtttctaaatgctttttgaaaacgataatgaaaatgttaaatcacacattagaaatttgtgaaaaggatgtccgtacctgcattggtttaatgtttgtatatgacattcatatagtaaaagaatgtgaaagtaccttcgactttgattgttatcaatatcgactatttttaactatcaacattagtcagttaaactagttaataatcgcttttgtccccgcctaatagtttagttagtacaacactttcttacttaccatcttccgacaaaggtcccactgtctcttgtcttcattctcatccttgtatctgatctgatctcttcttcttctttttcttcctctctctctcactcaaatctgtaattgggatttttcgacccaaaattaacaactccttataagttttcttgataggtcctctttgtgtttttttcctcacaaagtttccaactttgaaatgtatttgtgaatcttcacttgttactactttttgtgtccatcattattttggaagtaacacaattgtgtgggctatcttcactttttcaggtaatcttacaagattgccactagattctcttttttgtttttctttttggaattgtaatgataacttttcttagtgtcaatcattgatgagtgtttggctctctctctttgcttattcaattattgaagctcactctcaattagttatatttttttaagaagaatctgagtttgctcaccaagaggttgaaaaatgctgaagttgaaagtgtctattaattactaaaccaagattatatgtgtttttcctctctttactacaattattctgctttacagtgaagctactattggatgctaaaaaattggtatagttttagctcaaatccaagttgattctggctttgttcaagtttgaaagtgataagaattttctttggttttgtgtggattaggattctttctggtgagcattaatggtggatatggaagttggtattgccagtggtgaagataaggtaatacccatttgtctactccaacgtcattttgatgtgtttgtgcctaattattgacattactgtcaatgtcctatgatctgttttgcatttgtgtggtttcttgatttgtcatagttagttaggtgttatatg

SEQ ID NO: 7179 - DNA, 3000 bp, Unknown
  misc_feature (1)..( 3000): cDNA_ID_1816870_gDNA_ID_1621130_Annot_ID_56459 3000 nt of promoter + ATG
atgctgcttccttgtaacggtgctgatgcaaagaagataacttgtttcatccatacgcttgttagtctgggagtctcttaccattttgaggaaaagattgttgagttcctgaaggacgctttcgagaatatcgaggacatgatcatcgattgcaaggaagatgatctctacacggtttctattatattccgggttttcagattatatggtcattacataactccaggtgaggatctttcatctttattacggaactaactgacttggttggtttatgctccgttccgttgtttttaagtggatgtgtgatgtgaacattttgaacatgtttcagagttgcatataactatttcatactacttttttttcttaatatttcatacttgcatgtgtgtagatatattcaacaggtttaaaggagacgatggaaattttaagaaatgtctgaatgatgatgtaagaggtatgctaagcttctatgaagcgtcacactttgggacaacgacagaagatatccttgaagaagcaatgagtttcacacaaaaacacttggagttatttttggtaggcgagaaagccaaacattatccacacatcaccaagctcatacaagctgctctttatatacctcagaatttcaatttggaaatattggtggcaagggaatatattgacttctacgaactagagactgatcacaatgaaatgttactaaagttggccaaactcaactttaggttcctccagctgcaatacattcaagatctgaaaacactaaccacgtatgtatattcatttatatagatgcttcatatatatgtatattttctgaaagttttatcgattaggtgtatgtatgcagatggtggaaggagctagatttagtatctaagataccagtttacttcagagagagattggcagagccttatttctgggcgactgggatttattacgagccacaatattcagctgcacgaatcatgctggccaaatccatcattttagtggacattgtggacaacacttttgatgtatatggtactattgatgaagttaagagcctcgttcaagccattgaaaggtacgaactatatacgatcatttgttaggtgctttgtaatcacactcatggtataaacgaaaaacgaaaaaagttacaaagtggaatgaatttaaaggattaaaaagtcatatttaaaggatataaaagctcaacatctaggtctctttatattgttggaatgttggtgttctatttaattataaatcattagatgtgatccctaataattgtatggatccaatattaagtaaaggtgggactccgacgccgtagatgtcctaccggactatctcaaagtcgtcttcagaacaacgtttgacttgtttaaagaactcgaagaatatgtgagctctgaagcaagatcttttactatgcaatacgcgtatgagcaggtactgtttcttcatctatttcttaaatctaagccaaattattgcatctataaaaatagttactatacaactaatgttttaaaatgtctccaaacaacaccattctcttatatgagtaaaacaataaggagagcatttggatgttggaaatgttcattttctacgtggtatttttttcctagatcatttagctccacaaattcagccaaaaaataaaatatatatctctatattaaacgaagaattgaaggttatatatagttcgtatttaatataatgttttgcagctaaggatactcatgaaaggatacctgcaagaagccgaatggtcaaatagagggcacctgccaagccatgaagaatacatagaggtcggggtagcttcgaccgcaggtgaagtgctgctagcaatgaccttcatccctatgggagatgctgcaggagtcggagtttatgaatggctgaggtcaagaccaaaactgacccatgctctttttgtgaaatctcgtctcagagatgatattgctacctataaggtaacagaagtcctatatatatatatatatatatatatatatatatatatatatgtatattttaaatgcaaattataaaaataaaatgctaataaatcttatcgtatagtatttcacgtcataaactactttttagttatttgattgataattttgacatgatcgaaatatatgatgaatttgcatcaggaggagatgaagagaggagatgtttgtaatgggatcaactgttatacgaagcaacacaaagtaagtgaggaagaagcgtgtattgagtttgagaaaaagactaatcacatgtctaaggtcatgaacgaagagttcttgaaggcagccaaatttataccgcttcatattctaaggcctgttttgaattacggacgcttagcagatgtgtgctataagtatggagatgggtacaccttcgctggagagaagatcaaagattatatcacctctttgtatgtcgatctcatcactctttaagagtcttcagagtttgggatcacgtgaatggccaagccaaatttgtatccgcagccgcaacccaaaaataagttgtttcagtttaagttgtctttgttttcttggttgttagtctgtcttgaaaaccatcttttaatcagtaataaagcttgtcattagactatcaaaactaacaataatccgaataacaatctatgaatacgtagttaacacttatagtagtgggatttggctttctctgcagatgtgcaattatctatttttttattagcaccgataagaaaaaaaaaatattaattttttctttgttattcgcttagttaataatattaaaacgggcattcttcgaaatatattgtgtacgtaagtgacatcaagcgggtcaataggaacttttcgtagaaaataatccgtttttacatcagacaaaaaaatattcatttatctgagaaaataataattaattgggtgtaatatccaaaagccaaaaaaaaatcaaatcttgaaatgccctgaaaac

SEQ ID NO: 7180 - DNA, 3000 bp, Unknown
  misc_feature (1)..( 3000): cDNA_ID_1816866_gDNA_ID_1621130_Annot_ID_56460 3000 nt of promoter + ATG
ttattttactttatttgtctaaatttcttttctaatacagttacaaacttttatatttttatcttaaatatttcaaaacttttagattttatacatggtgaaatctgatgatttaattgatatttgttgcaatcacgagagttagcaagtttgagattattgttttgaaataagatatggaggataaatttattttaaaaaagagagagaaaaatgaaaaaataagaaaatacttaattattgttttgaaatactttaattaattaaaaacaactatatctttaactaaattttaataacatatcatataattaagtataggttaaagttcattttcttaaaaattatctttccttaacaactatatctttattaaactgtctcatcttccttttgcactccaaaatagtttcctcgtttctcttcaatcaatcacttagaatggcagacgaagaactatctataggagtgcggatcttcgtttcttttctcatagcctttggtatttgtggtctggttttgttgatgataaaagacaattctggcaaaatcccggtgccgaaaatagagttagcttcaatggatttcacggtgcaaaatattacaatgactcgtcttaatgcaaaatgggatttgtcgataaggatccctgatgatcttcctggtaagtatatatgtcttcaaggagaccttgaagcttccttgctttacaagaatgtcactcttgctacctcatccccacaaaagtaatgaatctatttcctactattttttaaacccgttttaaattccttaattcgttcgtattttcaaaactaattgaatcttgtatatgatcagatactacaatctcaaatacttcaatcctcagcttcttaagatttcagctaatgtttccgaagtagatattggcggtttgattggaaaaaatattattaacgatgtcaaagagaggaaagaagtacacttcggatcgcgattttctctcacggattgtagagaaaaaacgacaggagttatgagttatgagtgtgacgaagccaccttgcggttcgagccaagctctgagatgaaggcgacaatgtttggggaccatccaaactgcatcaatgtttgaccaaagtccatgtcatcaccatgccagttcattgttatattttggcgtcaatgttaatttgactcggagagtggggaaacataaacgagagaagttgggtcgtgtaggtacataatgggccgacaataacaaacgctaaaactaaaatgtgtgaaaatgccaatatttgggcccaaaagataagaaaactggaaaggaagtaaaagtgtacgtaggattaattaaaaagatagtgtaaaacaaagggggcattcggagaattgaactccggacctctcgcaccctaagcgagaatcataccactagaccaaatgcccaatttgattgaagcttcactttgttgttagataaccatattctatgtcaccaaaaattatccacatctacatagtcatcttaagtttacctacctatcaaaattcaaaagagtattagcaaagtccgactgacaaactaaatttgaaccgacacgagagaaatgattttttcattggaattatttgattcttagaagttgaaaacttactttaaactagaaaaattacaaatcacaaaaccaccttaaagaaccaaacgacttaaatgatccataatcatatctacgatctaccaatatagcctatacatgaaataaaacagttcaataaataaataaaacaaaactggcaaaatgctttctagatcataaaaagcctcgaatttactaattgtagcacatgacattgatagttaaattctcctaacattcctattatacccacaccatcacccaaaaataacaaaatcaccgaactacacaaacccgaattgcaaggtcccaaaataaccaaaatccaatcctctagctctgctgcgccctaatcccccaattaacctcaccggctataaccggttactctacctataagcaacctagcaacggctgtctctaagttgtatttcatatttttttcaattctttattttccatcatcgatatatgtttctctaccgttttttatttatttattattcttattattattatttttatttttttatattaatcatttgactgttgtttcctctaccgtatttactacatttttaatattaataaacttttttttaatatgtttcataataataaataatatatggtgatggaaaaggtaaaaaataacagggaaaacttttttctggtaattaagtaaaaaatgggcttaatgaatagtaaaatagttattacaccaaatcatataatataaacaataaattaaattacaattaaggcagaagtaaaaaaaattaaaaaacctttgagaagtctcatcttctcatcttcaccataaatatgattttaacttatgtcttatttctttttagttctgtctgcaaagaatttggtttaaagtcttgtctttgtggtgtgtttccgtgtgcggtaaggaggaagcttgtgcttgtagacttgtgtctctgcaaaattcggtaactctctctacgatcatcttttacttttttcgaagcgttttttttttttgtgtttcttaattcttatcttgaagcgccgtaatgtgaattaatctgaagattaagttcttaagatcgattttttctgcttcattgtttcttaaactcttttctcgattttgctttgattgttctctacttgctagatctactgctttagtttgagattgcttgcagagttcaatattttatttggattgtttcttgatttaagattcaaaaggatttatttttattttcaatcgaattgcccaaattcaaagactttagtttggtgaattgagtttgcttggagatgcacagtgatctaatttgcggctaaattttttggtttctgtggttaatgaagctctggcaaaatataaaccatg

SEQ ID NO: 7181 - DNA, 3000 bp, Unknown; identical to SEQ ID NO: 7164
  misc_feature (1)..( 3000): cDNA_ID_1816858_gDNA_ID_1621130_Annot_ID_56463 3000 nt of promoter + ATG

SEQ ID NO: 7182 - DNA, 3000 bp, Unknown; identical to SEQ ID NO: 7163
  misc_feature (1)..( 3000): cDNA_ID_1807177_gDNA_ID_1621130_Annot_ID_56465 3000 nt of promoter + ATG

SEQ ID NO: 7183 - DNA, 3000 bp, Unknown
  misc_feature (1)..( 3000): cDNA_ID_1816850_gDNA_ID_1621130_Annot_ID_56466 3000 nt of promoter + ATG
aagtggtaaattcaaataataaccgtcgattatttctttctaaccgttattgaggttaccaattaaaaaaagtgatcacaaactaggtcaatgaaaagggagattttttgttttctttgggccaatgaaaatagaaactaagatggacaaaagaaaatattataattggacaaaacagagtcatttgagatttaaaacagagaagtaataaaggtcaaatgtttttgtggtgagctctcaaaaacagacataaaaaaaagaagcagaatcattcccatttataacaaacctaaacctctcttttcttcttctctttacctttttcattccaaaatctctctctctctctctctctttctctggctcgggaagaagatgtcacgtagttgctcacagtgtggaaacaacggccacaactctcgcacatgtccgacggacataactaccaccggtgacaacaacgacaaaggcggcggggagaaagccatcatgctttttggcgtccgcgtcacggaagcttcatcatcttgttttagaaaaagtgttagtatgaacaatctctctcaattcgatcaaactcctgatcccaacccaaccgatgacggtggttacgcttcagacgacgtcgttcacgcctccggtagaaaccgtgaacgcaaacgaggttaataaaataacctttcttctctctttcccaaatctcatctctgtttttgtttcttgtttttgaaactttcttgcaaatttggaatttaggaactccatggacagaggaagaacatagattgtttcttactggattgcataaagttggaaaaggtgattggagaggaatctctagaaactttgttaaaactcgaacacctactcaggtagcgagtcatgctcagaaatattttctccggcggactaatcagaatcgtcgtcgtcgtagatcaagcctcttcgatatcactcccgattcggtaacgtttcattctttaaaatctataattaaaatcaagaatctgtaagattatactaacacataaggttcgatatgtcaacagtttataggatcatcaaaagaagagaatcagttacagactccattggagctaatccgtccagttccgattcctattccgattccaccgtcgcggaagatggctgatttgaatcttaacaagaaaaaaactccagcgacaacggagatgtttccgctgtcgctgaatttgcagaggccgtcttcgtcgacatcgtcatcgtccaatgaacagaaggcacgtggctcacgtgcctcctcggggttcgaggcgatgtcgagtaatggagatagtataatgggagtggcttgatgaagaagataatgttttaattaatttatattgtataagataagatctggatgatgattaatttgaaatttgagaattaggctaattagatactttgatcagaatcaagtgagtttttaagtttgaattagtgtgtacatgtttttttgctctttttgggggaaacgacttgtcgtttttgttgttgtatgatgtaaaacaacaggtagtctctgtgttgttttggtcaagacttgatcagattcagaagtgaagacgacttcaagcttaagatagtttagatgtgtcttttgaaaagtttaaacagaatggttattgggttaaggttaagtgtatctcatatgctttttctatctttttttttggtaagacttttccagtaatttgccgttttcttcggggtgtgtgttgttgataatgtcacattcatgaaccaaacacagttatattactttagtaacagtttttttttgtttttttgtttgtcgtttgacgtcattttgttttatttatgttattacatacatggatataatttatgaaactgccaagaaaacaaagaatataatttgttgaattgttattggcctaccaactatatcagcaagattcgaatctatactttgttaaaatgtctcaatgtaggactggactggagataaatataaagtaatatatagggtaaagtttctaagtcttgtatagcatgatttttattagggaatagaattctaatttcatgatgtaattcaaacaactgaaatggaaaattgtttaaaactagctaaacttgtacagttgtactatttagagcccaaagtgataactgttttatggcttttatccatgcaaaagaaaaacatcaaaataaagtgatgtccatcacatacatcttaaataaagtaataatgggcctagctaaggtatagcccatgggcttattcgctgatctaaccaaagtgtcgctaattttcttccttgtttttttaacgcaaattttcttccatgtcaattatgtctttttaatcaaaaattcctccacaccaaaaaagaacgtaaaaactaaaaatagaacaaattcaactacactcagataatcgaattgctatgtccaatatccaaaacatttcaagccatttagtgctctcactaaacatattttaacaaaatatgaaataacattcccaaaattgcgatcaaaaggctagaaacatcttcaacaattatgacagtcctaaaccaacagttcaaacacgttttatatctgtttggccaaattaaacgaatataacataaaaatacgattgatcttagacaattactaaagtttctaaataataatctatactttcacaaaacaagaaatacaaattgattcttgcgcagaaagtgctttggtacctactttttttaccacctttccttttcaattgagacatcaacacattcactaaaacaaactctcaaactgctctaaacgacaccgtttagttacagataactttacttgtatttaaagtcaccaaaagtttgaatttttatttgtgccttccacaaagctttaagcttaaacacagtcaatggccgtccttccgccataaaaggacaaaaaaaaagcttccctcttttcacaaaaccctaaagaaacaaaaaaaaaaccatc

SEQ ID NO: 7184 - DNA, 3000 bp, Unknown; identical to SEQ ID NO: 7171
  misc_feature (1)..( 3000): cDNA_ID_1807746_gDNA_ID_1621130_Annot_ID_56469 3000 nt of promoter + ATG

SEQ ID NO: 7185 - DNA, 3000 bp, Unknown
  misc_feature (1)..( 3000): cDNA_ID_1816968_gDNA_ID_1621131_Annot_ID_56470 3000 nt of promoter + ATG
atccaaaggtgagcaatcaaccctactttagcaaatcccagtttattccttttttatcaattaattattatagccctctttaatcttctttgtggggattcaaaaatagaggaacatacatgttgtggccttgaatgggaactccaagcaatgagagttgcaacatattgcaagccgagtatgttagcaaagctacatatttgatcgaaactaccaaaatttcgaattcggcacaaaaatcttactctacttgaaggtaatctttcacaaaatttgttcatataatcattgttcttggttaaaatgttacacaatcttcttaatatgtcttcttttgtgtctttagtattgctgaaataacaaaattattctcacaagtaaaatacatcgttggaaattagtgtcaaggtatgtgtcttttttatttagacctttgagcatgaacgaactaattttttcacacatacagcttcatcgatttctttacaattatgactctacttcagtattggtaatcctctcactttttttattaatcaatctaagattctgtaacaattttaatttgtttgaaaagccacgaagtgatcaatatgttttgtttaaacacttccgtttcggattcatgtctagttttataaatctatgctcttgatgctagtcccaactaggaagatcgattggttctggagctgataccctggtttggaatgcaccatggatctctctctcatcatccgtaaccccaatgggtcctcctactcaagagacacaactcatgactgttaaggacttaatatgtcctatttccaagtcttggaatagagaaaagattgcaacttacctccctcaataccaatcagagatctttcagttcagaccaagtaggtttgttgctagggataaatttatctggcttcccacgaaatctggtgattatagcaccaaaacaggctactacgcagctaagactttgcggaatcttcatacacaagttccacctcaacctgtgacctcaattggaactcagagatatggaaaaagaaatgctccccgaaaattaagtttctcttattgaaagtattgaagaatgctttacccctaggtgccaacttgaaagctcgaggcatcaaccctacaactgcttgcccacattgtagtgcagaggaatcaggtcttcatctgtttttcctttgtctatttgctgcacagatctgggagcaagccccattcaaaaataccctttcgaccttcacttttaccaatcttcagatgggttttgaagcggctaaacatctgatttgcttaccactggtggaaattggctcaaaccctcttttcccctggattatttggacaatctggacctgcagaaacaagaaaatatttgagtagaaacatctatctagtcgggatgtcatatctcaagcaatttcggctgcaaaagaatggttattggctcagcctttacctcagggacaccagactctgctttcaagaccaattgtgccggaatttgaatcggatgcaatcttgtgtttcacagatgcagcgtggcgagaggattcacatgatgcgggattgggatggatttttgtagataactcaaatcactctgagatccaggatcacgcagtggcgagagaggtatcttcccctttaatggcgaaggcgatcgctctcttctctgccatccaacaggcgtcaaatcgaggattcaaaaaacttgttgtagcttctgactcgcagcagcttgtcgaagcaatcgtgggggagcttcatccaaaggagcttcaagggattctacatgacatcctttttatctctctcagtttcgctgatattagctttcattttgtcaagagagaaaacaatcgtaaggcagatgcagctgctaaagctgctttactcgcaatcaattctgtaccggtttaacatttaatgaaaaccagaattttcgacaaaaaaaaaaatgctcttgatgctctgttttctttacttatattctaaaataaacatttctaattattacatggtaaaaatgtgactacaaaacatcgaaggtacattgaaacatatattcacttgatgtttttcttctaccttgagaggattccaactctaagtacacttcaggacttagacaatcaccacatcaacaaattgtatacaagaattactctttcattgggaaataaaaacaaagcatgatatggtgggaaaaaaaactgtatataaagactttgcggaaaaactgtattgaagaagacttgaactctgcaaaagggagagatattatcgtattgtgcataaggaaccaaccgaattgtgtttataatgctaatttattaagaccattatggtcaaatataaacagtgtcgataacttaatatgtttcaatgctcatattaataaaaacataaaaaaaaaaacaatctcaaataacaattaactgtattgagtaaacaatataatttttaattaaagaaacactagtagtcaataatactctttcttcccacgtgttgaaatatccaaatattagttgttcatatagtaatattttttataaagaaaagacctaaaccaaaatcgaaatcaaaatcgtattgaagcaaaaattctgagtttactaaaaaaaaactccggtttattaaaaattctggtttagatttttttttttttctaattttgtcatgactttgtaagattttttttttttgcttaattgctttgttcctacgagcaataacccagtacccagcagcaaccacaacctcttcttcttcttcaatatctccctcaaataacagattccattaccgctgcataaatatctcttcagtaaagaaacatcattgattcaattcccagaaacatcaacctctcacctgtttccaatttgtcggcaacaacaacaaatttctattctgggttctgtgaatttcgtagggagagaaatagagatagagagagagagagcttctgggtatttttta

SEQ ID NO: 7186 - DNA, 3000 bp, Unknown
  misc_feature (1)..( 3000): cDNA_ID_1816966_gDNA_ID_1621131_Annot_ID_56471 3000 nt of promoter + ATG
acttatttttggatggtatgtatgtaagttaaatttctagaaacaaacttcttcatgccctcgtttcatgaaaccaaaggtgttatctcacgtcccgtctcctccccggttaggatatttcttttcttttcttttgttatattactatttacgcactcgtgccggtttaaagcaatcggtcaagacaataggacgacacataagttttcatttcgattaaaaaaaaaaaaacataaatccaaaagaaaaagagggtaacaaatgatggtttaaagcaatcgttcgcaagaagagaagttgaaaccgctcggtgccaaatgaatgtatggctccgtaactaagttctccacttcattagttctacaaaaggttatgtcatgcataacatttcatgaaaaaagaagaaagatattaggaaagtgtaaagctttgcttttagattttgtttacctcatcttgttgattatggcctttagattgttcacctgcaagacaaaagaaaaagtatataataaagcattcatttaatacaaagtactattataaagttttaaagagatgttgtgtctcgtgtattgtttaattacttacctccttcctctagatcagaggtccataaagtgaggttatctctgagaagttgcatgataagtgtgctgtccttgtatgaatcttcgttaagactgtcaagctcagcgattgcttcatcaaacgctcgctttgccaaatgacatgctctaagggattcaagaaattttcaaaacatgtttataacttggatgtagtttagcctgataggttacttgctcttaacggacaatacctttccggagaattcaagatctcgtagtagaagacagaaaagttgagagccaagccgagtcttattggatgtgttgtagacaattccgtgctagcagaactcgttgcagcctatatttaaacagaaatatcagctttctttcctagctattcagctaattgatcaagagaaaatatgacaaacatacttcatacgccttgagtgataggtccgcagcttcctcgcgatcagcaccggacttaaattcagccaagtatctgaaataatctcctttcctaacaacaacaaacaaaataatcaaaaaccaattcaagtgtgtgtcatatactttcttgttttgattttaagtttttaattcaagaatgagactaacattttgtagtagaagacggtggattctcccgaagttgcgaatgggacaagatgcttatcgatgacagccaaaatatcgtaacaaatcttggagagttcttcttcaacttttgtcctgtaatccttaatcctcttggcattttgttcgtttcctttcgattcttctttctgctcgatcgaagaaaggatcctccacgatgctctcctagcaccaatcacatttttgtaaccaacagataaaagattcctctcttcaatggtgagctctacatcaagagctgcaactttcttcattgcttcaaccatctctatttacaagaacaacacaataaagcatattactcatcaaatcaactccaaataaaacaaaagtaaattttttgaatttgacttatatcataaagtacaacaatcccatttttttagttaccaaactatgaggtatatcaagaaatttacattttaaacctttttcatcgcgtaaataataatcgaataatctccgattttacgcaaggaaacaaagaaaaactatatagagattccaataatccaaagtcgttcacaaactctttatttacttgatttctaagtaaccattttttacagtcaatacattttcagacaaaagtatgaaaggacagatctaacagagttttaagagattacttagaaatttcaaacataaaagaaacaagtacggtcttttgtttaccatcgtatctctcagcttgctcgttgagtttcgccaagtacacttgcttcgctctctcgttctccatagcttctcctttctctcttctctctcgaattgagacttttgttctgatcaaaaactgctgtcacgatataaaaagaattttggcggtttggtttaagacaggagaagcaaatcaacggctgagattaagtctctagatagtggagagcctcaaatagtgataacaacgaatctcaaccgttggatttagatgtttggtgtgccccatgcttctttgttttttcattggttataataataactaggggttcaatccggataaaccgatctgatctgaaccgaattattcaatccaaaaacggaaccacactttcaatgaattgtttttaatataattttcctttgtaccttatacaatgattttttttaaaaaaaaaatcacatatgtctgttaaaaaagttattaatgtttaattatgcatatattattttctacactaactaataacaattcataatatttaaatattttcacatatttttttttggaatttacaatttctaaaataataatgaatgcattaaaaaaatagaacatttatttttcgtggaacaaaaaaaccattaattgttgacaaaaaaaagtcattaatctccaaagaataaatggaatatatataaaaaaccgaacaaaatttaaaccaaactgaagaataatagtcagatcttaaatcaaaatttcgttgaaataaggatttaacaaaatcaaaatcaaaattcaaccaaattatctattttagtttgataccattatttatataaaccaaaaaatctataacacaaaaaccaaaccgaatctaaaccgaaatacggagtcgaataacacttgtacccactcttaaaaccgtctcaatgaaccagagactgtctcgtttctcccgccaattgataataccatgaaattagggtttacgaagcttttaatcgtctctccttcccaatttcttccaggtaaaaatctctctaaaacattgaaattcatcgattcatgtgtttaatttgacgcgaatttgatttcagaatg

SEQ ID NO: 7187 - DNA, 3000 bp, Unknown
  misc_feature (1)..( 3000): cDNA_ID_1816958_gDNA_ID_1621131_Annot_ID_56473 3000 nt of promoter + ATG
accagacatacttgcagcttctcactggaattcctgttcagtagctttcaaggcggcaaatggccagatcttccacatctccttaatcaccaagcccatctacatccaactctttccaggatacatgatcaaagcaaagtatataggtctgaactccctggaaaagatttcatacttggagttgatgtccttcatagccttaagaaagtatcttggaatccaaaaagacttaagcacaagaaccaactgctaccatggactaatgtctcccatctctaccccatggaatatgaaattctatcaaagacgagattatcaaggcttcttgtgctacttcacattcagagttcctcaccaaattttcatcacctttatgaaagaatccggactttttcatatcattacccttcaagaagaatgaggatgtcatccaacaaaagcaagccttccaggaatgaatccaaaccactataatcttgctctcgaagaagtcgaccaactccaaagagaagacctcattgagaagaccacctccccatgggcatgtgaaaccttctatgttaacaaaagagctgaacaagtacgaggaaaactgaggttagttatcaactaccatccgctcaaccatttccttgcagacaacaagtttcctctaccaaagcgagaatttctattccatctaaaaacctctcaaattaattacaaactctaacaatcgagaatgggaaaaatgtcaaaaaaagcacgaactttcaaatttgggaagaaaaaacataaactttcaaaatgccattaaaatcgtaaagttttgtttgacttttgattaaatagtcaagtttcgttgactttgccatttcgggcatctcgttaagtttccgttaacaaaaaaatcacagaattaacactccgttaccattttctgttaaaagtgaaacgacgtcgttttgaaattctaaataaaagaaaaaagtaaacccacaaggattcgaacctatggtcttttgcctttcaaagaatcattaaaccactgagccacgagaacatattaacaaaatgaaaaacacatatatatataagatataaatatacaattaattaaaaataaccaaacaaagatctatattaatgcatttaatttaaattattctttcttaaattatataaaaaaagaaacatatgaaatagagaaaatgaaatatattgcctaaataaatggtttcttatattgtttccatctaattatgaacatcacatttaattatttgaagatggaatgattatattttatgtttatcttatatatatatatatatatatatattacaagttaatttatcgaatagatatgtttttataattaaaaatatttataaaattaaattgaataaaattctatgtgcatgtataaattaatcctatatttatttgagaaggattgtataaattttagcctattttctaatttcataagtttcaatttttttcataaaataaaatgaagaaaaaataaattttcagataaaaattcaatgcatttagaagaaatctctatatgtaaaattaaaaatatgatatttcgaaatgtatatttatggtatgtatatttaatatttgtacatatttggttatttttaattaattgcatacgtatatgttatatagatccgtttgcaatctgtactagaataatatcgtggccccaatggttgagtgcatctgaggaaaacaatacgtatctggatcgacgtcgttattttattttagattttcgtggactcacaatcgttattttattttagattttcaaacgacgtcgtttcgtctgtaacagaacatattaaacggaaaattaacgctgtattttttttgttaacggaaacttaacgacatgtctaaaatggcgaagtcaacgaaactttactattttattaaaagtcaaacaaaactttacgattttagtggcatttttgaagttcatgttttgttcatcccaaatttgaaagtttatgtttttttgacatttttcccgttctatatttcacaagttatttttaattagttttgtgtatatatataaatatttcagtttacaataatatcaaaacgttatcgtagcatatttggttgagcgcttgtaataattctggagagtcatgagtttgattccttcttggcacatattgtgtaatatattttcattttgaaacgacatcgtttcgcttctaacggaaaatgttaacgaaaagttaactccgttgttttgttgttaacgaaaacttaacgacatgtccaaaatagcaaagtcaacgaaacttaattattttatcaaaagtcaaacgaaactttatgattttagtggcatttcgaaagttcacgtttttttatcccaaatttgaaagttcatgatttttttgagaatgctaattaatgatttcaagagttttctttaattgagaatgacgtcgtttagcaaatgaatggatacataacatgtctgattactctcttaaaccagttaacaatatttaaatcatattgaaaacaagaggacaaagccagagcgactctgcttttaagacacggcaaaaaagtcaaccaacgaacccaataacaaggaaagagatttgtttttcatttctaatggaaaaaaaacagcaaaaattgaagtctactcgtcgtagtagtcgtcgtcttccactaattccgtggtttttttatcgaagacttttgaataaagtacatttgcagagtctgtcaataaccctttcttcacggtattgctctcaagccgcgtactggtaggctccaaaattatcccttctttatggtttttggaacctgggttctccgattttgaggtaatccttatgtgggttctttctgatttcgtgttttgttttattaaaaggacttctatgtttttttgggggtttctgaaaagttcggtttttgcaggttgttgaaatctttgagtagatttttgtggaacatctgactctc

SEQ ID NO: 7188 - DNA, 3000 bp, Unknown
  misc_feature (1)..( 3000): cDNA_ID_1816954_gDNA_ID_1621131_Annot_ID_56474 3000 nt of promoter + ATG
gatcaattacaattttcttgggtagttttataccaataaacaagtctatacatgaccaataaacgccaatccaaagtacattgtccatttttctttgaccatttattcacttgtgtataaacaatcccatcagtaggacaatgtcagttacatagcttttataaaaaaaattaacgaagatcttatttgtattacactctcaatgaagaccattagttcacttggatacacccgtctatactaattatttgtaataggtagaagacagaaggatatgtcaattcccaaaaattactgatttttattcaatagaaattcaacaaatatacatcgattgtataacgtcataaactcacaaaagttactttgattttcatcatgtctcaacctctcgtttctttcttcatcttgactttgaattagaagtgattaatctcaggaaatcaaacaatcagaaacaatactttcaaatttacagatctgatgtggaataagattaagaactttctaattttgtagatcagagataccagagtcattaggagcagagaggcaccaaacaaaacgacgaataaggcataaagctccctccgccaccgctactaccaactacgccatcatgtcttgattagctttttaaaaacaatcatagcaaggagtcaaagcaaatatgtcggagattagaagataaagccctcgtttttgaactttgatttttcgtaaaagatttgattttggttttggaaatagaaaaataaaatcgatggagaagcgctgagaagatatgacaaagagaatgagtttgcagttaaaaagggtaaattggacaatttagtttgacaaagtgctttatcattttaaagtgtctaaatccgtacatagttttttaaaagtgtcctagaatgtaatattctttttatttattttgggtaaggatcatagaagaagaataagagaaattgagaattaaaaacataaatattaaattgagggtaaaaaagtctaagaaaaaaagaattagtagaaaaagtgtctattccctataaagtgcctcaaatggaaaaacattctctaaaagtgcctcatagtggaacattcccttcaataattagagggcaccattttttttttttcttctaaatattaaaaaaaaattagtaacacaaaaatgaaatttagaatggacctataatttttttaatgtattgttttttgtttttaactaaatctttaacaaaattatcatagaatggacctataatttggcctccttagaaaaattgaaagaaacattttaagaaaatgtagtgaagattgacaacatagttggccgagtttccggatctgcttgttaatacgataaagcaatttccaccatttttgtgagcttctctctattttttccctgtgaaactaatacacgttcatcggaaatgcttctcagtgacagagtttcttcgggagacgatgataaactcgaaaccaaatctctcggatgtttcccaattatcacttccaatatcaaaaccccgaagctatacaagataaataaactctgtttatcctcaaaacaaatagttgaaaaattattaataactaaaacatatttcgtatattttgaatacatcgacaaccaaattttctttttgaaatttatactaatattttgtatttattatattttaactttttctaaattttgaattctgttttaatttattaagaaaataacttttgttttaaatctggataaaactgtcattttcaatattaaaaataatgtttttattaaaaatggagaacaatatattttcaaatgaaaacttaaaatagggtagttttttttttcaagtttttttcatgtttttttttctaattcgttctaaaataccgaaaataacaagattgataatttttgtttcataaaagatttagatatttgaaaattagccgccgaacttttctctagtattacctttaatgtgagtggttggtttaattgcatatatagatatttaactttctcgaataacaaaaaaaaaaactcaaaatataagagaagaaaatgcaaaaatttagaaaaacataagcaaaaataaaaaaataaatataaacaaaatttgatctaattattttaataatgagtttttgagcgcactaattgttatttcatatattaacaatagatgttttgtattattgtggagatatagtatattgttggataaataaataacccagaaaaaatgtatgaaaaaaagctataataaacatgtggcaccaccgcaccgaaggtaaaccaaagccagattaatttgtctcgtctcgggttcctataacacaatgatatgataccatcgatcgtatcaagaagccttgaactattgagaccgttttgttaggaaactaggtctgcgaggaagaagaagaaattgaggtatgagggtagaacgaggaacatgacaaacagctataagaagaagtaacggagaagagtgagtcctaaggttaaatataagtgcatcacacaaaatgatgaaatttctaaatatttgtgtgttttgtataagtctttccttcattcttcatgttgtcactctaagtaatcaaaacaattattagtatgttatatgttatggtgccaaaacaaccctacagcagttggtttcggtttagttgatgcggttcagttttgaaaaagacaaaaaaaaaaaaactgaaacgaagaaaccgagaaaacgaaaaagagaataacggagagattgagagagaatcagaaagcgaaacgaaattcagtatccattgcttcaaaattcgacataacttcgaattgttgggtagttgaattgtgccactgaactcccacatccggtgaagtgaaagttactgtttttcccggcgaagccaagagaaagttactgtttttcccggcgaaaccaagagaaagttactgttttttccggcgaaatttgaacctccggcgagatagcatctttagct

SEQ ID NO: 7189 - DNA, 3000 bp, Unknown
  misc_feature (1)..( 3000): cDNA_ID_3049960_gDNA_ID_1621131_Annot_ID_172504 3000 nt of promoter + ATG
ggttcatctttatctctccctctccctcctctccaagtctacgatttccttagaaatctggaggttcgtcaccaggtaaagaatagatggtttcattaacagtataagtccatatttaaatgtcgtcctttttcacattaattaacaagaaacctaatgtttgtatatatgtacataagtgggacgttcactgccaaggaaatccagtgactgaggctgctcgttttgtcaccggacctgaccaaaagaacaacgtgacttttctccaggtaaatgtatatattactcctactaaaaccttatgattaaagtttaaattacacatttcttttgcttctttaagtttatcataactagcattacttcaaatagagatgttaaaaagttctaaaaatccatgcaacgggtcaagtttgttcagttttgctttatatttttgtggtcatgaatacgttagaatagattaaataggatcggcataaatcttgaataattaagaagtaattcacattacaaattcaatttccttggcataatggcattgctttaactatgactattgttatacattatgtagccgtcaagtgtaggggaatataagttgatgatactacaagatggcttcatagatgcattaggaggtatggtggtatacgctccaatgaatctaaacacagcatactccgccatttctggccaagtcgatccttccaccattccaattctcccttccggtttcatcatctctcgtgacagccatccttcctctagcgaggttgatggtggcagcatgacactcctcactttggcttttcagatctttgtcaccggtccgagttactatacagatcttaacctgaaagattctgccaccacagtcaataccttggttagctccgccgttcaaaggatcaaggccatgcttaactgcgaatgatggtcagtgagagtttgattaagttaccagttcgaaaatctaaactcttttggtgtttttttctttttttaaatcttgaaataagtgagaagagtattctccgtttgattctctaaggagagtcgtactttttcatgcttttcgttggttttaaactcattacaataaatttctaaggcaagggccttagttaaacaatatttatgttgttgcatgttggtatgttttttagtgatattgttgcttggacttataatttctaaaggcaagggccttacataagatgttatatattgctttaattctgtttttatttaatcataatttttatagtttcttgttttatttatataaagttagggaaaatcatattttaaaccttcaaactgacattgtgtatatatatttcactagcactatataaacctccaaattatatttactaacactctctccaaattaaattttttgtttgtacagctttaaaagatacagaacactatcgaaatactaacgaaagttacagaagagttaacatttgtcagttaaataaagaaagaaagtaaaagtgtttaaaaaaatcattatgacaacttaccataatcgttgtctaatgtttttaaaattcaatatcctcacatgaatttggggtttagagtttcttagtttgaagaagaaaaacataagtgatatgataactataagttgtttataataacaaaaagtaatttcgatgaagactgatgcaaacgcaagaatccacccaatgatcttatcaacggaagcaaaggtccgaagctttgatggttgatgaatgatgatagagatggtagatggagggtttgttgaatgaatccacaatcaacacacggttttaacaacttgaatccaaaagttattaagccagaaaatcacacaagagaagtgaatccacactcaacttgaaatgacaaaacataaagacaactctttataaaacaaacttaaagtttattgagataatttctaatatgattggtgaatacaaatgaaatcgaaagagagcttatatagaggttttagtacaacggctatatgccaaaaaaaggaaacaaatcgcaaacaataaaggaatagagccgttagaggcttgatggtgtgatcggccaaataaggcaagtggaaccttaatttgtatctagaaaacttggggaggaagatgcggtttcttggaagctttagcatcacttggaggctcttaaacatgcatacatgtagaaaagaaaagagccgttgaggtgtgctttcctgcgagtccaaaagaaaaaagaagtgagtcaacgggtcttgggtgaggtgaggtgtagcataactcgggtgggtaactttatggacggtttggagtatcttcttgattcccttagacacatcattaataagggtaatgtctctttccttatttggcaccgaataatcttgtatgaaaagtacttcagcaaatccttcggagagtccttcagcgaaaccttcagtaagtccttcagcgagtccatcacatcaaaggaaaatatgatgatgtagatgtcaaactgtcatacatgaattcaaaataaaacattctctcactacaagaaaacatatgatattccaaccgatacttccaataattgtattttgttgcaaatttctaatcgatatcctataaaattgcaacaaatattttatttattgaatatttattgcaaatttccaataaattttggttatggtaaatttgtcacaaacgtcgtaggacaattgttggaatttttcaacaaatatgatgttgttgcaaattagcaataattattaaattgttggaaattattaacaaaatcttttgttagaaactaaattttttgtgggaatttatttgtaacaagttaataacaaagtatttgttggaaaagaaaaggaaaaaaaaaaacggaaataatgaaaaaaaaccggaaaaccccaaaaaaaatttaggtaaaataagattcatcttcttctacttttcttcttctccttctctcttttttttgtaaaaactattttcaatg

SEQ ID NO: 7190 - DNA, 3000 bp, Unknown
  misc_feature (1)..( 3000): cDNA_ID_1816945_gDNA_ID_1621131_Annot_ID_172502 3000 nt of promoter + ATG
aaaatatttcgttattgcagttagctaagtaagaaatgaaacatgattcaaaaccaaaaagtatttattcaaagttatgtgacatacgatagaagtaaacaaacaaactaaattattcatgagaaattaaacagtatgtaagtgcttgatgtgtttataatagatggaagcattgcaggtttggagagtttgctgcaccaaccaaacacttcaagcttcagtttttcgatccatttatttatttcaatgcgttttataaaaccatcacaaacaaacacaaatactatgtacttaatacgggaattaaatcatgtacgtgtggcatgtgttgttcttggacatcaaatacttcttggctttttattgatcgactaccatcctatatatgtataatcgattttagaagaaacatatataacatgcaaacactatactgtaaattcaattaattaaaatttgaatgtagtaaaaacatatataagtagactatgaagtatgaaccacccccgaaaatcattttttttgttacaatcatagaaattaaaaggtcgacacctcgaaaaaaaaccccctgagatatccattttgaataattgaaaacgataatagtgtgattgtgtgaatggagatattcattttgtgtaccaaatacaaaaggcaggtggtatacattgttcattgttggtacgtagaaatgatggagtaagaagaagccatgcattagatgacaaaacgatgatcgtcgccttacgtgcatgggcaaggttcttttcgtccaaccacgtaatcctttgttttgggctttcacatctttgttgaccaaacttaccattattattggacttttttgtttattactactaaatttcccaataagttcactttgatctccccattaccaactcgatataatattccgtaaatacccatttttatttgtcaatttggtaatagttaaaaaaagtttcggattaattaatatacttcgagatttttaaactcttcaaaaaaagcaaacaaagaacaaacgtccatgaaaaataagtatatttagttcctgaaataatggttcataacaacaaagaaaagtatgagttgaatgtaattataaatgtataccttgaatcttgcaacttttaaacacatgtgctcgtcgtttatactctatttattcacccaaaaataatttagcattaaaagcgaagattcaaggtacattatatgagacatttgaagtctgctgaaaattatattagacatttgaagtagatatacttttgacgtcattatatttgccgcagcaaacgatggtgcagcgagtataaactcgtccacaacatcttcaacaatgtgtttaatttattggaagagaaaagttgcaaatcatgacaaatctacattatagtgaacgacgagcacatgtgtttaatatataatgcatgctcgtttaacttggtcatatttgtacaagatatattaaaatccattcagatctgaatgctggtctttaacaaacaaagaaaaggatataaatgcttaaatgatctgcattaccataaataaatatagcttatctaatccatctacaaagaagactattttatatagatttgatttaccaaacccccagaaacaacgcattacacaagggagacacttcatggattttgtcccccccattgatcatataaatctcagtaacattttccccttgatttagaatgtttgaacaatttttttctgacccgacataaaatttatattctatatctatataaaaaaaaccacgaacgatatagctacataaactgaaaaagaatacgtatatgtggtcattgaacatactgtatatagctcaaaaacaatgtgtctatatggaattagacttcagatatttctaaatcttttcctttaatttggcttatgaaaaacttacttatctatcattagaaagctttaaagcaagtatattcagcaagacacttgtgaaagattgtagtagccatgaaaatttgcaatcaaaatgtacatacttttgatagatcatagttagaccaattcgatccggagacctggaagatactctgatttgatttccaaattgtatttaaaacatagtttaaaaccaaagacaaacactagttttaagaaaaaaaaaactttatatataaaattatatataaacactcgtcatagatcagccacaaagattttgtaattcgtctcaaagttgcctccgaaaaataatcatatcagtaatacattttatttttctatttgatctaataagtaattgcaaattttatacatgattttatcaccaatttgctacagacggaaataatgtagatattatgtggttagtcaaatggacgatggaagtaaatgtggtatatatacacattatccatttcctcttttacgcatatatactaccagaaatttgaatatcgtagtttgattaaatattgcatttgaagtcacctagatcacacacatcctaggagatgcactattcatttcgaaacactcagagaaagttgtgtagtcagacagttgtcaaacttctatctggacttaaactagtgttatcaaaagtcccatgtataaatgcataaatgctgtaatgaaattcagcagaaattctgtaaagagataaaagatatgttttcttcacaaatgtatgagatatacgtcagttcatggtacgtattggcttcgtcgctagctagaagtagattttaccgtatcaaaagaaacggtgacatagattttgtctaagaaattagttaataaaaatacccaaaaaaaaaaaaaaacattagtcaaacatattacattaaagaaagccaagtgttagggacgaagaattatcactattatatataaagttatgatcaaacttccacgaaactgtatatatataaataccaagtcctaacctcaagctttggtagtcttacaagagagataataagacaacctaatcagagagagatg

SEQ ID NO: 7191 - DNA, 3000 bp, Unknown
  misc_feature (1)..( 3000): cDNA_ID_3049964_gDNA_ID_1621131_Annot_ID_172501 3000 nt of promoter + ATG
cacacacatcctaggagatgcactattcatttcgaaacactcagagaaagttgtgtagtcagacagttgtcaaacttctatctggacttaaactagtgttatcaaaagtcccatgtataaatgcataaatgctgtaatgaaattcagcagaaattctgtaaagagataaaagatatgttttcttcacaaatgtatgagatatacgtcagttcatggtacgtattggcttcgtcgctagctagaagtagattttaccgtatcaaaagaaacggtgacatagattttgtctaagaaattagttaataaaaatacccaaaaaaaaaaaaaaacattagtcaaacatattacattaaagaaagccaagtgttagggacgaagaattatcactattatatataaagttatgatcaaacttccacgaaactgtatatatataaataccaagtcctaacctcaagctttggtagtcttacaagagagataataagacaacctaatcagagagagatggggaggtcgccttgttgcgacgagaatggtctaaagaaagggccatggactcctgaagaagatcaaaagcttattgattacattcataaacatggtcatggaagctggagagctctccccaagctcgcaggttttttcctttccctagtctcttaactcaatccatgatcattttatataaacttgtatacgtatatatggattatttgaattgtatagttttgaaacttcttgtttttcttttcagatttgaataggtgtggaaagagttgtagactgaggtggacaaattatttgagaccagacatcaaaagaggaaagttttcagccgaagaagagcaaacaatcctccatctccactccattctcgggaataagtaagtgactaaacatatattcattttttttttgttataaaactttgaatgactaatactttttttttttatcatgtatagatggtcagctattgcgacgcatttgcaaggtcgtacagataatgagataaaaaacttttggaacacacatctaaagaagaaattgatccagatggggatcgatcctgtgactcatcagccaagaaccgacctcttcgcaagtttacctcagctcatagccttggcaaatctaaaagacctaatcgaacaaacatcacaattctcatccatgcaaggcgaagcagcccaactagccaatctacaatatctccaacgtatgtttaattcttcggcttcattaaccaacaacaacggcaacaattttagcccgagtagtattctcgatatcgatcagcaccatgccatgaacctcttaaactccatggtctcttggaacaaagatcaaaaccccgcttttgatccggttcttgaactcgaggctaacgatcaaaatcaagatttatttccactagggtttatcattgatcaacccacccaaccactccaacaacaaaaataccatttaaacaatagtcctagtgagctaccatcgcaaggtgacccacttcttgatcatgtccctttcagtctccaaacacctttgaatagtgaggatcactttatagataatttggtcaaacatccaactgatcatgagcatgaacatgatgacaatccatcttcatgggttctcccttctcttatagacaataaccctaaaactgtcacgtcttctcttccacacaacaatccggcggatgcaagtagcagctcaagctatggaggttgtgaagctgcgtcgttttattggcctgacatttgcttcgacgaaagcctcatgaacgttatatcttagttactcttggtttagtgttttttttttagatctctgttattttatacaagttttttatttggtgttggtgttttgtaagtagaaaaggtgcgaatgtgtgatccgtttatccctttatgtaattaaacaggagatctctgtgatccgttagtcttttgtttattttttatctttaccttgttttgtattgttgagatgttattgcattgttactaaagtttacagaactaaatcaccttgttagcttagattaagcatttgtgtgtattattaatgagttgattaattgcaaattgtggttcgacactaagtaattgagtaaaagtactccatttaaaaagagcgttttttggtgagattttggtattcaaaatttattggatttgtttgtatggaaataacttttaatgataactaacaaatatggttttgtcattaacttcaggatatatcgcaaaacattccagaagcattgattgataaaaattcgcgaatatcgtttggatcaaatatatgtgttaatcgggacctaaatcccatgacttacgaagatccgtgcgttttaccgaatgactatcgatttagatccgaccagtaacccatgatccgtgtgtcaattgacagcaattttttattttacccttccatgaaatcttttgattactctttaaatgcaaaaatcataatgacatcctatataatattcaaccttttataaggttatttattttttagtgattcccaattaatagtatagtttcattcgatatttcccctttagaagacaaataagcacattttaattacgttttagatgtactagtaccttaccccatccatctagaaatcttggttcaaaccttatattaccgggtaaaaaatgcctctctttgcaactagaagaatttttctattttaaaataatcaatatgaatccaagatttttcttgttcttatataattttcatgtgtatgaatactaatccatccattttttttctttctatgcaagcatttataatcggcttttttttttgtgcaaacatagttgtattcattcagacccaaaaaaaggggttaaagattacaagcccttccactttaaagtgggacataatgaacgtacagaggaacaagctgacatggaagctaaaccaaacaaaaaagtaaacaacaagctgtggcgatagagtcatg

SEQ ID NO: 7192 - DNA, 3000 bp, Unknown; identical to SEQ ID NO: 7188
  misc_feature (1)..( 3000): cDNA_ID_3049968_gDNA_ID_1621131_Annot_ID_172497 3000 nt of promoter + ATG

SEQ ID NO: 7193 - DNA, 3000 bp, Unknown; identical to SEQ ID NO: 7187
  misc_feature (1)..( 3000): cDNA_ID_1816958_gDNA_ID_1621131_Annot_ID_172493 3000 nt of promoter + ATG

SEQ ID NO: 7194 - DNA, 3000 bp, Unknown; identical to SEQ ID NO: 7186
  misc_feature (1)..( 3000): cDNA_ID_1816966_gDNA_ID_1621131_Annot_ID_172490 3000 nt of promoter + ATG

SEQ ID NO: 7195 - DNA, 3000 bp, Unknown; identical to SEQ ID NO: 7185
  misc_feature (1)..( 3000): cDNA_ID_1816968_gDNA_ID_1621131_Annot_ID_172489 3000 nt of promoter + ATG

SEQ ID NO: 7196 - DNA, 3000 bp, Unknown; identical to SEQ ID NO: 7190
  misc_feature (1)..( 3000): cDNA_ID_1816945_gDNA_ID_1621131_Annot_ID_56478 3000 nt of promoter + ATG

SEQ ID NO: 7197 - DNA, 3000 bp, Unknown
  misc_feature (1)..( 3000): cDNA_ID_3049960_gDNA_ID_1621131_Annot_ID_56479 3000 nt of promoter + ATG
caagtctacgatttccttagaaatctggaggttcgtcaccaggtaaagaatagatggtttcattaacagtataagtccatatttaaatgtcgtcctttttcacattaattaacaagaaacctaatgtttgtatatatgtacataagtgggacgttcactgccaaggaaatccagtgactgaggctgctcgttttgtcaccggacctgaccaaaagaacaacgtgacttttctccaggtaaatgtatatattactcctactaaaaccttatgattaaagtttaaattacacatttcttttgcttctttaagtttatcataactagcattacttcaaatagagatgttaaaaagttctaaaaatccatgcaacgggtcaagtttgttcagttttgctttatatttttgtggtcatgaatacgttagaatagattaaataggatcggcataaatcttgaataattaagaagtaattcacattacaaattcaatttccttggcataatggcattgctttaactatgactattgttatacattatgtagccgtcaagtgtaggggaatataagttgatgatactacaagatggcttcatagatgcattaggaggtatggtggtatacgctccaatgaatctaaacacagcatactccgccatttctggccaagtcgatccttccaccattccaattctcccttccggtttcatcatctctcgtgacagccatccttcctctagcgaggttgatggtggcagcatgacactcctcactttggcttttcagatctttgtcaccggtccgagttactatacagatcttaacctgaaagattctgccaccacagtcaataccttggttagctccgccgttcaaaggatcaaggccatgcttaactgcgaatgatggtcagtgagagtttgattaagttaccagttcgaaaatctaaactcttttggtgtttttttctttttttaaatcttgaaataagtgagaagagtattctccgtttgattctctaaggagagtcgtactttttcatgcttttcgttggttttaaactcattacaataaatttctaaggcaagggccttagttaaacaatatttatgttgttgcatgttggtatgttttttagtgatattgttgcttggacttataatttctaaaggcaagggccttacataagatgttatatattgctttaattctgtttttatttaatcataatttttatagtttcttgttttatttatataaagttagggaaaatcatattttaaaccttcaaactgacattgtgtatatatatttcactagcactatataaacctccaaattatatttactaacactctctccaaattaaattttttgtttgtacagctttaaaagatacagaacactatcgaaatactaacgaaagttacagaagagttaacatttgtcagttaaataaagaaagaaagtaaaagtgtttaaaaaaatcattatgacaacttaccataatcgttgtctaatgtttttaaaattcaatatcctcacatgaatttggggtttagagtttcttagtttgaagaagaaaaacataagtgatatgataactataagttgtttataataacaaaaagtaatttcgatgaagactgatgcaaacgcaagaatccacccaatgatcttatcaacggaagcaaaggtccgaagctttgatggttgatgaatgatgatagagatggtagatggagggtttgttgaatgaatccacaatcaacacacggttttaacaacttgaatccaaaagttattaagccagaaaatcacacaagagaagtgaatccacactcaacttgaaatgacaaaacataaagacaactctttataaaacaaacttaaagtttattgagataatttctaatatgattggtgaatacaaatgaaatcgaaagagagcttatatagaggttttagtacaacggctatatgccaaaaaaaggaaacaaatcgcaaacaataaaggaatagagccgttagaggcttgatggtgtgatcggccaaataaggcaagtggaaccttaatttgtatctagaaaacttggggaggaagatgcggtttcttggaagctttagcatcacttggaggctcttaaacatgcatacatgtagaaaagaaaagagccgttgaggtgtgctttcctgcgagtccaaaagaaaaaagaagtgagtcaacgggtcttgggtgaggtgaggtgtagcataactcgggtgggtaactttatggacggtttggagtatcttcttgattcccttagacacatcattaataagggtaatgtctctttccttatttggcaccgaataatcttgtatgaaaagtacttcagcaaatccttcggagagtccttcagcgaaaccttcagtaagtccttcagcgagtccatcacatcaaaggaaaatatgatgatgtagatgtcaaactgtcatacatgaattcaaaataaaacattctctcactacaagaaaacatatgatattccaaccgatacttccaataattgtattttgttgcaaatttctaatcgatatcctataaaattgcaacaaatattttatttattgaatatttattgcaaatttccaataaattttggttatggtaaatttgtcacaaacgtcgtaggacaattgttggaatttttcaacaaatatgatgttgttgcaaattagcaataattattaaattgttggaaattattaacaaaatcttttgttagaaactaaattttttgtgggaatttatttgtaacaagttaataacaaagtatttgttggaaaagaaaaggaaaaaaaaaaacggaaataatgaaaaaaaaccggaaaaccccaaaaaaaatttaggtaaaataagattcatcttcttctacttttcttcttctccttctctcttttttttgtaaaaactattttcaatgacaggaccaaaaaacaaaaatcgtgagtggatg

SEQ ID NO: 7198 - DNA, 3000 bp, Unknown
  misc_feature (1)..( 3000): cDNA_ID_1816933_gDNA_ID_1621131_Annot_ID_56481 3000 nt of promoter + ATG
agatgagacaaccaccatatcgccccttcatagatgttccatcaactacaatgaccttgcgcataaatgcgtaccctttaattgatgctgcgaatgcgatgaattgatatttgaaacggcgtggaccagtaggatcatcatcatactctgtaaagcatagactgcctgggtttgcttgttgaaggagtccagcgtaagctggaataagtgcatagctaccggccatagatcccaaagacttctccattgccacctctcgagcccgccaagctttccaatatgatatactaacatgatagtcgtcaagtaggaacttcctaatcactgcagcgtttggaccacgtttaataccaagaaagcgagattgcataagctcgcctatcacttgagtggttgctaaccggtggtatctacgcctttgatcaatcgtgcatgtgtgtctctgatttgcctgccgaacttgaaagctgtcagaagtatcaaccttagatgcatatacacgccatggacaggtcttggaaatgcatttcagaaccataaacttaggagtagaacgcgcagttctgaagtgaaacttgcggttgatggcgtgtatagctatcttaatcttgcagtcagacttcgacttaaagactctgccaacaaacagcttatctccttcgtatttaacgtcaaagaaagcagagtccacacctgaaataaaaggaacatctatcagcgacatggttgtagtctgtaatataaatagtacacgattaatataaatagaatagtataaggtgtgaactctattttcccaattactccataaccaaatttgttttgcaacaagcatcaaacaaaatctatatgtagatatggaatgcaagttataccttcaccttttccatcgttaaatactggtggggcgtcccgaccaaaaagaatagggtcatcactgaaatcggataggatagtgtttaaagcttcttgtgcccgcccccaaaaaagaatgttttgacgctgaaggtcagtttctgctacagcattaccaataggagaaacatgattgccatgaggcgtgcccacagctgcccgtgaggaatctgcgccttcgatgtcagcattttccggaatggtgatagctggtggattgggtggcagtgtgaatggaacaatgagcaagtcatcatcactgtctgttgaggtatctgtcaccgttgctctgcttggaccagccttccctttcttcccaattgggtccattattcctttccctttgtcagtagggagacagtcagggcttttaaggcggatgcattcttcaggctctctaatactgattcctcctgtagggaacagctctcgcctggtacgacggtgttgttctgtctctgttgtagcagcggttggctctagtgtaggccccaacacggcactatcaagtgcaaattggtgaagttcctcctctgagtcataatctgaatcgtcactgtcctctgaattgaagttcttgtccgtaacagcaaccggagaacttggaatagtgtgttggacgacagttacacatagattgacctcctctatatgccgccgcatttgaatgaacattgtaacatcactatcttcgctgatgtattgaggtggagaaccgttgccttcatctatcgccatccactctggaaattggtatgccattttaactgtgatgcctcttccacgcaagccaagtttatctttcaccttctgagatagctcttcatacgtcatgttagttctgagtcggatgaatgacgatccttcgacagtcttaggttcaaactgccaggctagattatccaccctgacccactcgccaatcaccaacaatacttcatcttgtcctgcggtctacatggattatggaaatagttcagtattatttagaaagaacataatgaaaattaaatgtaaatatcaatcaataataacagttttccaatttaatcgttcgtagcttttaattacggaataacaaatacagcgtgaatcacgatctaatttaagtaaatactaacaagttgtttagcagatctacaatctaggtaagtggtatattcgaacgtaaaagtgagaatttttaaatggaaactttacactaggcaattaaatcacgagagactaaaaacagaaacaagaaagcgatggttttgtacctttcccttttgattccctgtatttactgctgtactattttcaccaccatccatactgttctgttttgcaggttagatctctgcgtaaaaggtatagcatttactggcaataaatagaaaacagagcatcttctgctccgatatttttggggggaatattttattcaaattaatgtaaaaatctgcaggttatgttactgatgggacaattctcaagcggtgctaggataatttttttactggcttcgaaaggagacacgtcagctggtagaaagaagctcgctcttaccctcacgcgcgtacaagaaatcacagaaacgtggcttagggagtgggttgtaacttcacatacccgtagcgtcactctctcaattccttcgtttatggtgttagttacttaatatttttatggaatatggttattgagctaattcacccatttttttatctcttttaatattcgtattctttttgtaacgttccaaatttttaatattatcctgtctgttatcaagcccataaaataagcccatggccttccacaaacccatactacaaatcattacggttcccaaagcagaagaatcaaaagattcacaaaggaaaaaaaaaaaataaccgacacgtgtcagtcactccttgacaactggataattcttagtggccctgtaaatctaaaaatttcgctgtcttcgtcactctccctaacttcctttttctggttctctctttcttctttctattttattcaaaagccaattcccaatttcccaccaaagcatcactttggcgcaatccgaagattctcgccgccgccgtcgtcatg

SEQ ID NO: 7199 - DNA, 3000 bp, Unknown
  misc_feature (1)..( 3000): cDNA_ID_1816929_gDNA_ID_1621131_Annot_ID_56482 3000 nt of promoter + ATG
ttcagcccacctaatgttttcttctgaatcttcattgtccgaggcattgatctgatcggcctcggtaacctctgctcaaggaagagggagcttggttcgtttctttctgtttgattcgtttctcgatatcccaaaatcgctggctcggttcggtctcttccgatttccggtgcggttctgcggacgggccttgtagtattgccaggcgtgtggaacacgagccgtgtggggttgagatctgttgctgctcgtcgatcctgaagatgcctcgcgccgaaacgagtagtcctgatctgtccttggaaggtagctgcttcgagttgttgtgccaaggatcgatttgtctgttcttgatcgttcaccttctgttgaagttaagttgagccatcatacttcttagttccgctagggtcgcgggaacagcggcttcaggaacgtctgtctggattggagggattgggttcccctatgcatcaactgtgttaccggagatttgattgttgaccattgtgaattgggtggttggttctgtgttccgggagtaagagaaatctcgatcccccctccttctagcgccaaattgtgagagtcaaaactcgcacagtagagtttattttaagggtttcttcaaagaacgaatctttgtgagattctcaaagaacaacagaattctcaattactgcggacgatgttcttgattgtattaatgagaaagtaatgatttgatcgtacaaatgttctagaatatgaaaataagtgtttttgtcttcaaagtcagagcgtttttgatagcatgaagttgagagcgtttttgtgcgtgtccttttgtttgtccttcgaagtgctttttatagagctcgagaatatcgcctctcgcgatattctcggaagatttctctttatctttaagttgttgaaggagattgtccttatcttccgaagattctcggaatttctgtattcggtgatatctttgaagattgtctcttccgggttttcggaaatgatgtgtttgaacttataccggctaagttcttttttgaaggttttctcgtctaacccgaggttcttccgagccgaaatttagctggcctcgggtcgtgctcgggatgctcggaccgcggtattcgaggatacgttcccgaggcgttttggagcccgcctcgggacgaattgccagattttatgtccgaggcgtttcgaggtcgggtcgggggaccatttcacgagaatgctccgaagcattctcgatatcgcctcggtatggattcttgatgcgatctccgaggtgttttgtggcccgattcgggataactcttcgatgtctcccgaggcgttgaaacatggttggctcgcttacctgggtggaatccgaccccaacaatttgtgcatctcaacgtcttatattttttgttggtatttctattttgtcacattcacaaaaatttattttgtcataaatctaaactaataaaattacaatctctttatttatagataattttgtttgtttttattcgccaaaacaattataattttaaaaaatataaatatatcttttatagtagtttttatagagaaaaagaagttaattttttttacacatgtcgacatctaattaattgactgaaccatgaaattatttataatattgaaatttgttggattcttataatattgatcttagctggattctcatgagattaaacaattcaagtttttaatgataaaacatgtattatacatatttgttgaagaaatgttaactagcattccaaaaagaaaaagaaaaattgtgttggattcaatactattactttgcacaaaaaaaaaattaaaaaggattcaatactactaataataatttttttagggaaatttgcaaatatagccaacaaaaaaattataattgcaaaactaacacttcaaccaatatgtattgaactttatgcaatattgacaaacttaacccgtgcgtgagcacacgcgcttattcttcttcttctgagttttcaatcgataacttctatgtattactctgtaaaaattcaaatagaggtgaacattcagagaagttacagtaagaaaatctgaaaattctgggctttaaaaagcgacacccgggaaagtttcgaagagcagactgcgtgtgcaatccgagtgacgattctagagtttacgaagattgaatttgtgggtttcgatttggggactgtggaggcttcgatttctggcaatcggactgcataaatcttctgcaattggaggaggagcctatctaagcatccgagtttcgtacaacacttatgttggctcttttctcaatcgagggtttttgattccgttgagagtacttgagtgagttttgttgtacgggagtagaggtgtttatatctccgtcgtctccactgtaacactcgaatttctgtggcaattggtgtcggcgaagggattcagccaaattaaggtatgaaatgccattttttggcttttgggaaaatctttttaatttgtgttgaagagcttgaatagcataaactcggatttgagtagctttaggtagggaatctgcttggttaatacgatattcatttgtagttgttatgaaggtttaggatttaactctacttcaatgtaatccatttgtgtttgttgatagtaacggaagctactcaaattggttgtatgtgttaatgacatttttagttttatttgcagtattgaatagcataaactcggatttgagtagctttagttagtgaatctttgctggttaatccgatattccactaattggtgttatgaaggtttaatatttaactcaacttctatgtaatccatttgttgttgttgatagtaacggaaagctgaggctatattggttgagtctgttaataacatatatttacatctaagatttatatattttgtatttgtgtaagtagcagcatcaaaaaagtgatacgtggacatttgtatttcagtgtatctgttccatg

SEQ ID NO: 7200 - DNA, 3000 bp, Unknown
  misc_feature (1)..( 3000): cDNA_ID_1028612_gDNA_ID_1621133_Annot_ID_56484 3000 nt of promoter + ATG
tgctttttcagcaatttttaaaattggaaaaatgttcaatatatgtgccaaaaagactttaccactaaatgttcaactcaaagaccaatgtatataagttgaccgaaacgcgtcaaagaaaatcaatcaaggcaaaattaccgtaaaacaaataaaccagaccatgtattgcctattgccagggtagactggccggtcaggatttcgaaaactggtatagtaaacaattctggacggaggcgaaacattaacaaagaactaaaaagacttgtccttgacactcgattagaaaagaaaaaaacagtctatgcgacacgtcacagagcaaaacccctatgtgagacagacagatagaaagatatgtaaagccccagctgcaaaacctgtaaatggaagtaccaaaccattctctcttctcacttgaagcacttggcgtccaagagagcctcaccttcaaatggctctgcgtcttcaatcatctggctaacacgctccttctgggcttcatctgagatatcaaccttagtccactcatacagctccatgtcgtacacctcgtccattatgaactttgggatctctggtccacggaacagccataaacccttcaccttgaacggaccctctgacccacaaatcagcatctttccaaaggagtatttacgtgccaagtccatacgctgaaggaacccaccaaccttgttgagcgtgacaaatgacaccatgttctcatcgttgtacttgtagtcacagaaccatagtgagtatccctctgggtcatacatgtcccagaatcctgcatttgagccacaatattagacatgataaaaaacaattgattccaatagctaaataattccctgatagcaaagctgaaaaactaggtagaggaagatatcaccacacacctttaatagcaacctcgcggaagttagatttggtgtttgagtaaagcctcttccaatcatctagaaccatagggcttggtggtagcaagtcaagagggttcttggctttgggctttggtgcctcttcctcttcagcaagcttaggtgcctctgctactggggcttcctttttcttaggctcttctttgggctttgcaggctgggcagctttcttggaagcaataggagggacagcttcagtctgtttgacatcacccaacactttagtgaagtttggttggttaaccacagtccagaagtacctctcaacatgaggaaattcagaggtaaatttcttggtcatgacagtagcaaatcccaagttcaagttgcagacagtgatgatatcagcaagggtaatagagtgtccgacaaggtaagtgttagacgtgagatgtgtgttcagagcatcaagtgctctcttcaacgtagagatcgcaccttcttcagccttcatttatataacaatcacggatgagactatttatatagtgaaaagaatacctagattgccatcacaaagagtgaatgaaacaaccaatgaaagtcaaaaaagcttaccggagcactgtatggcataaagcccattcttgggccgaaccacctcaagatacttgcatagatctccaatgaagagaaatcaatccattgctcaatttgtgcctgcgaaaaaacaacatgcagataaccattgagaatactaacaaatagaatgacaaacaatagaagaggtgtcaatggattagagaagagtagcccccagggaaaaaacagctacttacatattcgatcagggaggatccgttcaaagagttgtcaccattcaatcggcttactgtattgagatatcaacagatccattaaacccaaacgacaacaagcaatcaaactagacactgagagacaattaaaggagaaagttatgaatgctttaccataacgggcaattgcgttgctttcaaatactgaaccctcgggagtctcaagtacaggaacctagcaagatcaataactcttggttagctgaaaaatagacttaataatactcagtccagaaatttagcaaacaccagtgatgacaaacctttccaatagggttcatcttgaggaacgcaggggttttgttagtgacacccatctgaaagtcagagggcacatcgatctgcacaccaacgtactctgctgcaatgagtgccttctcagcacttttgtttcccttgtacgtgtgcaagacctgcaatcgtaattcatcatcagcacaataatacgtattccaaatcaataacttaacaatagagtagctacatatccaaactaacataattttaatcaatttggtgtatgaacaatcgttctataaacttagatcctaaaatttacaaatctaacgtttctacaattatatcgatacatgatgcgatcgtaacagtagacaatcatagagaactcaccaaagccattgctcagacggaattcaagcgaacttggggcttctgatatcggatctggttccaaggaaaaaaaatcaagcagtgagctcgcaattgacatgatcataaatatgaatatgagctaactggagaaaaaaagattgttcgatcgatggatcttaccagatattctgaagaatcttccgtgagagcaaatcgagagagaagaagcaaaaagttgaggcggagaaaagctataaaggagtgttgaagggatgatgatgaagaagtagggtttttaaaatctgtattgagtgtattcctctggtttggctcggttttgtttggttttatttctgatttttgtttattttccggttaagctctaattactttcccttttattagcatgtataaatgaattacatatatgtaggcttttttagtaagcccaacttgacaagaaaaggtcttcgtcgttgggcaataacaagccgagaaggttgaatagagaagatccaaggggaaagagaaattaaattatttatttatttctgtcatcttctccttttctatttcaaaatcccaaatctaaagcactcctcgagaaaagtgtaacaatg

SEQ ID NO: 7201 - DNA, 3000 bp, Unknown
  misc_feature (1)..( 3000): cDNA_ID_3050073_gDNA_ID_1621133_Annot_ID_56485 3000 nt of promoter + ATG
tcctttcaatctttcatcaacaccacacaacatgtttagttagttatgataagataaagaaaccatacatagataacatctttcaaactctttagattctcaagagtctaacctttgttaaaaataagaaaactatatgataaaaacaagggatgcaaaacaaatatattgaaaattttcttcaaacgagattattatttggcttagcttgtgccttctcgttcgtcttgctcttaccatcttctttcactggatccttcttctccaaagttacagaagacgacgctttaccatcttcttctatctcaagaggtttcgagcaccacctatcgagcaaattgcataaaaccgtcaccattattattcctgcgacgataatacaccatccccagattgggatctccatcttttttatgtatttgttttcagtgacaaagaaacaaagtaaattgtttgttgatgattacaagttgcttaaaagttgttgatattataggaggcgggaactactcgaaagacttggaaatttaccattttgacaaaaaacttgctagaaaataactaaaataaaagtaaatcattcttctaatttttttcaatttatcaactttaaaagtatatttccttttcttcataaatctcataaactagcaaaaagataatgtcataaactaatactataaaatatatattttgttttttttgttccgtcaaatatatatttttggttttgcctgtattcttgttgacttccgttttttttttcccccttttttttaattaacttcctttctttgcttttccatttcttcttgattgaaaaatgtatattgtgtgattttgtctactttatttaaattatctttgaaatcgaagaatttctgctctattaaaaattcaaactatagtctacgttggtatttgtttatttcattttatactctgcttatttttctgatactacattacaactaccactcaaaactacaattaattccctaaaaatatttttcgtttccaaaatttgttttgtgtgaacgattccgaactccacaattgatataaaaaattatctttgagttatattatcaacaacagaaaaaagaaagaaaacaaatacaacgcaagccttgaaataaagtctcatagatatttggctttttttaagtgcaacacaaacaaagcctttcaagacgatgagcaacaaggcttcttagcgtttgattcagaagtagcagccacatcaattgtttggccttccttgatgttggcatttgcagttgtctggtctgaagatatcgacttcttgctgatgatcctataaacctccgagagaatcgtctgaaaagccttttctacgtttaatgcctcgagagccgatgtctcgatgaaagataagccttctttctctgcatagctctgagcatcctctgtggcaactgctctgagatgcttcagatctgtcttgttcccaatcaacatgatcactatattggaatctgcatggtctcttagttcttttaaccacctgcttacattctcaaacgttgttggcttggtgacatcatagaccaaaagagctccaagtgcacctctgtaataggcgctagttatggctctgtatcgttcttgcccagccgtgtcccatatctgagctttcacagtccttccttccaccttagaacaaagatcataggttttttaataggttaattcagatctaatgagcagcagactctatgattagtgtgtctgcaacaacaaaattagtaacttcgcagctaaattccacaaacaacccagtaagaaaactagaaactgtgaaacaacaaccatgattcatacttcaaaagaaaatcatgttcgagatcaatttcagatgaagagattcttagatctgccttaaacaaggttttagatctgacatgtgagggagccttacactaccacgtaccagagtatcgacaaatttgggaacattatcaataaaacgcttaaattaagagataccaaagcaaaaatctcgaccaaatgaaaaaaacaggcaccacacatgtaaacatcaaaattcaaaaccaagcccaaatgttcctacacacaatgactgcttccgagtattcatacgaacacagatacggatcgaatcgaaaagcaccggatgctgcttaacttagaactaaacctagatccagcaacatttcgattacactatatactatatatatagagagagatgtgtgcgtacttggagagtacgagtagcgaattcgacaccaatggtggatttggattctaagcagaactcgttgcgagtgaatctagagaggagattagacttgccgacaccggagtctccgatcaaaaccactttaaacaagtagtcgtattcttcgtccggtcttctcgccattgttacacttttctcgaggagtgctttagatttgggattttgaaatagaaaaggagaagatgacagaaataaataaataatttaatttctctttccccttggatcttctctattcaaccttctcggcttgttattgcccaacgacgaagaccttttcttgtcaagttgggcttactaaaaaagcctacatatatgtaattcatttatacatgctaataaaagggaaagtaattagagcttaaccggaaaataaacaaaaatcagaaataaaaccaaacaaaaccgagccaaaccagaggaatacactcaatacagattttaaaaaccctacttcttcatcatcatcccttcaacactcctttatagcttttctccgcctcaactttttgcttcttctctctcgatttgctctcacggaagattcttcagaatatctggtaagatccatcgatcgaacaatctttttttctccagttagctcatattcatatttatgatcatgtcaattgcgagctcactgcttgattttttttccttggaaccagatccgatatcagaagccccaagttcgcttgaattccgtctgagca

SEQ ID NO: 7202 - DNA, 3000 bp, Unknown
  misc_feature (1)..( 3000): cDNA_ID_1028131_gDNA_ID_1621133_Annot_ID_56487 3000 nt of promoter + ATG
gcatagaaagaagggaaccctaggataaagaattaaaaaggggaacaaagatttatgctgtttcttctttatttctcattggcaaaacggcagaatcttcattaagttgcgttttattattttttccatttcttatagtagccaacttccaactacaccatttaacccggccgtttttttttgttgctaagtaataggtaaatatcctattaatgaaaattatgatttacatgaacaatagctaagatttaggatacaaacaaggaagacgatcaaggatcttgaagatagaagtaggcgcaaatgtgttgtgaattatgcagcatcttatttctttgcttccaagttgtatataaatcacggcttgagtaactagcttccttagtgtatatgtgactgcatctatcatatacagtatgtgtgtaaactgcgtttggtgtaaaatgtaattataatttatagaaaataaattaaagtagtggaacatggaaatcaccgttcagatattctaactgattcactatagacggaattcttgttttcgtccattgtttttactttttagaatttttaagtaaaataaatcatccattacatcactgaggtgacatcatcgctcaggggacatcactaactacgttcccactaaaaatataggcaaatgcaatcaagtgaatgatgatgacctttcaagagttcgtagagataaataaaataataaatatttggcatgttgaggatcaaatgaattagatgcataagaaaggtactaggtagaccaggcccggcccaatgtgttttgttgtctaaagcaaaacaaaaaaaattaagcccattaaagaatagttatattgcctcggaagggctcgaatccatcatcttcatttttttagtttacacggattggaagtaggctacaatgtccctgagggaaggtaggcccattattagtgacctgaagcccaataataatgaaaacgcaaagaaccttttaagaagaagatgacagaatctctagagaataaaaaactaaacacaaaaatagaaaatatcgaaaatgagatgagagagagaggaggagtctctcatcgtgagtagggcttttgactccctccctactttgcctacttcttcttcttcctctgtggccactctacacagtccacacctacttcaagacacctttctcatccttgagatcggcgtcagatcctccgccgcttctcctcttcactatctccggtcacaacttgtttttctctgtttttctttatctctactttatgcacaatctgactttctaagtggatttacagtgttaaagatgatggaatctggcgctggtttcgtggccatggaagagaggatctctcctggaagtttcttccagtatcctctttctggattccgtgcttctcctaatcgatccccttgtcctccctctgatcgtgaaaggtttctattttctctcttctttctcaacctttttgctatttgtgaatctgtgttagcttgattgttgtggacccgtttcttcttctggacttgttgctttagcacaacttcaagtgtgtctctttgtgattggtgggtattgttgcctttgattggatcagtgtttaaaaatgattctgtcaagtttgtattttcatgaactgcttacacagatccaaattctcgatcatactctctcacctcaacatgtcgcctttttcacaattagctcacttattattggattctatacaatgtactcttaaggattttaacaagatagctatattttatcaatgttttagaaatgaacgtactgatgtatttttagaagcttagtttacatgtgactgagtgctgattccaatgtcacccactcgattcacacgcaacatccactgaaacttaagttttttttgttcttaaccttgtgcaggtacttgactgaattattgcaagagagacaaaagttgggtccctttttgcaagttatgccaaattgctgcagactgcttaatcatggtgagctatcttattaagctatgtgattttgaatttagtatttccttagagtgtgtgcacacgaacttaagaaatttcccacgtgaacaaagccttagtgcgcatcaccctggcttttttccagttaaaggtttacagaaattgggtaaggatagttgagtaacaaaaatgtatctacatgcaactttttattctctttgttatggccttcttaatatatatatagccaatcaaagtctatgttacttttagcatttagaaacagtttttaattgcaacttattgctaaatgatcatccttgatgagttatgttatgtgaaaatgaattaagtctatgtgtttgcaaatgataatgatcgttaagcaaatgatcaccaactaatttatactaggaagcctatttgtccgtaaatatgcatatggtgattagaagcttgtttccagacttgtttacctagcttttagttgtccatcatgcccttaagggatgtgtgaaccttaaaagacaaagatgtgtttgaagttttcatcattctaacctattagaacccgagccttttgtttcattattggcattaaagataagagactgaagatgcccctgatgtataactcttacagtttcttttatacgtttgcttaactgccaacattgctgacgtctgtgcagaaatcaggagggtctctagttttcctgatcttgatagatatgagcatggcagtccatttagatcgcttggtcagccgacaaatggaaagcttgatttagagggatggtcgatgatgcaagccgaggtaagccactgctgatagttgtagtcaattaactgattcatgttgaattgtaatggtgatactaataatttttataatcaagagtgggctttaccgatattgattgcttttgctttcttcaggaaaactgtcacctccagagagcttctccatttcgcggtccttccccagtgggctggattgggatg

SEQ ID NO: 7203 - DNA, 3000 bp, Unknown
  misc_feature (1)..( 3000): cDNA_ID_3013398_gDNA_ID_1621133_Annot_ID_56490 3000 nt of promoter + ATG
tttatggaaaatttgaccaaaaaggtaaatttatggaatataatataatttataaaggtttgaaattaaattcaatattaacatttgtaacataacaattaagaaccaccttctttcgtttgcccttgtgaaaaaaaaacaaaaataaaaatcagtaaagaggaggaagtcgaggggagagggtttttggtgaagaagaatcatctctctctctctgcttcttcgcagcagcagcacgtttctttcttgctcttcgccgtgccctactaacctattattcgtctcttcagctacattctgctcgtgaaaatgacctccactgatgtttcctctggtgaattacttcttcttcttcttcttcttcttcaccatcatgtctgcattatctctaattcaacattcatgggttgttttttccgggttttaattttgaaaccagatcatgctttttcccctttcttctgttctttactcacttctttcttcttggaaattggattgcagtgttttgattagttagaatttacaagtgtatctgtcccttgtgggtttaagcgtagatctctctggcaattggcaagtttactcttttgagatgatgatttattgactcaatttgttagggaacatagaagcttggtttaaaactgtctctccccttttggataagtatagtttctttgtgaaagtcgtcagctttattcagaactcgttcactgctgttccctgttgtcgttttgagtttatttgcaatttatgctgtagtggatagcatcatcactgtttctgttttatcttttgcctcattttgaagtttttttcctgctcaggtgtttccaattgctatgttttcaaaagtcggttgcaggagtatgctcagaagtacaagctcccaacgcctgtttatgagatcgttaaagaaggcccttcacacaaatctttatttcaatcgactgtgatactggatggtgtcagatataattctttgcctggattcttcaatcgtaaggctgcagagcaatcagctgccgaggttgctctccgggaattagcaaaatccagtgagctaagccaatgtgtttcacaacctgttgtaagcacctcatctttcttatttcgctcgtgattattgttaagttcactgcaaaactattgaacctagcctaggggtttagcagcgaattgtagctttgccatctcagcagtagtccttatgcttagtttgagcgttgaaggtttaaagggaagctcatggttagtttcagagttgaaggtttaaaggggagctgtgagaatacgttagggggcattctgtatttgtctaggctcttggttggacaatgatcgagattcaagagtttaaagaatccactcattaataaagtgtcttctgtcttatcggatttatgtgtattgccaacttctagagggaagattcttaggctgtttctgtaagttattgctcttgtctaactttgaatggcttattaatgcagcacgaaacgggattatgcaagaacctacttcaagaatacgctcaaaagatgaattacgcgattccattgtatcagtgccagaaggtcgaaactcttgggagagttacacaattcacatgtactgtagagattggaggcataaagtacacaggagctgcaacaagaactaaaaaagatgctgagattagcgctgggagaactgctcttttagcgatccagtcagacactaaaaacaaccttgccaactacaacactcagcttactgtacttccttgtgagaagaagacaatacaggcagctatcccgcttaaagaaaccgtcaagactcttaaagccaggaaggctcagttcaagaagaaagctcagaaaggaaaacgcacagtagctaaaaatcctgaagatattatcatccctcctcaacctactgatcattgtcaaaacgatcagtcagagaaaattgagacaacgccaaatctggaaccttcttcatgcatgaacgggttaaaggaggcagcatttgggagtgtggagacagagaaaattgagacaacgccaaatctggaacctccttcatgcatgaacgggttaaaggaggcagcatttgggagtgtggagacagagaaaattgagacaacgccaaatctggaacctccttcatgcatgaacgggttaaaggaggcagcatttgggagtgtggagacagagaaaattgagacaacgccaaatctggaaccttcttcatgcatgaacgggttaaaggaggcagcatttgggagtgtggagacagagaaaattgagacaacgccaaatctggaacctccttcatgcatgaacgggttaaaggaggcagcatttgggagtgtggagacagagaaaattgagacaacgccaaatctggaatcttcttcatgcatgagcgggttaaaggaggcagcatttgggagtgtggagacagaagcaagccacgcataacagtgtcaagatggagtcttgtgagtttgtcatagttactatatggttacgtagccattttgtgattcctatctagtctagtagtaattcacagattgaagagaagtaatatttgagcggaaaatcaaaactaatatgattggtacaatttggtggtcgattgagtcattcgaataaagtaatgtggggttgcaaaacagaagcttcatatctacatataaatgaaaattactctcaaacttcattatttgtgggccggttataaaaacacaaacccaacagaaggtccattaccctcactcttcattatttgtgggctggttctaaaaaacaaaagtccaatagaaggttcattaccctcactcttgattatttgtgggctggttctaaaaaacagaagcccaacttgctgacccaacaggtccgtttacgaaaccctaatctcaaaacagagatataaatacactctgccttcctcatttcatttcttcggcgatctagggttttagttgtcgcacgaggaggaaaaatg

SEQ ID NO: 7204 - DNA, 3000 bp, Unknown
  misc_feature (1)..( 3000): cDNA_ID_1817060_gDNA_ID_1621133_Annot_ID_56491 3000 nt of promoter + ATG
aatactagaattagcagggaaggatcttctgctacttgtacctattgcaagcttatttgaagggggccgatttcccagagctaaagataatgcatggttaactgctagtttcgcttcagttccttgtaggccacattggctaacagaggtcgaagtgtgacacctttttcttataagcgcccacctctacaaagaaaatagtcagttgttaccaccaataacggaaaaagagtaagcaattgcaaaatgtcccatgctcgtccaagtagctaaagtattgttaagttttatcagatggaaagtatatgcgtaaaaaatacaaagatggatacaaatatcataaaacttagtcttattagtcttattagctaccttctatgattgccaaaagactattactcatatcatccaaagaatctgttgccgggattcgaacccggaaaaatggggaaaaaccccacgtccataccagactagatgacaacagatatatttctagagtaattaccaaagtggtacttcgtctgtaaagagccaccacctccaacaacacgaaagagggaaggtaatatccaccattcatcgtcaacagaatatagataatgatgcataaacaggttgtaatacaaagaacaagactataagatacactacaaaatgacttcaaagaaactaatgaaaaaagagcagtcaatattgaataagagaaatcacaacctgcgagagttgggaggcggttctctctcctctaaagtctcccttaacaatatgagcccagttcccttcaccacatcgctttacagcggcgaacagctcctcatcctcctcagcagaccatcttttccttttcctccgaaaagccatgctaataccagctgaaccatttccattcatcccctcggtagatgtaactttctgaagacagaccggaaagttgatattcatccctcttgacgaccaaggagactctgatggttcctgagaaccctcaggcaaagcataaggtatgtttatagtcaagggagcctcaactgttgaatcgtcgagtatatcagactcacttagaacatatgaagcagccatcacctgggaatacaagagaaacgaaaacttaatgatatttggataaaatgggaactctggataagcacagattgatatgcagaacaagtaaccaacacactaatcattaagaaaacagcaaggtgttatcctgaatagagcctagggacttcagattctgaaattctgtcaagggaatgaaatctatgattccgttcttactttgacatgtgcaatagcctccactgatgcttcatggctgactgcaggagaagcttccaattcgcactccatgtcactatcgtcgtcctgcacaggcaactttcgtttaaaaaatctgtaaactacaccagcgagagacactcatcgatccctaatgctaccaagaagttttagtatccactgccacatagaacataaactagtatttcatcacactcacttctagatgatactgataacacaaagtagtagtgagtttttattgaagaaaactaactaactctacaacataaacttgagtcttttacaattcatcaaaagtggaaagaggagagacagaataagtaccagaggtagagcatcatcttccacagggaggagaggatgccgataagaaagatgacgccatagcaactggtactctctagcattagtaattccggtagtggtcttcttcaccaacgcattccagtccatcttggtttcggaacaataagatatctcctgtagcattctcagtatcgtctccatatcatatctgcgtcaataaatcaaaaaccccggccacactgactaaacccaaatccactaacgttttcggaaagagaaaacaaaaaaaggagatatttttacctcagcaaaagagtggcgatgtcgccttcagtaatgattctcttcctgcgattgctactagtattattattagcaaccatcttcgtcgtatttattgcaacaattctgcagagaacaggacaaaggaatcaaatttcaccaaaacccgagggagttatagacgaaacgaaacgacagagacttacgcacgagggaatgcccaagaaaaccggtgaagacgatcggagaagaagatggtcacgactgtcgaagagcgtggagagtactcgcgtggcagaggtgtttcggaagagagaagaaaaaaaaggaacgaaaaggaaggtggtaaattcgactattattattctacgcttatcagaagcgaaaagtatgggctcaaatatttttcttttctggtaaagggatataggatcaagtgggctcaaatatgggctcaaatatttttcttttctgttaagggacataggctcaagtgggctcaaatatgggctcaaattgtttttattttttattaaacggttattatcattattgatgtttacttggagaacaaattaattatttgtgaatacaaaaactgtgtgaatataacaaagggattactagtgaataaagttagccataaaaaggttaatcaattgtggatatatacattagttaactacatatgaaatacgaaattaggctatatgtaattagttttttaattaaattaaatatttcaaagataaaaacattttgctttcatataatattcacaagtaaattatatttatggaaaatttgaccaaaaaggtaaatttatggaatataatataatttataaaggtttgaaattaaattcaatattaacatttgtaacataacaattaagaaccaccttctttcgtttgcccttgtgaaaaaaaaacaaaaataaaaatcagtaaagaggaggaagtcgaggggagagggtttttggtgaagaagaatcatctctctctctctgcttcttcgcagcagcagcacgtttctttcttgctcttcgccgtgccctactaacctattattcgtctcttcagctacattctgctcgtgaaaatg

SEQ ID NO: 7205 - DNA, 3000 bp, Unknown
  misc_feature (1)..( 3000): cDNA_ID_1817056_gDNA_ID_1621133_Annot_ID_56492 3000 nt of promoter + ATG
cagatttggcgttgtctcaattttctctgtctccacactcccaaatgctgcctcctttaacccgttcatgcatgaagaaggttccagatttggcgttgtctcaattttctctgtctccacactcccaaatgctgcctcctttaacccgttcatgcatgaaggaggttccagatttggcgttgtctcaattttctctgtctccacactcccaaatgctgcctcctttaacccgttcatgcatgaaggaggttccagatttggcgttgtctcaattttctctgtctccacactcccaaatgctgcctcctttaacccgttcatgcatgaagaaggttccagatttggcgttgtctcaattttctctgactgatcgttttgacaatgatcagtaggttgaggagggatgataatatcttcaggatttttagctactgtgcgttttcctttctgagctttcttcttgaactgagccttcctggctttaagagtcttgacggtttctttaagcgggatagctgcctgtattgtcttcttctcacaaggaagtacagtaagctgagtgttgtagttggcaaggttgtttttagtgtctgactggatcgctaaaagagcagttctcccagcgctaatctcagcatcttttttagttcttgttgcagctcctgtgtactttatgcctccaatctctacagtacatgtgaattgtgtaactctcccaagagtttcgaccttctggcactgatacaatggaatcgcgtaattcatcttttgagcgtattcttgaagtaggttcttgcataatcccgtttcgtgctgcattaataagccattcaaagttagacaagagcaataacttacagaaacagcctaagaatcttccctctagaagttggcaatacacataaatccgataagacagaagacactttattaatgagtggattctttaaactcttgaatctcgatcattgtccaaccaagagcctagacaaatacagaatgccccctaacgtattctcacagctcccctttaaaccttcaactctgaaactaaccatgagcttccctttaaaccttcaacgctcaaactaagcataaggactactgctgagatggcaaagctacaattcgctgctaaacccctaggctaggttcaatagttttgcagtgaacttaacaataatcacgagcgaaataagaaagatgaggtgcttacaacaggttgtgaaacacattggcttagctcactggattttgctaattcccggagagcaacctcggcagctgattgctctgcagccttacgattgaagaatccaggcaaagaattatatctgacaccatccagtatcacagtcgattgaaataaagatttgtgtgaagggccttctttaacgatctcataaacaggcgttgggagcttgtacttctgagcatactcctgcaaccgacttttgaaaacatagcaattggaaacacctgagcaggaaaaaaacttcaaaatgaggcaaaagataaaacagaaacagtgatgatgctatccactacagcataaattgcaaataaactcaaaacgacaacagggaacagcagtgaacgagttctgaataaagctgacgactttcacaaagaaactatacttatccaaaaggggagagacagttttaaaccaagcttctatgttccctaacaaattgagtcaataaatcatcatctcaaaagagtaaacttgccaattgccagagagatctacgcttaaacccacaagggacagatacacttgtaaattctaactaatcaaaacactgcaatccaatttccaagaagaaagaagtgagtaaagaacagaagaaaggggaaaaagcatgatctggtttcaaaattaaaacccggaaaaaacaacccatgaatgttgaattagagataatgcagacatgatggtgaagaagaagaagaagaagaagaagtaattcaccagaggaaacatcagtggaggtcattttcacgagcagaatgtagctgaagagacgaataataggttagtagggcacggcgaagagcaagaaagaaacgtgctgctgctgcgaagaagcagagagagagagatgattcttcttcaccaaaaaccctctcccctcgacttcctcctctttactgatttttatttttgtttttttttcacaagggcaaacgaaagaaggtggttcttaattgttatgttacaaatgttaatattgaatttaatttcaaacctttataaattatattatattccataaatttacctttttggtcaaattttccataaatataatttacttgtgaatattatatgaaagcaaaatgtttttatctttgaaatatttaatttaattaaaaaactaattacatatagcctaatttcgtatttcatatgtagttaactaatgtatatatccacaattgattaacctttttatggctaactttattcactagtaatccctttgttatattcacacagtttttgtattcacaaataattaatttgttctccaagtaaacatcaataatgataataaccgtttaataaaaaataaaaacaatttgagcccatatttgagcccacttgagcctatgtcccttaacagaaaagaaaaatatttgagcccatatttgagcccacttgatcctatatccctttaccagaaaagaaaaatatttgagcccatacttttcgcttctgataagcgtagaataataatagtcgaatttaccaccttccttttcgttccttttttttcttctctcttccgaaacacctctgccacgcgagtactctccacgctcttcgacagtcgtgaccatcttcttctccgatcgtcttcaccggttttcttgggcattccctcgtgcgtaagtctctgtcgtttcgtttcgtctataactccctcgggttttggtgaaatttgattcctttgtcctgttctctgcagaattgttgcaataaatacgacgaag

SEQ ID NO: 7206 - DNA, 3000 bp, Unknown
  misc_feature (1)..( 3000): cDNA_ID_1817049_gDNA_ID_1621133_Annot_ID_56494 3000 nt of promoter + ATG
aggatttggtccagttttccctcaagaagtcaaaattatttccattcatatgcagattgcttttcacttaatgctttgtctattttttaagctttaaaggcttacagtcgaatttccttattaagtttatattctcatagtgttctaaccaaatgaatcatactcataatgtagttcacaatttcccagatatcagacatccagcaaagaatatttttccttataagagcatgcaaatacatcttctaaatgaaaatgggcagaaaaaaaagtaatttttagttagcacttcataataatataagcttactcgaggtcagtattccacacagccgggtatttcacatgcagcgagtttatcttttgttgcttattaggccaattatgttcttttaccgcaatctttaactcctccatgtctggaaaccacatgaagcaatataaaaagttagaagagggaacctctatgttggaaagagtagatgcttaaaaagacagactcttcgttttgcagaaatgaaattcaataagacatctctctcttaaaactcttagccatcattaaacatgaacatacatgaagcggcaattagaaagacactatctgttcggcaaacaagcgaaatcgctaatatagatccatttaaagaattgcatgtaaagaagaattaaatatatctcactaggatatcagttcactttatattctcctttctatttaccatttttctactaaattaaaccaaaatcgaatgaaagcatgttctcgtagaatcaatagataacaaccgacaatgaaaaaaccacagtatcaggtgtctaagatgactaaccaaaaatcgtaatggtacttacaactaacaagtccgctttttacaggaagaattttatgataacctaaatggcaggtatacataccttcatggcaattttcatccttcagtagaactcgaattctgagaatgatcaatccaacctacaaaattgaccagcaaatattgtcagagtgatagaacctatgcccataaagtatccttcaaaataaaaaagtcgacataatgaataactcacattttggtaccaattgtattgaatactaactatgtcttcaactccaaattcacaagaaaatggcacttcttcattatttgcgaggaaactctttattttgatgccattgcatgaaaagattactagggatgcagcacaatgcatatccttaagtataacatactccgaagtcattataacagcggtgcttaagtcaatctgcgaagtggaaaactggaaatcattatctttttgcaaaaaagaatcattaatatcttttggcaaccacatcgttgccaaacaaattctggcagtagttttttaagccattggttaagaaactagaaaactcgttaccttttcctcatcgttgaagcaatgttcagtcatccaatctttcagcgcatataacattgaaatcaagacacggtcagacataggagatccaagcatatctataaggaaatatagagagaaggtgtagcatgtaccttcttcatcatcttctgaatcagaagcttcactcaacgcagatcgatcactcaagctttcatcaatagctgacatcatatcaatttgctcctcctgcaaatgtgaaggggttaaaaatgcaaggtaaaacttataaagtctttagcatacattaaaaacaagatagattaacatacactggatgaagaatctgaaaagggtgagtttagctggcgttgactataagatgaagtttcagcgtaaaaactatttccgcctagctggcaagagaaactctccactctatgatccacatctgtttcttctatgtcgtcttcgctattcaaaccaaacatcaatccatggttatcgtgatctatatctgtttcctttgccaggtcttcagtttttaaacctaacatcaatccctgattaacgtgctctgcatctgtttcttctaaatggtcagtggtttccaaaccaaatgtgagaatcgttctggactccttagcttctgttaccaaagtcgaatcatcttcacattgatgatcgtcagactctacagcagtagcaggctctgcacaacttggaccttccatttcttcttcctcaacacgtttttcattgcagactggcaacaattaaccatttccataagaactcactcatatatgataaaaattatttgcttctgaacaatatagtacaaatcattatagtgcctcccataaaattgtagtatcacaacagcattagtatcattatttctcacatactgcagaaacaaagcaatgttcattcaactatatacaagagtctggaaaactaaaataaacagaagaattccaaggttagcttaacttctctccgtttacaaatatctcaaccccaaaattatttttccacaactgaaactgaagcgagaatttaaatcagcatttgaagtttagagatgaatcagagtaataacttacagctttggatgcgttggcgttgcagaaccggagaattgcaaggactagggtttgtgaatttttccaataactttccagctgcagactcagcgagctcgtcctcttctttgaaatcgaatacttcaaagtttttcttcatcgctagggaaatctgaggaaaagccccaccggaaaacggagaatccaagccggagatcggcgatcagaaatcgagggggtcgagtgagggagaaggagagagagaaacgtctaaacgaaataagtcaacaacgaatgccagcgcgtctgaaactcacgcgcggacgtaagtttactctatttataatagtacgtaaataatttaatattttcattacataattcggctatggaatgacaggtatacccttttgtaagccgcgaatttaaaaatgggagacgtgaaagccatcgtcctcttgaactttccaagagttgaagaaaatcacagaaagccttagcacagagaagagagattgaagaagtc

SEQ ID NO: 7207 - DNA, 3000 bp, Unknown
  misc_feature (1)..( 3000): cDNA_ID_1010209_gDNA_ID_1621133_Annot_ID_56495 3000 nt of promoter + ATG
tttccaagagttgaagaaaatcacagaaagccttagcacagagaagagagattgaagaagtcatggatgtttcaggaagcttgaattgcgttgttgtggcggtagatggaagcgaggtgagtatggaagctctgaggtgggctctagacaacctcaagctctcttcgtcttcttccgattcatcattcgtcgtgctccacgtccagccgtcgccttctgtagccgccggcgtgagtcccggcaccatacctttcggtggtcccagttgagtctcgttactactaattttgtgattgtttaatgtatatatgatctcgaccatgtggtgtttgactctgggaattttgcgattaaggtggtcttgaggttcctgctttcactgctgcaatcgagcaacaccagaagcggatcaccgacaccatcctcgaacacgctagtcaaatttgtgctgaaaaatctgtgagtagagttatttcccttgtgtcccctgtgagaatgggatattttacctcatagtccagatctagtagtgtaattctataagttttatggattagaatatttctctttcactgatggattagaatctggagcaattacttatgtgttatctatagaagtgtatattgatttgagggtggtcattcatgaccaagttgtgatggtttactctcaggtgaatgtgaaaacacaagtggttattggggatcccaagtataaaatctgcgaagctgtagagaatttgcatgctgatcttcttgtcatgggctcccgggcttatggccgcattaagaggtaccaaactcttcttccagtactctagtatcttgctatgttgaacactgatgaaagcgctgtaaatcaaattccaggcgtttgatcttggttactatgctgaattagttgttccatatcggtttactctagtttaagattgtttcgctttcgcttgaaatggcatatagatatctactgttatttttttcaactcgtgcggtcaaataacagaagaaatgtttagttaatctttgaacttgtgtgaagacaaatctctgctcaaccaccaagtagtgcttcgaggaatctttatccctttgaaaatgtttataccatatcactgtcactgtgtgttctttagtgagttaaatcttatttagtgagcaaatgccagtgttgaatccagtttgttctttctttcaacagaatgtttctgggaagtgtaagcaactactgcaccaaccacgcccattgtcctgttgtgataatcaaaccaaaagaggattcttctgcataaagaggtaaacaagtttagcttcttgcaagtcacttcattcgatgttcaccatgcaaaagtttgttaagtcatcaatcagaacccacatgatctacttttcatatccaaaccaacctcaataaagtttactactctcttttggtacaagtagcctatgtaaccgagtatcaaaccatcttcacttctcaggatatatatgtacatatgcaaagggatatcaagaccatctgtaatcttttgaagttttgtgaagctatagaagccaagcaagaattctaccagattacttcccaaataagtggtgtgaatgtaaattaataagagctacagaaacattgattggctcagtgtatgtgttgtattcatattcgttgttttattttatacggttgagaattgaataatgttgttgcatcaaatcactatgaaggacatttacagagccaactggttgacaatgtgggctaactcaccctcgttgatatgttaattggaccgcaggcatggataagtagttgagagaaacaaagaattcgtgtaagaaaaatctgaaccgatcaatcaagcctcgcctaaaggtccaagattttcttgggacttttggcctgcccttagtgatcatttttccatattatgggccaaaaaaaaaaaattgcaatatctgctacacttaaatctttgaaacaaaacttatccaaattgcttggaatttagttggatgtagatgtaaatgtatattctactgtagcgacaaaaggtaaaagaaagattatgacaattttcaggatataaatattatgacaattgtagatgtaagtatttcagaggtctcgtgaacgaacaatgagagtaaatgacgaaagaggcatcgtcggtttgtcactgtcaacacgataagggaggctcacgagtcacggacttaaaaatattaaacactgttctttttcattagagcaccaagatttttatcttagcattgtaccaagataagtgttaaaatttaacatcaagaccctacaaaatttaaattgcgaatcttgagaaacaagacgtattatgaaatgtatagttcacttgtcccaacccaaaaataaaagaaagaagaaaccaaataacagactgttatagtttgtcctggttttggcagcacaattatttggttttgttttttttaatcactatccaaatcacacttcacttcacatgcaatattcctttaagctcttgaccgattcactggctacttcacaccacactccatgtcccctcgtgacttctctcaactctcaaaacttacctcagcataggaaatgtattcaagattttactatcccccctcaatcgaaataacaacatttattcaaaacaaaacaaaaattatcagcaagctaattaggtgttaaaactataatgaaatcagcggatatagtgaaccaagtcagaccatttttgagaaaattacgaaagaaaaatattataccattttatctcacacacatgcgaagaagatgtgtagacaatagaaaaaaaaagtttacggagtagtagtactattgccagatagaccggaccggatcccaccaattataaatcgaattcgagggacattttcgcattttcaatacctcgctggccatatataaaggccacatcacactcgaagaacattatctaaatatctctacacaatcacattagccaaaacc

SEQ ID NO: 7208 - DNA, 3000 bp, Unknown
  misc_feature (1)..( 3000): cDNA_ID_1807189_gDNA_ID_1621133_Annot_ID_56496 3000 nt of promoter + ATG
ctcacattctccatctcctcctgaaaagctgcaactttgtccgcgttcccagcaacacttgagagctcgtaagcgcttcgagtggggaaatacatgagatcattcacgcatgtgttgtgagcttctacaaaatcatcaagtgtcttgttctcatgtcccattgacacacacagaaacttcccctcctcctttatcattttgtcagcctaccaaaaatcataagcaacaaccttcattcaaaactccctagtgtataccaaattaattacagatgttgataattaaggagggattaacattcatgcaaaaattatcaatcaaacaatctagcctaaaccaagagagaactaaggattccagaagctggccaacgaattaatcaaccaaaaaacaaaacaaaagtaaactgaaattggatagatattttcatctacatacctcttggagctcattttcatcaaaatcgtcaattgcaagaacttgagaagcagaacggttggtacggttcttggctcctttcttcttctcagctttgtcatcaagcggatactttgcattatcatgctccagcaactgtagaagctcctctcttaccattttatctgcaacctcaatcggagtaggaggaacaacagaacttttgtctccatcagctgaaagcaacgagttcctaattactgccaatgaagcagctgggggtctaggaagatctctctgcaagaccttggatctcttcttaagcaatgcctgttgtcttgcttcttcctccgccttttccctcgctatcctgtctgacatgtcttcctcaattttctcttctggctcttcactttcctcaggaggaggttgtgcaactatttggtactcgttctttggctgaggaagcccagtcaaaccagagcgtaaactccttctagcttcctctcgtctctgcctctcaagttttgcactttcgtgcatgtccatgtcttcgttaatgtgaagttcatccctgaagggagtccctttgggtgtcatagaaaaagaagacccatcccttgatggcgtcaagccaattcttggagtaagaccagcaccaccaggagtcattgaaggggtcaacattggattaggcgtttgaatctccttctttctcggagtgaccccagtgaagtcagaagggtgcaactcaggattttctcctcctagcaaaggtgtctgagagtctcttaatctggccaggttttctgcttccatcataatagcatcacctttaccagcaggagttctttgaggtgtcctcatgggtgtcattccttgccttggtgtttgtgagtaatttgccaaaagtgcacgagtagcagcactgccttctgttagctcctcattctcggcaagaaggtcactggcatagcccatcttagcaatttcttctagctcgtggtctgaaatctgcggtggtggtaacatcagctttgacctcttcctaacaacttccggatcattcagcttgtttgcttgcaatatagctgctggagcatcctgtctctgagcaattttattccttgcaacatcttgtttgcgtaaatgtgcttctacatcagctcttctttttccttcaagttcttcaatggtagttggaaattttacttgatcagcaggacgatcttcatccgcagtatcataaaatcccgcaggtgccctcttttcaaaaggaatttctgcattatagtcgattccctttctctttcttttcctatgccttccatcaatcccagctgcttttagttctcttcttttttgcagagaagcaagccttctagcttcctcaagttgtttttctctagcttttcttttagccttctttcccctcgtgttagccaatctagctcttgcttcagaaagcatttctttctcatcttcgtccatgtctaccggatcaggacgagcaggctttgcttctgggttcggatcaatctcaccaggacgtaattttcgtggatcatccgctgcatcataattttcatccttagtgcatgctgcatcaaggagcttctcatacctctcaagacattgagatggtgtacgacccacaataggagcaatagttctccattgagtaggcagaagtttagcaagatgtagaagcttctcatcttcttctctggtccattcagtctacattaacatcacaaaattaaactcagttgtaattcaaaaacataagaaaaccttcgaatactccaaaactcctagcattactgcctacactttctatgaatttccagatgcaaatcaatacatatatacaactaaagcacctagtaacaagctaacaaactacctaaaaggccaaatccccaaacaaaaaaatgttcgccagatccatagttttttttcgaacactactagttaagagaaggaaaacgcgaacacgacttacctttttgatagatggatcgagccactcgtaccagcgagctttacactgtttagcagacttacgaacgagaagagacgagatccgagcccattggttcttaccatacttcatcacggcggctttgagaatctcatcttcggtgttcttccaaacacctcccttaatcataatcctcatcttcgctcaactgtttttgatccaaccgcactccaattcaaggtctctgaagctaatgctcgtggaactcggtaagaacgaagaacagaaggaagcgagagagagagtaaccctagattagggttggaaccaacgaagaagaaaagattcaatcgttcactagtccttttctttttatttgttttttctttttaatttccaaaatcataaatatcgggatacacttatgggcctaaccgactgggccaattcaatgggccgtttatttaagtgataaattaatagcaaaggtcattttgctgcgtttttatgtcatctctagccactgttgttgtctctttcctctgaatgcttagcagcgacagagctcgacgaagcagtaaaaccctagtagaataatg

SEQ ID NO: 7209 - DNA, 3000 bp, Unknown
  misc_feature (1)..( 3000): cDNA_ID_1817045_gDNA_ID_1621133_Annot_ID_56497 3000 nt of promoter + ATG
tttacgttcttcgtacgttttgatttgaagaggtgcttaatggcgcttgaccttctacatatactttgtatgaacggctatcttcactacgcataacatggcctgcagtttcatctcttgcttcagcgatgtgatttcttttctaaattagtttctcggtaattgatgatattgagtgacaagatacaaaatactaagaagaaattctaatgcgaaaagagcataagcaaattctgtgtgcaccctcgctctccatgccaatgcagagacttaaaaagactacaatcctctttggcattctttttaagggttcaaaacagatgcctcgagcagtaaatagtttacaggttccaactgttgcgcatgagttcctaaggaagtgacagaaaccgtacaggattgccagagaaaacaattgctgtgagcattctggagcagtagctacaacgattggaggggcaacagtcacgctttctattcctgtaaagacaatatgcaagagatttgtcggtcacactgaatttagctatccagatttcttgaacaaggagcaaaattaaaaagataagcaaatacctccatgggagcagagtcatttgtggccggatcaggaattatcaggccagcaggaacctgtccaaacttcaaagcctatatatccacaagccaaaaaaaaagaagactgtcaaaatcaatcaaaaacaacatcatcaggcacaaatttgatattcaaaagaaaaagcaagggacctgttcgagtctggcaatttcttctatcgtctgagaattgataattgcagcctggaacatcatggaaatgaaatacagaaattactatcaaccacacagcgttgacctacttattataaagacaacaaaacagtgaatatgtttggtcctatataatttccagtttcgcaccttgatagctaatatttgctccgctgttggcgccaccactttcggagtctctggattttctgcagtttctgacacttttttaacctcctcccgagaaacctttttaacttcctcttctgcttctttggatgaaaacaaagatgcagcttcagctctctcctgttaggaaccaataatgtcaggtaaaaggtcttgctataaccattgtaaaatttagatatacaacagtgggctaaaggataaagccaaactattatccgatccaaggctacaaggttataacacgaggaaattaaataaaaacaccacaccctacatcaagtctggtttatatttatgccctaaatacaaaaaactttaagataatcaggcaaccaagtcatcaagacccaaactatatatactttaagcaaacccttttagctaaatgttgttaatattagtgaaatttcttatttcagcatacagatataactgtgcacaagaatcttaaacaacgtaagacaaaaggcagaccaatttcttgctctcagatattctatttttcagatgatattaaggttagctcccggtgacttgtagcatataaaataacattaagttggcatctagggtaagcaaaaatgaacagttgataaagcatatgataaggtccttaccttggctttgattttaatgaaatccagtactcgaagtgattttagcttgtgaatcacataaaggcgataatttgcctttttggtgatattattatccaacaaactaaggtactgcagcttgggaatggaggcaaggggatcaatctcaaccaaattcacaagcctgttatttgtaagaaccaaagagtgaagcttcggtaggaattctgcagatgtacaaccatacgataaatacaacacaggtaaccaacaaagcaaacaatgtgtttgaattgacatttcttacaacacacagatagatgttacctccaaggttaggatttatccgggtgatacgattgttattgatgagtaaagttcctaaacggttgaggtatgggaagttttctagcttaactatctcgttatcagacagatcaatggtatcgaactggtcctgtaagcaaaccaagacaagttaattagagaacctcaaacctgcaaataatctacctaagccaaacacaaaatttatgggaggcctttcttagagaagactggctctcaaaagtaaagaatccacagtaagaaaaaggtactattacacgaagccacatatactcctaaagagctagaaaacagatactaactaagacaaaggagcaatagctacttcaacaatgtttctgtcaatgattttcaaaatacttgaatgccgaaacccaacaggcagacttaagaacatacaatacaaccgcatcaacaaattcttcagctaacagacaaagaggaaacgaaaatcgatagaaaaaagaaatacctcagtagcacccaagttttcgattacaggaatcttgttacctgcaacaaattaacccagaaaaacgaacgattaaccagagcaggtgcgtttagggttacaaaaccctagaaaatgtaatgggaaagagaagaagtgtacctcgtagatccaattctcgctccttgatagcattgaagaagtgaggacttttccagatcaaatcagccgtgagcttcaccattattctactagggttttactgcttcgtcgagctctgtcgctgctaagcattcagaggaaagagacaacaacagtggctagagatgacataaaaacgcagcaaaatgacctttgctattaatttatcacttaaataaacggcccattgaattggcccagtcggttaggcccataagtgtatcccgatatttatgattttggaaattaaaaagaaaaaacaaataaaaagaaaaggactagtgaacgattgaatcttttcttcttcgttggttccaaccctaatctagggttactctctctctcgcttccttctgttcttcgttcttaccgagttccacgagcattagcttcagagaccttgaattggagtgcggttggatcaaaaacagttgagcgaag

SEQ ID NO: 7210 - DNA, 3000 bp, Unknown
  misc_feature (1)..( 3000): cDNA_ID_1817041_gDNA_ID_1621133_Annot_ID_56498 3000 nt of promoter + ATG
tgctaaatcttttgctcgtcgttactgtcattctctgttcaatcttatcacccacacgtaagtcttttagactctttttgttattcttatcacaaaacgaatctttgaaaattgttttgtagggtttatgattatgattgataaaatggttgcagatggatacgatcctcttgatccgttcggaaaaatcattatcaaatgggatcttcttttatcatcacctggccaacaccacgtaactcttcttccttctcttgtttttttttattcctctccatattttctcgtaagttttatttctgtgtctgattataggacccgcatgagcctcagataatctggggttcctttttttgttcttgggagaatctgggtttataaaaaaaaatacttaatgatataacaaaagaaaataactaaattagtgtccgaatattaagcttgagacgaagaagttactcaaaagtttgttttgtttcctgcaaagttgattttgtcaaaatcattttctgattataaaaagcttgtaaagtttggttttcttttctcgttttttttgttctcttgacgttttatgaaatctgttatgtcttataaagtaatgtggcccttgttcaatgatgattcaaatttattatatattgttaagtttaggtttactgattttacctaaaattgaaagatactcctacattaattttgcaaacgaaaaagtaaaaactaaagcttataatgcttggaatgttgaaaatgtaatgttgcaggtacaagtaacgttagagaacatgcaagagtatcgacacgtggaaaagccagggtggaagcttagctggcattggctcaaccaagaagtgatatgggacatgaaaggagctgagacgacggagcaaggtaattgctctgcctttgcctccagcggtaaccttcctcactgctgtctcgagcgaccaaccatagtcgaccttcttcccggtgcttctctcaacgttcaagttgccaattgttgccgtggaggcgtcttgacttccatgtctcaggaccacgccaatcacgtctctgcttttcacatgacagttggaagctctcctgatggccctgaggagttcaatatgccttctaatttcgatataggggtcccgggttatagctgcgacaatgctacatccgtgtccccgactaagtttagtactgataagggccgtcgcaaaacacaagctctaggtaaccaaaattatataaattgcaatataattacaaaaagaagttgagaaatgtagaaacatgttatacataggttttttgagttatgtaacataagatatgtggtgttgagtgcagcaacatgggaggcagtgtgtgtatactcgcagtttcggtcatcaccatcgccaaaatgctgcgtttcactctctgccttctactaccaaaacattgttccttgtcctacctgtagctgcggctgctcgagttcccattgtgtcaagtaattcacttttctaaacctttcacttttttttggatatagatgtaacaacatgtataatatatactagagagcaacatttgattgatcagggatggagagttgccgccatatcttgaacagaaacatgatccagatgaggaagtatcgcctgtcgtgaagtgttcggatcatatgtgtcccatccgcatccactggcatgtgaaagtgaactatagagagtattggagggttaagatcacagcaacaaatttcaacacaatgaagaattacactaattggaacttagtggtgcttcatccaaacttgaaaagcgtccaacaagtctttagctttaactacaaatctttgacaccatatcaaaacagcatcagtaaggaaattctttaaaaaccacaccatagtctcttagattattggtctaacatcacttgttcttcgtgtggtgttatttcagatgacacagggatgttttggggagtccagttttataatgatgttttgcttcaagaaggaaagattgggaatgttcaaacagagttattgctgaagaaggatatgggaaatttcactttcagagaaggttgggctttcccaaggagaatcttgttcaatggtgatgaatgtgttatgccttctccagatgactttccaaggctgccaaaatctgctcattcctcttcgtcttcctctgctgttattagctctgtttcagtcgttttctgttttctccttcatcatcttcttctactagtttgatgagattgtttctttcatttgaacctacattgttccatgcttctttgacttttccaagaaacaaagcctctaataaagcttgcatcaaaaaggattaatatacagtattaggatttaggaagcatgttctgtgatgtccattcacatttcttgaccatttgagatttaaaagaactaagaataaggtaagatatttatggtgtatttattaaccaatacacaaagccggttcgtcatattgaaagttgaaactagttatatatggcccaccatatcaagcggtgaagttctataagtggaaaggaaaattactcttacgaagtccttgtaaaccaagtaaatgaataaggcaatagtacatgtattctaagctctaataaaatggaagtaaagcaatatttctaaattttaattgttaaaaaaagttgaatgtcgcattaaaattatcactcttgtgaaaaaaaaagaataaaagttgaatgtcgcaatgttttttttttgtttttttcctaaacatataaataacaaaatggcatgtgtcatcacaatgtaaaatctcataagaaaaataaggaaaaagaatattcggagccaataagaattttatatttacgtgagagacaagtggcccaattgacgggcccatattgcaaaaacgcctctttttaaaacccgcctcttccttcacaccaaccttcacttttctctcagatctgctttgagattctccgattgcatctcaaaaaatctcagctatg

SEQ ID NO: 7211 - DNA, 3000 bp, Unknown
  misc_feature (1)..( 3000): cDNA_ID_1817074_gDNA_ID_1621133_Annot_ID_172530 3000 nt of promoter + ATG
atccaaatccaccattggtgtcgaattcgctactcgtactctccaagtacgcacacatctctctctatatatatagtatatagtgtaatcgaaatgttgctggatctaggtttagttctaagttaagcagcatccggtgcttttcgattcgatccgtatctgtgttcgtatgaatactcggaagcagtcattgtgtgtaggaacatttgggcttggttttgaattttgatgtttacatgtgtggtgcctgtttttttcatttggtcgagatttttgctttggtatctcttaatttaagcgttttattgataatgttcccaaatttgtcgatactctggtacgtggtagtgtaaggctccctcacatgtcagatctaaaaccttgtttaaggcagatctaagaatctcttcatctgaaattgatctcgaacatgattttcttttgaagtatgaatcatggttgttgtttcacagtttctagttttcttactgggttgtttgtggaatttagctgcgaagttactaattttgttgttgcagacacactaatcatagagtctgctgctcattagatctgaattaacctattaaaaaacctatgatctttgttctaaggtggaaggaaggactgtgaaagctcagatatgggacacggctgggcaagaacgatacagagccataactagcgcctattacagaggtgcacttggagctcttttggtctatgatgtcaccaagccaacaacgtttgagaatgtaagcaggtggttaaaagaactaagagaccatgcagattccaatatagtgatcatgttgattgggaacaagacagatctgaagcatctcagagcagttgccacagaggatgctcagagctatgcagagaaagaaggcttatctttcatcgagacatcggctctcgaggcattaaacgtagaaaaggcttttcagacgattctctcggaggtttataggatcatcagcaagaagtcgatatcttcagaccagacaactgcaaatgccaacatcaaggaaggccaaacaattgatgtggctgctacttctgaatcaaacgctaagaagccttgttgctcatcgtcttgaaaggctttgtttgtgttgcacttaaaaaaagccaaatatctatgagactttatttcaaggcttgcgttgtatttgttttctttcttttttctgttgttgataatataactcaaagataattttttatatcaattgtggagttcggaatcgttcacacaaaacaaattttggaaacgaaaaatatttttagggaattaattgtagttttgagtggtagttgtaatgtagtatcagaaaaataagcagagtataaaatgaaataaacaaataccaacgtagactatagtttgaatttttaatagagcagaaattcttcgatttcaaagataatttaaataaagtagacaaaatcacacaatatacatttttcaatcaagaagaaatggaaaagcaaagaaaggaagttaattaaaaaaaagggggaaaaaaaaaacggaagtcaacaagaatacaggcaaaaccaaaaatatatatttgacggaacaaaaaaaacaaaatatatattttatagtattagtttatgacattatctttttgctagtttatgagatttatgaagaaaaggaaatatacttttaaagttgataaattgaaaaaaattagaagaatgatttacttttattttagttattttctagcaagttttttgtcaaaatggtaaatttccaagtctttcgagtagttcccgcctcctataatatcaacaacttttaagcaacttgtaatcatcaacaaacaatttactttgtttctttgtcactgaaaacaaatacataaaaaagatggagatcccaatctggggatggtgtattatcgtcgcaggaataataatggtgacggttttatgcaatttgctcgataggtggtgctcgaaacctcttgagatagaagaagatggtaaagcgtcgtcttctgtaactttggagaagaaggatccagtgaaagaagatggtaagagcaagacgaacgagaaggcacaagctaagccaaataataatctcgtttgaagaaaattttcaatatatttgttttgcatcccttgtttttatcatatagttttcttatttttaacaaaggttagactcttgagaatctaaagagtttgaaagatgttatctatgtatggtttctttatcttatcataactaactaaacatgttgtgtggtgttgatgaaagattgaaaggattaatcaatcacattctctagaaccaaagtcgagaattcttttaactattagtctcttagatttgcttccattactaatctttcaagtttgaggtgtaactcaaatttctcaacattttttttcatgcaaatctaaatttctgcaaatacaatgaaattataccattaaacaatccaccatatataatatacgacataagcatcgcacaataaaaaaccagtaacatttgaaaaggggaggagaaagaaaacatgaatattatttaacaaaaaaaaaaaaacaaaaaaagaaaaagaaattgaacgtctactagttaaaaaaaaaaaaaaaaaaaaaactttgaagtccccaaatatctgggccttttagtggatgtggcccaaattctaaatgggtttgacttggatccggttttggcgagactagttcagtttaataatcagccgtcgaatccaaagactgaagaaggtagtcttaaagaaaaaccctagaaaccattacttatctctcccactggctctgtctctgtcaaatctcggatcgatttcgcggtgggctcgattcgtgattcctcaaagttcatcatccctaaggtaattctctccccaagctggtagactcaatctaccgatttttgtgttgcacttaagaagccgatatctaaattagaggtttgcgtttttttggggtaggcactgtcacttaatg

SEQ ID NO: 7212 - DNA, 3000 bp, Unknown
  misc_feature (1)..( 3000): cDNA_ID_1817037_gDNA_ID_1621133_Annot_ID_56499 3000 nt of promoter + ATG
gcccgacgacagagacggaatcggtggcaccattcaggacggatttctgagcgttggagacgcaagaagtgaccatcctgaggcatcgctggcgaattccggtaagggaaacagtggttgaaggaatcggagagaaaagaggggaagaaggtacgagagaagaagaagaagaagaagaagaaggagacgagtattgtagagtggcgttaaggggaattgagattggcatggttgctctccctcggtgacggaggagagagatggtcggcggatataattgcacaaagctaggccgttataaatatcccagtgtacacgtggatactcacaaatttcaaatttaattaaaaaataatagccggaattatttattacactcaaagatgttttttatttgctatttaatatttatacagacagaaagagaaatttgctttgtagtctcttctgatgcctctagcaggtttagagggattagtcctttgcttattgttgttacttcttgatttgcttcaagagagcagctacagatccacaatgtgttgactcgttattgcatctctcacaacatgcctgtaacatctctatcactctctggcacctgccacccccaacaaatccacacaaaagtcttattagcatctccagtaaaactattctacagtgtattatttgaatgataacattatgtagaaaactatcatatcgaaagtgatgttgtcgttgttgttcttcaacatctcttaactgagttaatcatgatgctatttctcaaacttttcatggaactgtctaaagtaaggcatagagacatgaatgattactaaagataattctatgcacaaaacatgataaaacctggagatcctgtagtcatgtagatcaaagagtcaagagccttatgaaaaatcgttaatcaaaagaagaaaaccagattcgttttcttatagtagctcataagtgaaaccaaggtaagtacatgcaaacaaagtgacaatgcattcaatttttttccctcaagagaagccaacttttaacacaatccaaagacgaatatacaatatatagtgaggatatctataaccagcctgattttgctcatccgacaatacgaaacgacatgattcaggttctactcatccatctctgtttctcaaactaggtaagttataacactagtacctaaacttggaaatttggtcaataatctccacaccaaacctcacagttactaagaaaaaggattcttaaagccttcaaggattcatcaaatcttatgctagcaagagaaataacttagctgaaaacataatgatcgagacatgaaccctaaacccccaaaactaagatcacaacccaaatcttcaattaaatggatatccaattcactagcctcataagtcataagaaacatgaaggaatcttcaaatgcaaaaagcacttcaccatcaaaatcgatttcacggacaatcgcgatgaataatcaatctgcgggatataatgaaaggaaaaaagaaagagaaggaatcaatcacctttgaggaagaaaattgtttttggaaagacaggcttggatgtcacaagcctctttcttgcagggttctttgcttggttgcgccatttctctctcgctctcgcttcttctctgtctctctctcggcgtcaaaaagttctccgatcaccgacttgacataactttgactattcatcggcagtttgggaaacaataaaaaaccacaaccaaaccgatcaaacttaatgaaccaaaatttaaaccattttgatcttataaatcgaaccaaaccggattagagttatttctctggttcgcgcgtcttgcaccacacttcaaatgaaggatgaaatatattcattcactaatcactacttttgaataattgatagatttttttggtaagatgaataattgatagattaatattgggttttgtttttccattttaagatataaattgaaagataataaattaataatcgttgtgcttttacattgtcaataaaaactgttattttctttataacggcatattattgttaattaaatttcgtctctatgttatttattaaacgaaatgcctaaggaaggcgtgaaaagagcttatttggtgttgacgctcatgaaaaacgcatctctttctgacacattcttctctaattaaattctaatctttatttatttccccttggtcaacatgtttaattgcatatgaatcatttgtgacctctattcgtaattttatataatggttgcttagttaaaaagttttcatcaatgccataagagatagagcaagctgctcgctctagaataactgataccatacaatattattatggtcgcataatcaaataattgctatatatattcactgatgtagtgatgtccaaatctttgttaacctcaaaaattaatctgataacctagtgaaaatcaaatgattttgtttgctaatgcccctggattgaattccataaaaatacagaaaattaaaaagttacaagaagataacgtacgtgaatcattcctcaaaaataatagctggcacctactaaactaccagaaaacttgaagaattagaagagtgtacaaataaggtaaaaatgattttattttacagctaatagccttgataataaaaaataaaagtaagtcaaaaatccaaaaatagaaagaaaaagagtgaagagtgttgttgttgttgtgtacacaaatgcaaaactcttcgttgcaaacactaaacagtcactgtgtgacttctttgctttaattgtctctctatctctctctcttaacacagagaaacccgaggcgtcacacttaaaactcttgagatttttatctctctctttcttattcccaaagccaaatcaaaattcacgttttagaaaaaaatattttcatcggaatctgaaattcgacgtgactagtttattttgatcttctcgtttaatttgttcatcgtctgtgagacaaaaatg

SEQ ID NO: 7213 - DNA, 3000 bp, Unknown
  misc_feature (1)..( 3000): cDNA_ID_1817034_gDNA_ID_1621133_Annot_ID_56500 3000 nt of promoter + ATG
ggaattttctcagaaactaagcaaactgttctttgctctttcataagttttggtttttgtcccacatcgacaagtagaagagaacgtctcccaagtctgataatatataaaggaagctgggtctcactttcaaatcatacctttctcggccttttggctaagatcaagtgtagtatctgttcttatcagtttaatatctgatatgtgggccatcggcccacacgatattaactctatttttaaagggagaaagcccactaagatagcttgctatctgggctttcgcgagtcgcccatgcgttgcactactgcacgggcttggctcatcccatcaacaaatagttaaaatcattcataattagtgaatatattaatctgaaaaaatatgattggagagcataccaaatgaaagctaaaccgaaatttgattaatcgagcatccatccaaacgacaccatatttcttaaaccctctagacattggcactgagcttgagacggtgtgagatatcataaatcagtgagtgagtgagtcatgtccgataatctgaagcatcctctcgattgtacagctagtgaggaatcactcgagagactctcaaaggttgcgagaatcgagggatttagtgacgaagaatcagaggaacagcagggattggccgacttggagtccatgaacccagtaaaccctagagtgcagcgttacttggttgccattgagtacatcggaactcgtttctccggttcacaacagcaagctaaggaccgcaccgtcgtcggtgtattgcaggttgttgcgtgtctgtaatttcttatactactgctctgttccttcaagatttgcctggcattgattgatttcacagctaattatgttccatagagcgagcttaggcctagtttatattggctgacaagtttcttaggaggattcatgtgtgaattgatacatttttgcaatacattgcaggaggcttttcataagtttataggccaaccagtaaagatcttttgctcaagtcgaacggtacgagcttcttacataagtttattggccagcgagttaagaattttaggttttgttcgagcagttattacctagaacctacatatatataaatgatcaatctcttattcgtgtctgaagaaacgtttcaactagttttggattgccctttgtcactatagattcataaggaccatgctttgcagtaaattgatatctatagaaagttagtattgatgaattagatatatttcaatgaaatgctcatttctttttatggtttatgttatctgacattgatatagcgtcttttaggatgccggagtgcatgcactgtcaaatgtttgtcatgttgatgtggaacgcatcagtaaaaggaagcctggtgaagtggtatttcttttgcgccaacagctttctttttatcttgtggcttacgaatggaattatttgagtcacgtccatgttaacataaattataaatacacattgttttgaatctcatatgtcccaattgtagtctggtttatacatgaatatggttagattctgcaacgtgtattcacaaacacatgctatcttatatgcttaatgctcttgcgaactattaaggacagatacatttgcattctcacttggacgctatttttttaactgtagttaccacctcatgagcctggtgtggtccagagagcggtgaaccattttttacaggttaatatctgaattcttttcgaattgtacctattagatacaatgggttttcttctcattccatggccactcccacaaaattatcctgtaactagtgatcttaaccaaatttacttagacctgttgacaatttcgtttaagtttctccaacctgtcttttccttagtgcttactttcatctactttgacctatctactattcgttatctcattaaaatccttatgttgttattaagcagagaaaagatggtgatgttatggtgattgatgttcggtgtgtcccaagtaattatcatgccagatataaggcccaggagcgcacgtaggtattctaatttagtttcagttgttctagagattttgatgatccatatgtgtgctgatagtattgtagagtactaggttatgatttgaaagtatattcccttcaattggaaattgagaatttattcactcattgtagatacttctaccgcttgctatccgggtcagatccattatcaatccttgaaaaagaccgttgctggcatgttcctgaggagttaaatcttcgctttatgcaggttcacttactaactactgtattgtcagcttaaatatcagcactgatccaaaaaatttattttcccttaaacgaagagtccttttcacagtgagaataagagatctctaacaacatcatcaatgattggtgtacaggaagcatgcagagttcttgttggatctcatgattttagctccttcagggcagctggttgccaggtcaagtttctttgtctgtttttgtttaaatatctctttatatcatactgatacacaatcaatatgaatttttttgaatggttggatatttttccattcccattcatagaatccttgatcaatgcatctcaattgtagattggtacttggtagaccttatatatttgtttgtgtttgtgaccatgtgaccaagtatgaatgtatgttagctctagcgggttgatgtctcctgcagaatataattttgtgtaatcctgctctattttttggcaaagcttgttcatttgtagtattctcagtcacaacatatcaaattaatcttgtaaattctcgttttgttttctgtagtcaatagatgtgcaagtcaatcttggttctttaagatgcatatgtatcctttcgtctcagtgatttgtagaaatgggaagataactgtctgtatctatgaagaagtttttccatgtgtagactgatgttcttccggaaacctgataaaccttttggtgacttgttgttatg

SEQ ID NO: 7214 - DNA, 3000 bp, Unknown
  misc_feature (1)..( 3000): cDNA_ID_1817027_gDNA_ID_1621133_Annot_ID_56502 3000 nt of promoter + ATG
gcggagagacctctgacctatagataagactatataaccatgcacatgagacgaatgtctaaactcacacagcgttttgttttgttcttggtattacggttaaaacaatagaaaacactcttgttactagaaacgtttgatacaattgtgaattgtgatatgctggtactgtatcatatatgctactataactggagttggtgaataaaattcgttttaataattaattagggacctaattatttaaaaagaaaatttggcatttagagaatagtggaggcttaggtgaacttacagcaaagcaaaattcaaaagtaggaatgattttaatgtagaaaatagaagagaattggggattttgccttttgtgactcattgtcacagatcattcatgacaaaaaaaaaaaaaaaaaggccatcatgtcatgtgactgctcttcttctattcactctttagctttttcttttgcatttgctgtctttatttgaaccatttcttcttttatttctttctctttttgtaagtcctaaaggaatttctccaaccagaccgactctgtgatggatacaacaaatttggctatatttatgaaggtgcagacatgaacataagactacataactgtataattgttgttgttttcattagcaaaacacaactcaataaaaatataaccggagagtaatggtaaaatacaagaaagaatgcatctcttcttccacgaaactaatgcaggaacttctgaatgcatgctatcatataataatagaatctcgtatgcgtcgaaccatatacatacttaattaaattatatgtatatatattaatatatatagggaattgttcctgcattagtgatatgtttagattttagttgtcaagtattttataaatgtagctttaagagttttttacattttttgcttttttcgcaaattcggatcaagatatctctgatacggattaaattgtcagaacccacacgcatcgggatttgaaactaatacacatattagaaatattaaatagcacttaattagactagagtccgtaaaaataaatttgtgtgagtaatgaactttttagtcaaagttctaaattttgctgtcttccttttttgactataacttttctagcgtcgcgaatccctaaactctcattaaaaagaaaaaaaaaatcgaaagctaatggaaaaaaagaatagacctagctactggctactgtcattcatgactgctgttgttcagtttttactctatgtatatgaacaatcgccaaatttgtagctttgcgtttgcgaggtcatggaattaaacctggcgtctatatatacatgcatgcacatggttaactggtttgtatcatatggcatcaaatgacttacgtactactatctcggccttttttggttggggtttgcttgaatacataatggataattatagtcttaatattgaccgggcctttgaggcccaaaccatgaacatctgaatccaacggtgaagatttcctcctgaaaggaaaagttataagataatcttagccgtcggaagcttctctttttctgtgagggttcggtttggtcgtcgtcgcaactcccccacttgtgaattccaaagtacacttaacacatacacaacctcttcaagcggtttcccctgtttggttttacggcggctctaaacccgttttctcaggtttgcttcttatcagcccgctttctgtttccaactaatcattgatctgtttagttcttggacaattctgagtcccatatgctccgaattgtttttttcttcttcttcagaattctctgttttgtcattaagattggaactgttagtttccattgtaaactgtgttatgttttggaaactttatggtgaagtaaaagggcatgttttgacagtatttgttcatgttgagttctgtccaagtagagatattagaactcagagtttttgtctttattggaattgctcgttgagtatctcccggcgtcatgttttcccttgtaacgttaactcatgggaatgaattatccgttttgcttcagaaatcctataattctgcagaaagttgttctgttagggtccttagttctgtaatctctatcactgggaacagtttatatcttttccatttgactaaagttactaaaattgtgcatatcctgcgatttagcgttgttctttctggggagagaccataattctgactgcccttttgttttgtattattgcatcagactctaacccaaagcgtagaactttagtagttatctcttttgtggtcttttaccgaggaagtgatgaatctaaatggctgtttattgctgactaccataaacagattagttgattctccatactaacctttttcttttgttccctttcaatggttgcagtgtatcttcaaaattgataatggccactgaaaagaatactctggattgtatccttaaatgctagcgcattttttgttctgtacttctttacttgattgagtttttattaagacaatgcttttgtgattgatttcaaattccttgttatatcaattagtgtttgccccttaatattaactctagctgaggctacttttgcgcaaacagtaccagctcttgattctacaacaaagaaacaggatgaggtatttacaatcttattagccacatactcaatctgctgctagcaaagaatgcttttacataaagtttggttatcttttcagtctcctccaaagagtaccccgtctcttactgtcactgcttgtgctaatggtaagacagattattaagggtttggttcttatcaaccacctaaaataagtctgctattttcttattattcttgatagatttttaaatttctatttgcataatctgttattatggctcagtagtgaatgatctatatataggtattttcttaagtgattgttgcttgtgatgcattttgcaggatctgatgtagtatcttctcagccaaatgacaatg

SEQ ID NO: 7215 - DNA, 3000 bp, Unknown
  misc_feature (1)..( 3000): cDNA_ID_1817019_gDNA_ID_1621133_Annot_ID_56504 3000 nt of promoter + ATG
gcttttaacgaattcattcttggagtatgacatgttctcgttctctgtaggtaaaaggagaacccaatgtttcttacatctgttctagatactatcgtgctccagaactcatttttggtgccagtgaatacacaactgcaattgatatatggtccactggttgtgtgatggccgaactgcttcttggacaggttaaagcatgatttttgcattagctatatgttgttctattcattcagtttattccttgtcttactattttgtgcccttgctaatttgtcgtacagcctctgtttcctggtgagagcggagttgatcagcttgttgaaatcattaaggtagccttttattaattctttaaatttatctaaaatcatcaagtcctgataaagtgataagttcttttagaacttttgtttacgtagcagacaggtgcagattgtcaactttatatctgaatgattattaggcttaggcatcacaatttgttacgtctattgttgagttcgtattcagtatagaagaaagcagtaacctttggattgctcagtctgatttcgaggaaaccttggttttcttatttcatttgctttgatatgtcatgcaggttttaggtacaccaacaagggaagaaatcaagtgcatgaatccaaactatacagaatttaagtttccgcagataaaacctcatccatggcacaaggtatgccttctaatgttattgattatcacctaccagaataatctttaatcagtggttttgttggtgaatgcattttttcaaagaggagttctggtatttgtgatggtttggagtatgaatcattcaagagtaaatatcaaaaataaaattaatgttgtcatttcctctgctttataaaactatctgtggtagagttgaaaacaattggctaaatgattgtggctttagttctagtttgagtatttctctctggtggaaatggttttcaggattttgttctctgacattctacaacttggtggtttgcactttgcattaagctgtatctaggattttttattttcccatagtaaaaaaaggtttaattgacttcagtgataattatctccttgagcttcgcttctctctgaatccttattactgcatgaatattctatttatgctcaggtgttccaaaaacgtttgccaccagaagcagttgatcttctttgtaggttcttccaatattcccccaatttgagatgtacagctgtaagttaattcgttccgttccctccatattagcatctaatgatctaaattcattaaaaacactcttctggtgttattgtagttggaagcttgtatccatccgttatttgatgagctaagggacccaaacactcgtcttcccaatggccgaccacttcctccacttttcaactttaaaccgcaaggtacagttcccttatttttcttgttgggcctattaagagatctaacatatgtagtatgctccgttaagttgttgacatgttgcgttgtgttcatgattggtaatacatataaacatcattcagtgttagtatatgctctttgaatattgaggatgctaaataaattgaacaagtatggtgccgttgtggcctctgaaatatatgattactaagcaaaatatataaacactttgttctccatagacatgaacctgtcatccttaactttcagtacttcaaaatcatgaactgaggttttatgtgttgttgcagagctatctggcatacctcctgaaatcgtgaacaggcttgtcccagagcatgcccgtaagcagaacctcttcatggctttgcattcgtaagacgcttatcggtttttgcatctgtataagcaagctctcttgatatcaatatttggagcagccagttttcagccatttggcttttgtttttggtgagttctttttctttattttttttctgtttggttggttatatgtcgatgaggatgcatgaatacaaacagtacttgaggtttgctggttacagaccacttgtttgtttcacggccaccatataaccttatctatcgcaaactgttttaaagcatgtaaattactaaccaaaattaattgcatcgtttagttttacaaatagaaaagaaaaatcaactaaaaattaatgactttgccgctcatgtgtttgcacattgtgtttctgtgaaaatcaaaccgattccttcgtgaaaatagccgtgtcttcctccagatcgtgaatttggtacttcatacttaccggtcaaaagctcagaagcaatatttcagtcatggcgaaccgtatagtatatatcaaggaaaacctcataacataaacaaaggttcagaacttcagacaaaacctgttttagatgacagagtcatggatcaatctcagcccaacaacattaaaacttttcagcccatcaaacccaccaagtttaaatttcttttctctcttgaatcttgatccagtagctgatccgacaacgttttgatgtttggtcgaaacagttgaagtctcttcctcttaaatgtgattatcaattaaaaaatattatttgacccaagatacatgggtattgggcctccaaaagtttaagctttttagtaacaaaattaggcctccaaaaaaatttgttattgcaaaactatatcctatattctaaaattttaatatttagtctccatttttaaatttatctattttttattttctaaaagttataggatttagtcttaatttttaacttttatcaacaaaactcattaaagaaaaaattattttgtattgggccttatcaggaccggcgtctacaaataataatagacaacaaaattacacatacaatgaagatgttttattggtcacgatttgatttggtatttattctttaactaccaaaaaaataagtaaactcaaaaacaagaagggaggaaccactttaaacccttgtctacgctggtccgagtccagagtcctctactttgacagtctccctccatg

SEQ ID NO: 7216 - DNA, 3000 bp, Unknown
  misc_feature (1)..( 3000): cDNA_ID_1817015_gDNA_ID_1621133_Annot_ID_56505 3000 nt of promoter + ATG
ttattatactcctaaaaaggacaaaaagagatgcaaaattagattagtgtgacaaactacgtcatgattggtcttcttgtagcatacgtactaaataaccacagaagatgaatctgcaccatcaaagattctaaagtttaagactttctccgatctaaatccaatcttaaagttcttgaatcacatcctaagtcgctgaactataaactccaatcaaatctgaaattttgatgaagaagaaagttaaatcaaataccgcagcttccttgatctttgacattagtaacagctcccttctttctccaatcaacagaatctggaacctttacgctaccaccgagactctgtcccttactagccattatcaccgacggagcggaaacagagagaccaagacgagaagccttgaactcgtggtgagtcagatccgcgaaagcattgagagagagagagtaagtagcgttagtgatgagattgtgttgcgtaacgaagtcgtgattatctttaaagatttgaatcctctgttgcctctcttcttctgaaccgtacgttttgccatgtttctggcaccagtcgtcgaatagctcagagatgtcatcggaagatgacgatgaagaaacgagaagaaggaagaagaaagtgagagagataaaggaggacgatgacattgacatttctgtaatttttgtttgttagaatcgtggagatagttttggcctagaaataaggaatagcctggagatttgttttttcccatttcttttgagatttagccaataagattacaaaacgctggttttgcgttggcgttttaaacaaaaagcgtttggcgttgaaaaattgccgaacaaaatgattgaggcagaagaagtgaaccacgtgtgtaaataggagggatgtagctagaattatccacaactttgccaccagaaaattttaaattgctaaatttaattatacatattgtgaaatatgcattacaaacataatgtaatgttaataagtacgttcattatcatgaaagccttttaacataaaaaaacgatcattatcaaaatttgaatgtttgtttaataaaaaaaatgcggacttgtcagtattatcctcatcattcacgggctcaggaccgggccggagaggccaatggcaatcaaaagcctaacacatttagcttccaatccaactacatacacacagtactatcgtaaatcattgttttgttgttgtttggtcaacactaaaatcattgttaaatgggtaatatatctacgatactttattaagcaaaagaaagcaactttagcctttttaggttataagaccaccactccctatttgtgtaggctgatgagcagtacactttggacctacttacgactttattgcatttagcccttttttgcttattctaattagtaaataagatcacgcggagaccagagagtagtagtaaccaaagcaatgtgcatgcctaacgtgtattttcgagagagctcaccaaagcaaaaataattaacttcacttttgtgaaaacgggaatgtatttgatcaatcttttcgtatttagaaggcttatattatgataaaaccaattgcagataaaaaaaatacatccttaagctttaatatcactaataaaacccgatacaaaatctccatcgccacacacacaaaaagaagtgtgatgtgttaagccttacctaactgtcgacaagtaaaggcgacttttactatataataaccagcaaatacgaaagtggctttatttttttgaaattattttttgccctacaacagtattttaattcactagaaaattccaagaatatattgttgttttatcgtatctcaaaaatcaaaaggcacatattagaatataaatcccatatagatgcattttggagtggaggctcgaatgtgttgacaaaaacatacatttgaagcgatttctagtaatcacaaaatgttgttttcttttgtaaattttccactatagttgaaataagttgtacaccaaaaagtttgaatatccggttacaaaaattaggtaggctgaggtttgaaaattgagttccagttgttatgatatttggggacatccattaaaaagtatagtatgaaattttaacaaggtctaattaattttttgaaggaaaaaatatataactaagcataaataaaaatcttatagaaacataaatataagaaaaagattaatatatgatgcttataatgatgagctgtcgtctcatattctcgtttgattcaaaacgatagaaatcgacaaagaaggtgtgaagaagttgggaaaacaaaattaacgcttgaagaatctaaaggtttagcttttttctcaatccgatcattcaccgagaaatattctattttatatatttatgtgaagctcttcaattgaagaaagaagaagaaaagacaatcgtcaaatgcttgactttggtttcagttcttcttcacgacagctcaaggtgatgatcatttttattttactcttctacctaatcatatcactgcgaatcttttccaaagtttcgctctttattctctcaatgtgctttttttctgagttgttgttgaactagggttcttctgggtactagtaactgttttgctgattttctgagctgcttttggctatagaatttcagttttcaaaccaaaccttgtcgatttcaaatcaattctagtcggcagtagatctgatctgtctctattgggctaggttttacagtgtatcaattcaccactagttcaaagttcatcagtgcttacacaagtttacttttttttgtatgtgttcatgatttagctaatgatcaagatacttgagatataataacacaccttatttaatgcaaatgggcctacaaattctactaggaagatcggctctttgatgggatgggacaccaagaaatcaccatgggtttatgatgctatcaattactagtagtacgtgttatcttctgaatatatatcatg

SEQ ID NO: 7217 - DNA, 3000 bp, Unknown
  misc_feature (1)..( 3000): cDNA_ID_1817011_gDNA_ID_1621133_Annot_ID_56506 3000 nt of promoter + ATG
ctccctgttcttgtagcgtttgtcttgtagaaccttcttgatggcaacaacctccccagtttccctacatttagcctaccaaaaggaaacataaatgtgcaggggaatggagccaaatcaatagaacgaacatcatgggtcttatgttaaattagctcacttggaaaaccatgccaaaggaaccagtaccaacaacatgttctgatatgtaactgactgtctgccaatccaaaaaaaatctatatgagaaacagttagataaactacattaccaactaacacatacaattatccataaccatccaacctgtcttgattgaccatttcgaccacggagtgtggttctaatcacatgaccaggctcagcaccagccccatcaataatatctggttcactatcctgcaacgtaacgaaaacctcagacactgtaaccaactccataacatatataagctcaggataaagaagtgaagctaaaaaacagttgaataaacatgaaaaaaagaagaagcaatgcaagacttactctctcatcatcggtctctactttgtcccttatcctcgtctcagccaaatctctggtcaaccaatcgacagaactagaagagctctttaaacctttggcagatctcgaagtgcctactccatttcccagtccagaggatgccatgatatatattcagaagataacacgtactactagtaattgatagcatcataaacccatggtgatttcttggtgtcccatcccatcaaagagccgatcttcctagtagaatttgtaggcccatttgcattaaataaggtgtgttattatatctcaagtatcttgatcattagctaaatcatgaacacatacaaaaaaaagtaaacttgtgtaagcactgatgaactttgaactagtggtgaattgatacactgtaaaacctagcccaatagagacagatcagatctactgccgactagaattgatttgaaatcgacaaggtttggtttgaaaactgaaattctatagccaaaagcagctcagaaaatcagcaaaacagttactagtacccagaagaaccctagttcaacaacaactcagaaaaaaagcacattgagagaataaagagcgaaactttggaaaagattcgcagtgatatgattaggtagaagagtaaaataaaaatgatcatcaccttgagctgtcgtgaagaagaactgaaaccaaagtcaagcatttgacgattgtcttttcttcttctttcttcaattgaagagcttcacataaatatataaaatagaatatttctcggtgaatgatcggattgagaaaaaagctaaacctttagattcttcaagcgttaattttgttttcccaacttcttcacaccttctttgtcgatttctatcgttttgaatcaaacgagaatatgagacgacagctcatcattataagcatcatatattaatctttttcttatatttatgtttctataagatttttatttatgcttagttatatattttttccttcaaaaaattaattagaccttgttaaaatttcatactatactttttaatggatgtccccaaatatcataacaactggaactcaattttcaaacctcagcctacctaatttttgtaaccggatattcaaactttttggtgtacaacttatttcaactatagtggaaaatttacaaaagaaaacaacattttgtgattactagaaatcgcttcaaatgtatgtttttgtcaacacattcgagcctccactccaaaatgcatctatatgggatttatattctaatatgtgccttttgatttttgagatacgataaaacaacaatatattcttggaattttctagtgaattaaaatactgttgtagggcaaaaaataatttcaaaaaaataaagccactttcgtatttgctggttattatatagtaaaagtcgcctttacttgtcgacagttaggtaaggcttaacacatcacacttctttttgtgtgtgtggcgatggagattttgtatcgggttttattagtgatattaaagcttaaggatgtattttttttatctgcaattggttttatcataatataagccttctaaatacgaaaagattgatcaaatacattcccgttttcacaaaagtgaagttaattatttttgctttggtgagctctctcgaaaatacacgttaggcatgcacattgctttggttactactactctctggtctccgcgtgatcttatttactaattagaataagcaaaaaagggctaaatgcaataaagtcgtaagtaggtccaaagtgtactgctcatcagcctacacaaatagggagtggtggtcttataacctaaaaaggctaaagttgctttcttttgcttaataaagtatcgtagatatattacccatttaacaatgattttagtgttgaccaaacaacaacaaaacaatgatttacgatagtactgtgtgtatgtagttggattggaagctaaatgtgttaggcttttgattgccattggcctctccggcccggtcctgagcccgtgaatgatgaggataatactgacaagtccgcattttttttattaaacaaacattcaaattttgataatgatcgtttttttatgttaaaaggctttcatgataatgaacgtacttattaacattacattatgtttgtaatgcatatttcacaatatgtataattaaatttagcaatttaaaattttctggtggcaaagttgtggataattctagctacatccctcctatttacacacgtggttcacttcttctgcctcaatcattttgttcggcaatttttcaacgccaaacgctttttgtttaaaacgccaacgcaaaaccagcgttttgtaatcttattggctaaatctcaaaagaaatgggaaaaaacaaatctccaggctattccttatttctaggccaaaactatctccacgattctaacaaacaaaaattacagaaatgtca

SEQ ID NO: 7218 - DNA, 3000 bp, Unknown
  misc_feature (1)..( 3000): cDNA_ID_1816999_gDNA_ID_1621133_Annot_ID_56511 3000 nt of promoter + ATG
ttgacttgtttctatttgatcatagtttttttcggcgattggttgctttctctttgttgcgtaatcgttcgatgatgacttgtgtaattcgatattctggactcgaggttataacaattttggaattgatcggtgattgcaattgagaatatgtgtcacattaaagatactcgtgagctgtatgattcagtttggttccacggtttgtgtcggtgattacaagtataactagggattcgatggatggattagtgatatacaatctttttttctaaaagagttcatttttatttggtcacctactaaaaggttgattcttttttgttactttgcttaaagtccttcatgataaatctattgattatgtatcagcttcctggtgtctgtacaagagttttattgtcttctgtttatcgtcatgctttctacgatttgtctgatggtttgcttagtttctaaactttctaaagatatatgtgtatgctttgtctagttattgttgtgttgagtctgctgaggctggaaatttttgaatgccctaattcttatttgggatcagtaaatctaatcccttgtgtatgttcagtggtagcatttacctggatggttgatcccatgagactgattatcttaatgttttcagtgacagagacattccatcactgaatatcgatctgcatcgtgtacattgtgctcggaatttagaaaaatgtaagatttgtggtgatatggtacccaaaaagcatgctgaggaacactacttgaacacacatgctccggtacactgatttctctgtttcttacttgttgttaaactgttttctgtttgattaatttccacaactgtcatctttgatgtgaagagcttctctttgttagctccatcaaaattatatactttgtctagtgtgacgtccaaataggttgatcaaagggatttacattgtttcatatgataggattctgctctcaaatattttgttaatgtccctccaacgggttttaagcttgtttcaattaacaaatattagatcacttatgcatttattagactttttaacttagtgtgtaacacaaacagctagttatcaacgcttgttcctgactgttcttgagttttatggttgacaagaactcccccaagcgcagcttgtgtttgcaaggttgtgactgtttcaattactaggtcgagaatagttattcagtataacaagtaggaatttgttttgtttctgttttagactcaggatttttgtatggcctagatgctgctagatgactgaaatgacctacattttcttacgaaattctttctgttctgtattgagaagatagcatgctcgatgtgcaaagagaccatagaacgtgagattttcgatagtcataaaggagaaatttgccccaagaggattgtaacatgcgagttctgtgagtttccattgcctgcggttgatcttgccgagcatcaggtattcactctgacttgcacacttccttttctctccaactaaaggattttctgatccgctcgattttccgaatattaggaagtatgtggcaacaggacagaactctgttatcaatgcaacagctatgttagattgagagaaagatataaccatgaaaccaaatgccctggcactgttgaatcatccaggtacattttcttatcttcattgttttattttgaaaactctctgattcagatcttaatccttttttatttggctaaactcatgtcatgacatggattgtacagaaggatcccgagagcagcagaaggagatggaaacgggagaagacgaagagatgggaacggtgtttcgaacaaaaggcttttcttcacgatagcaataacgggaatagctgtgataataggatccttgttcttccagaggaagcctgagtagaggaggcgtagcttatctgtaattctgtaaatttgcctcaaatccttcagacagattctaaggaagggtttatacattttaaagcttacccagacaagagaaaccccaaaagattgtttgagctgatcaccatgagacttgcttttatatttgatttcaataaaagagatttcagatttctttttggagttaaaaccaaactaaaatcaaattacattcggtttggttgataagaattaaaactgaatgcaaaggcaatgccttgagagttgacaaacgcagtcgtgcctaaaccaaggcacagaagcgctttaacaaacgctaacgcagtctctctctctctctctctctctctctctctctctctctctctctctgggcttcggtggtgatcacttgggtcgaatactgatgaagaaactggctgatcggctccttcatcgttttactaatcatgaaaccgctttaaacgccggccaccactgtgatttctcgtctacccttctcttctcatggtttcttcatcctcttgaatttctctcacttgagaatggtttttaggctgctcaacgaaattgtgacagcaaagtttgtatttttagcccggattagtaaataagcttaaatttgttgtttacttcattttttatgacactgtaaactgtttttctttccttgtttcatcaaattgggtttgtttctttgttgaaagatgatttcccttcactgggtctacgtataaatccagaaaggaagggactttaaacgatcacagagttacaattgattgaatatcggaaataaaccattttgcttgactatcggaaataaacgccttttcagtttgttttaagacctgttctacagatcctatatctatgaccatttcaaaactcttgttttacacaagcacttatgaaactttgagtatctcgtgctgctgcattctgcgtaaagaggagttctcatattaatctctttagtttttctacattcaaaagtgttgatttttttccttacactaatatcaggctcagaggggacagatcaaggtacaagtggtcttagtcataggaaggatcacaggatg

SEQ ID NO: 7219 - DNA, 3000 bp, Unknown
  misc_feature (1)..( 3000): cDNA_ID_3050039_gDNA_ID_1621133_Annot_ID_172564 3000 nt of promoter + ATG
tgaaaacatcgatcaaaaggccaattacaaactgcgagtcgccatagcatctgcaaccttagccgagttgcaggtaaagatgaaacttcatttttctacagaaaagaatgagataagactgtaaagttttgttggtactttctatttgcagattcgaatcaatgatgcggaagcaatccgccctctcttcacaaccggactcattgggagagacaactcaatagcgaggcacgggatccacggggtttacatgctgtatgcggtgaacataccgggtaaccggcttgtgcaaggtgataatactatattcctgaaacagccaagatgcaatggtccctttcaagggataatgtatgactacattcgtcttgaaggccctccttcttagcttagaatgatatgtgatatcattgtttatgtatagatatataataaaaccaaaagataatggtaacaactgaatcatattgatatgcaaactccccaaaccaaaattctgacaacattacaactgaacctaagacataataagtagaaaggagctactgaaatgttctcttaagcacaaatcaacacaagagacctgaatcgtgagtaaactacttaatgctacatcttccctgcaacttgctcagcagagcttttcttcatgagtcccttgttacaaagctcattaagcagctccaaagcttcctttgccataccttcataagctaagccttctatcagaatcgtgtatgatgtttcattcggtttacaccctctgttgatcataaaaaccaagaaatcgatggcacgatctgtttgccgactcttacagagtccaagcatgatagaattaaaggtgactgcatttggcctaatgcccatccgctcaaactcatggaaaaacttaatggcttcgtctacttttccttccctgcttaaacctccaacaagagaggaataggtgatagtgtcaggctttaaatctttcgcacgcatctcatctagcagttttatcgctttgccagttttaccagcttttgcaagcccatcaatgacagtattataagtgattagaacaggagaacatcccttgctactaagttgattaagtatctcaaccgcatcttcaactttcccatctttgcacaaagctgttagcatagtgttgtaggtgacaatgtctggataacaaccacgagaaaccattctctccaaatactcgatagccctatccatctttttctccttgcaaaacccgtgaagcagcgggttgtaactcaaagaattcggctgacatccatgttgaggcatcttctccaatatgtcaatcgctcggccaagcaaaccttttctacacaagaaattaatcaagatattgaaagtgacaacgcttggcgaaaagcctttacgaagcatatcagcaagaagcttctctgcatccatccatctcccagtactacacatactccgcagaattatgttatgtgtaataacatttggttgacatccagaagacggcatgtcattcaaaaacttaatggcctcatccaatctcccctctttacaaataccattcacaagaacgttgtaagtcacaacatcaggagtacatcctctatccctcatttcatcgagaagcttcatcgcatgtcccacaccactatctctgcaagtagcttcaatcaatatagtgtaagtaatcacatctggataacagtctctctgaagcatcctatcaagaacctccatggcttgcttaagtttcccactatcgcaaagagaacgcaagatggtattataagtgacaacatccggcgaaacactcattctatcaagaacagataacgcgttattgatctccccagctttgcaatacccactaatcataacattgtaagttataacatcaggaacagcaccagagccttcaagaatctccaagatctttgcagctttcctcgtcttacccaacctacagaatccgcgaatcaatgtcgtgcacggaatgatatcaggaacattaccgtgataaaccatgttctctagaaacttaaacccttcctccaattcaccggttctaaccatctgacgcaaatggttattactctcgacatcttccaacgcaaaagacgaattcacagagctataatgaccatttccgttactattgctatacccagaggacaaagtttcgaacttttgagctctaccattaagacctgaactctcaaccttagaagccgcagaaaccagaacaagtcgattcctttttcgtgacccaagagggattttagaactaatactaccagaagtacgacatgagacgtcaagcttattacctcgtttatattcgcgatgaaattgttgaatcaagcaaaacccttcttgagcactgcttgtggacaccatcaaatccatagaggtatatcaatgaatcttcccccacaaaactaaaagccaaagttcgaaagtagacaaattaaactaaagttttaagacatctaataagaaattttcgagtgagagaaggaagaagaagaagaagaagaacagaggaggcgggtttaagccagtgagcgaaaggatatggcactgttttgtcttttttggagctttgtgaactttgggccttaaatttggttttgggctttcactcaaataattatatttgttgtagtaaaatttccactttcttttcagcccaaatacagtatatataaaacgaacaacctaaaaagtttgttcgagtgatttctttttttttggaacaatgtccaaagttttttttgttgttgacgtaagtgaaagctttgaaagacacaaatgtcgtcgtaacactaacaaccgaactgttttaacgacaaagtcaagatatactccactatatcctattctttatctctcgtccaaggcaacataagttctccaaatcggatctttatatatagaaaaacatgtaacatttactttgagcttaagaccaaaacccacaagacattttttcccaaaatg

SEQ ID NO: 7220 - DNA, 3000 bp, Unknown; identical to SEQ ID NO: 7216
  misc_feature (1)..( 3000): cDNA_ID_2990081_gDNA_ID_1621133_Annot_ID_172559 3000 nt of promoter + ATG

SEQ ID NO: 7221 - DNA, 3000 bp, Unknown; identical to SEQ ID NO: 7215
  misc_feature (1)..( 3000): cDNA_ID_1817019_gDNA_ID_1621133_Annot_ID_172558 3000 nt of promoter + ATG

SEQ ID NO: 7222 - DNA, 3000 bp, Unknown
  misc_feature (1)..( 3000): cDNA_ID_3050051_gDNA_ID_1621133_Annot_ID_172554 3000 nt of promoter + ATG
ggtgttgaattttgtggacaaaattgtctttcattgctaggttatgaccaatgacactgctcataactatacatgtatagctctgccgtaatataacaacatcaataacatttttatcatgtatatcgaacatgattttttgtgaatagtgatcaaaattatattttatatgttcacatgttcttattacgaacttagctagatttcatcaaataaacgttaggagtttcacgagagtttaatcatatgaatccctttcaccaataattgtggattaataattgagaatagctctaacaataaacgccatttgatatcatcgtgtatgtaagaaaactaaatagagttttagtaaaaaatagtggaaccttataagttaggtgaaaatctaaatctctaacaactgctttttcagcaattcgaaaattatgccaaaaagtttaacacatgcatctagttggcaatgatgtcccaaatctatcgcaatcgagtgaatttctcaaaacaaaataattatacgcaaaacaattattcaaaggaaagaaaatagcttagctagctgcggcaaaagcggagagacctctgacctatagataagactatataaccatgcacatgagacgaatgtctaaactcacacagcgttttgttttgttcttggtattacggttaaaacaatagaaaacactcttgttactagaaacgtttgatacaattgtgaattgtgatatgctggtactgtatcatatatgctactataactggagttggtgaataaaattcgttttaataattaattagggacctaattatttaaaaagaaaatttggcatttagagaatagtggaggcttaggtgaacttacagcaaagcaaaattcaaaagtaggaatgattttaatgtagaaaatagaagagaattggggattttgccttttgtgactcattgtcacagatcattcatgacaaaaaaaaaaaaaaaaaggccatcatgtcatgtgactgctcttcttctattcactctttagctttttcttttgcatttgctgtctttatttgaaccatttcttcttttatttctttctctttttgtaagtcctaaaggaatttctccaaccagaccgactctgtgatggatacaacaaatttggctatatttatgaaggtgcagacatgaacataagactacataactgtataattgttgttgttttcattagcaaaacacaactcaataaaaatataaccggagagtaatggtaaaatacaagaaagaatgcatctcttcttccacgaaactaatgcaggaacttctgaatgcatgctatcatataataatagaatctcgtatgcgtcgaaccatatacatacttaattaaattatatgtatatatattaatatatatagggaattgttcctgcattagtgatatgtttagattttagttgtcaagtattttataaatgtagctttaagagttttttacattttttgcttttttcgcaaattcggatcaagatatctctgatacggattaaattgtcagaacccacacgcatcgggatttgaaactaatacacatattagaaatattaaatagcacttaattagactagagtccgtaaaaataaatttgtgtgagtaatgaactttttagtcaaagttctaaattttgctgtcttccttttttgactataacttttctagcgtcgcgaatccctaaactctcattaaaaagaaaaaaaaaatcgaaagctaatggaaaaaaagaatagacctagctactggctactgtcattcatgactgctgttgttcagtttttactctatgtatatgaacaatcgccaaatttgtagctttgcgtttgcgaggtcatggaattaaacctggcgtctatatatacatgcatgcacatggttaactggtttgtatcatatggcatcaaatgacttacgtactactatctcggccttttttggttggggtttgcttgaatacataatggataattatagtcttaatattgaccgggcctttgaggcccaaaccatgaacatctgaatccaacggtgaagatttcctcctgaaaggaaaagttataagataatcttagccgtcggaagcttctctttttctgtgagggttcggtttggtcgtcgtcgcaactcccccacttgtgaattccaaagtacacttaacacatacacaacctcttcaagcggtttcccctgtttggttttacggcggctctaaacccgttttctcaggtttgcttcttatcagcccgctttctgtttccaactaatcattgatctgtttagttcttggacaattctgagtcccatatgctccgaattgtttttttcttcttcttcagaattctctgttttgtcattaagattggaactgttagtttccattgtaaactgtgttatgttttggaaactttatggtgaagtaaaagggcatgttttgacagtatttgttcatgttgagttctgtccaagtagagatattagaactcagagtttttgtctttattggaattgctcgttgagtatctcccggcgtcatgttttcccttgtaacgttaactcatgggaatgaattatccgttttgcttcagaaatcctataattctgcagaaagttgttctgttagggtccttagttctgtaatctctatcactgggaacagtttatatcttttccatttgactaaagttactaaaattgtgcatatcctgcgatttagcgttgttctttctggggagagaccataattctgactgcccttttgttttgtattattgcatcagactctaacccaaagcgtagaactttagtagttatctcttttgtggtcttttaccgaggaagtgatgaatctaaatggctgtttattgctgactaccataaacagattagttgattctccatactaacctttttcttttgttccctttcaatggttgcagtgtatcttcaaaattgataatg

SEQ ID NO: 7223 - DNA, 3000 bp, Unknown
  misc_feature (1)..( 3000): cDNA_ID_3050054_gDNA_ID_1621133_Annot_ID_172553 3000 nt of promoter + ATG
ctggattgtatccttaaatgctagcgcattttttgttctgtacttctttacttgattgagtttttattaagacaatgcttttgtgattgatttcaaattccttgttatatcaattagtgtttgccccttaatattaactctagctgaggctacttttgcgcaaacagtaccagctcttgattctacaacaaagaaacaggatgaggtatttacaatcttattagccacatactcaatctgctgctagcaaagaatgcttttacataaagtttggttatcttttcagtctcctccaaagagtaccccgtctcttactgtcactgcttgtgctaatggtaagacagattattaagggtttggttcttatcaaccacctaaaataagtctgctattttcttattattcttgatagatttttaaatttctatttgcataatctgttattatggctcagtagtgaatgatctatatataggtattttcttaagtgattgttgcttgtgatgcattttgcaggatctgatgtagtatcttctcagccaaatgacaatggccaagcacatactacagattttcgaaaggtttgattttgtccatttgcttttatagatctgatgtaatttctttgttttgacatgctatcatgtttggcgctgggtcattttcatagggaaatcaccgtgacaaaaacagctcagatgtctatgctgattcgactttgcgtggagatcgaccaaaaggaagcaattgtttgtctcaaacttctttttcggctcctaagcctcttggaaatttcaatggtgctggtagacttcctcccaatacacaagcacatgcattcagaccaccatttaaggtaccttacacatatctatttataaatagttgaagtcaagatttttgcatgacaatatcttacttaaggtttcctcttaatgtaaaaggtttgattaaaattgattctatttgcctttttaaagggaaaggaagccgcaggacagttcttaacattctccaatcagaagacaagctgtgtcccatattctggttacattaatggaaactcaaataatggtttctgggatcaaagggatcataataagaaacctgagagaaatggagagtctgactacttggttgaattgaaatgtggtccgagagccaatgcaaagactcgtcctccttccgagtcgtcaccactgaagcaaaacaattcgtttgccttggctcttcgtagagagatgtataacctccctgactttcagactgactatgaagatgccaagtttttcgtaatcaagtcgtacagcgaagatgatgttcacaagagtatcaaatattctgtgtggtcaagcactatcaacggaaacaagaaactcgatgcagctttccgtgatgctgaaacaaaaacactcgaggatggcaagaaacgtccaatatttctcttcttctcggtgagtgaacttgagatgtgtcttcttttcttgtatggctaagggtgttttgttagtctcatgtttgatgtcttacccgtcctttatacaggtgaatgcgagtagacaatttgtgggattagctgagatggttggatatgtggacttcaacaaggatttggatttctggcaggttgataagtggagtggctttttccctgttgaatggcatgtggttaaagatattcctaactgggaactacgccatatcatcctcgacaacaatgaggacaagccagttactcatacgagagatactcacgagatcaaactcaaagaaggtctccaaatgctttcgatattcaagaagtactctgcggtaacatttttgttagacgacatggacttctacgaagagcgagagaagtctcttcgagcgaagaaggagcataaaccagccactcttcgcatggatctcttcaaagagaaagactatgacgtaagatgctcacgaccttgactaacttgagttcatcttctctatatatactacaactttgtgtttttatctaaaccccgagttttgtgtttattgaatcagtatgagatggaaggcaacaggagaatgaatcaccaagaaagaggatataattggaacagaagtagcaatagcaaaacacaagcatctcttgtcaatcaaaccaagtatctttccataagaggctactctggttacaagaagaacactggcaattcaacatgagatgacattcgtcaatctttaattcctcgtcttctttattttattcattcatgaattgctttagtcagttcaggaatcattagggtttttttttcttccgttgttagggtttggtttctattttttctatttcatattcagatgtctttaggcccacggattcattttcacgatctcaatgataaatcacttttcagatacagcgaggaaattagggtaaagtaaacaaatcatgatcattagaagaagatgcacacaaatgtgttcggaattttctcagaaactaagcaaactgttctttgctctttcataagttttggtttttgtcccacatcgacaagtagaagagaacgtctcccaagtctgataatatataaaggaagctgggtctcactttcaaatcatacctttctcggccttttggctaagatcaagtgtagtatctgttcttatcagtttaatatctgatatgtgggccatcggcccacacgatattaactctatttttaaagggagaaagcccactaagatagcttgctatctgggctttcgcgagtcgcccatgcgttgcactactgcacgggcttggctcatcccatcaacaaatagttaaaatcattcataattagtgaatatattaatctgaaaaaatatgattggagagcataccaaatgaaagctaaaccgaaatttgattaatcgagcatccatccaaacgacaccatatttcttaaaccctctagacattggcactgagcttgagacggtgtgagatatcataaatcagtgagtgagtgagtcatg

SEQ ID NO: 7224 - DNA, 3000 bp, Unknown; identical to SEQ ID NO: 7210
  misc_feature (1)..( 3000): cDNA_ID_1664727_gDNA_ID_1621133_Annot_ID_172550 3000 nt of promoter + ATG

SEQ ID NO: 7225 - DNA, 3000 bp, Unknown; identical to SEQ ID NO: 7209
  misc_feature (1)..( 3000): cDNA_ID_1817045_gDNA_ID_1621133_Annot_ID_172549 3000 nt of promoter + ATG

SEQ ID NO: 7226 - DNA, 3000 bp, Unknown; identical to SEQ ID NO: 7208
  misc_feature (1)..( 3000): cDNA_ID_1807189_gDNA_ID_1621133_Annot_ID_172548 3000 nt of promoter + ATG

SEQ ID NO: 7227 - DNA, 3000 bp, Unknown
  misc_feature (1)..( 3000): cDNA_ID_2123944_gDNA_ID_1621133_Annot_ID_172575 3000 nt of promoter + ATG
tcattgaccaaacaaagattcgtcgattgatagttacggtatggttaaaattatcaataaagatcaatctcttaatatatagtttcacatcatgcaatcaaattttctttcaccgtggactcgtgagagagaaaaaaaaagaagaagctgtggttacttatttgtacagtctaaatttttttttcatatattaaatgatccatgcgtacgttaaaatttgtcccaaaaaaaaaatgtcataatcttttttatttattaatataaataattttttatcgcgccttatcgtcggtaaatatatacgttttatttgatttttgttttaagccctaagattttcaggataatataaaccaagatgattagagccaaatgagaaaactgctctggcttaatttttttctttaaaatcactgaactaggttttggttgtgtaattcattgaaattttttcatatctgtccgaattgttatcatggttgtggatctttctttttagtatatagcctaagagtaatctattatagtaattctagttttacgcttaattagaccatctatatatattatttctagttacgtcacctaatcataaaagactctacaacagcaagctagggaaacacagtagcaaagaaagttttttcttactgattttcaaaggtttgaaacacatgtgtttgtttggactcactagtgtcttctggcgtggaatcaattatttatgtctccacctaatcagaatatgacaaatgaatactcgcaacataaacataaaaataacgctctaatgataattctttttttttattgttttatgtcggaaaaagaagagtccaccgagaaaaagagccctcaaacaaatttgaacatggcaattatggagcggcagaatttaattattagtcctatagtcgatatattattgcattacctaatgtgtacacacacaatataaggttggttaatttggtaatcaaactaaagatttagaatgaaaatttccttttaaaaaaatagccatttgttttgttttaagataagagctaagacatataactacttcctaattaactttggaaaaaagtatattgtcgcaagttgcaactcttgtgccataaaaagcaagtgttcaacacatgtttatagtgatgcctcatcaacagctcaattaaattgaaacgtaagtataatacacaatcatctacatatttttgcagacattttagcaaataaatcgtagagttgaacttatttacaactcaatgtcattagcattaaatcttttttccaaaataattcattttactttaaattcttaatttaaattgtcaatcacattatcaatcaaatttaatccaaacaaacttcccatcaatcctttaaaattagcataaacgtatttgttaacaatatttaaaacaaagtttttgtttaaataaatattattcttactaaacgttttttgtttaaataaataaatcctgtatttgaacttatttacaatttcatgctactggcattaattatttaggaatgaaaatatttaattaaagatttaaatcttctaaatccttgcttttagatttattatgtcattacctaaaaggcaaaaactattagttttttaaatattattatttatattttaaatttttttaacattactaatatttaaacttataaaaagtttaatatatcaaaaaatcttaacatcattatataatatatagagtttttaaaaatctcaaatttttttccgtcatattttgtgattcaaaatttaaaaaatgaacatatattaaccaattggcgaaaaatatgtgagttcaacgtcccattttgactaaaatatttagagaatgattcataaacatatcataaataagatcaacattaacaaaataaatggtttttttttttgcgggacgagtttggcaggacgttacttaataacaattgtaaactataaaataaaaatattttatagatagatataatatataaatttttatatatattaacttaaaaaaataaattgtcctgcggtatactgcagattaaaatgtatattaatacttacgacggacgtgtacaaaatattatatagccccaaaaatagcgctgcatataaaaaccacatctacctaagcctaccatgtagtgtagttgcatataagacaactataaattaataatgtagtttaatattttttttggattggtttctttgtttttggttaagtttttttttcttgggggtataatgattttagttaagttttgtttaagtttcctcaatgacaaaggtacaatttcggcgttacgtctagtctaaaataatctattaacaaaagaatgtacttaattagtcaatactctactcaatagtaggatatcgtttcagttttgtatgtggatttttttttaaatttttgaaaaattctattcaatttcaataaaaaatttctgaggatagtcaatgaaaaccaaaaaagccataataataataattataaagtaatatatcaaaacgctcatataatattccacatacatttactgtataatcagaaaactaaatagtatagttatcaagggtccctcttaataaaaccaatattattcaactaagatatactttatttatttggagataatttaattttcgtaagcaccatataaaaaaacaatgacgcaaattattattttgtttatgtgataaataaagaaatataaaacgagagaaaacaaaaagagtgagtgatagtgattacaaaggtaagccaaaatttgaatatttaatggataccaccagataagaagaactttgcttcaaagcggcaaagcttaagcttttttctcgcgcccgcctctctctctctctctctctctctctctctctctctctctctctcttctcctctaaccaaatttcccgatgtgaaaaaacaagtttccgatcaactcaaaccaccgtcaccacttcttctctccgac

SEQ ID NO: 7228 - DNA, 3000 bp, Unknown
  misc_feature (1)..( 3000): cDNA_ID_1816988_gDNA_ID_1621133_Annot_ID_172571 3000 nt of promoter + ATG
aattttcttagtaaagaagaaaagatggctcgcggcataactggagcatttatgaactgttggtttatttggtttctattttgtaaggacatgttcctttcctgacatatgtcatcttctttacatgacgtgtgccttcttattttaccaacatgtgtcggtttcctcttcagatgttattttaggtcattccataatatcgagatgcgaccctgacagatatataattccaactggaactagtagtgatagatacaatttcagatataaacattttaattataaaacagactaaatattttaaagatttttaatgaacacttgttttaaaaaaaaaaaaaaattctctaggttatagtctttctttttgtcgattctataggttataatcaataattaccaaggataatttatattttattttcatccatattaaaattttatactattgtttaacccaacttgattctaaaaccagagttgaataacaacagcaaatgatgataagacgctgctctgattacacttcactccgacaagacaaaagtcacaaaaatccatttcgcccgccgacacatcgtcgatagaccgacatatcgtaaattaattcctaaaagatttttcttggtcaagcccaatgtagtagtatataaacattcttgcacaacgtacactcacagtccatacttacttagtgagtactccaaacataagaaacatgccaaacactagcagctctcaaagcttcactatcttcgttgatggttggttaatccgtcacaggtatttcgttgaacagcttatgtgtgcttcttccttggatgaaactaatcgtatctctctcgaagaacaacaatctctcgtggcccagtttctatctcactgtcttcaatactaccaagagaaattcgcctccgtttccctcgccggggacaacgttttcactttcttctgcccaccgtggtttaactcctacgctaaacttattttatgggtcggcgatttcaagccttctcttgtgtttaaactcaccgaggtctccgtggccgacctcacgcgccaccagaaagaccggatctcgagtcttaagtcggagactaggaggaaagagagagaagttatgcgagatttcgccctcgtgcaacaaagcgtggcggatccgccggtgatgctcgcggcgaggcgcgtgggagcggtgggaatggtggacggagaagaaacggatttggaggaggcgatggaggtgcttaaagctgggatggcggcagcgatgaacaacgctgatcagctacggtgttcgacggtggggaaagtggtggagattcttactccgccgcaagcgattaaagtgttgaggacaatcggacagcttcacctccgtctgagagacagagaccaagaaagagcttaaaaaaaaagatacttaatttgctttgctctgcttcttcaacaacgatggagtcatcactaatttttgtttttcgggctcaaccacttgatcctgagatttagatttccttttggtgatttatgatttttaaaagatttgagaattgggcttttttgtttgtagtgatatgatgtcatgttttttatttttggcttctcgtttcttccttaaatcagttcttactaaatctcatcagttacttttacaatcagaccaaaaaatgtcaaaagtacacagtacttgctttcaaaatcctacgtagcttatgatgtggtcgccatgtcatttatagtactttactaacttgctgacatgtaattgttgaaaaaatattacttttattccatttatcaacacaaaactgggcttaaagcattgggccaacaacagtgaacaacgggatacaaaaagagttcgtagttctgcaaatcgaatacaggaggtccaatatttcaaaagatgcatatttttcttggctaaattggtcaatgttattgttaggcatggcgttgactttagaggcttcctagagattgccagatgagggagtaaaagtcagctttgatgggctttttcatacgtgataagcctaagaatataaacaaacaatgctctaactgaagaatggattgaactatttttaatccaagtctagtttacatacacaaaggtattgtatgttgacatgttgtaatagattcgaattttccacaagtctatctacattgtggtttgagtcattattcatttattccttccaatttagtgaaacttaaatgattatctgaaaacaataaatgattatatatactaaaaaaaaaaaacatatcgctgctactaattttaaacaattacagaaagaaggaagaaaaagaacaattatgcaaacaaatgtcaactggttatatcatgtcgttgtttaaatattataactatattattctcaaaccaaggtattgaacaaacgttatgtcaatgcaatcaaattactcaaacgttaagcataataaacaaaacttgttttttcttttcttttcttttcttcttcttcacgtcatgaattgtgtcctaaatagaagttaagcctctcagatttttttcccggatgataatgtgtagtatttacacgtatagatttttcaattttattgtctcatacaaagattaagattataaaaaacttggcgttgaggaataaaaaataaaaacgtgttcaccacccgccgatttagataccgttttcacatacataattagaatttttccgtccaaattgtttttggtcaaagcctcaatggtcttgaattgacctgttcttaaaacccgacccggatccacctgcttctttcaactaacacacgctcctgatccaaaccattttttcatttttcaaatcattatcaactctctcgcttcttcaacgatcgcataaattccctctttgtctgctcgattcctgatctctagggtttgggttccggagacgaagggggtgtttcgtgtgtaattgagatattgagattattgctttgtaaaactcaaaatctatg

SEQ ID NO: 7229 - DNA, 3000 bp, Unknown
  misc_feature (1)..( 3000): cDNA_ID_3050027_gDNA_ID_1621133_Annot_ID_172570 3000 nt of promoter + ATG
gagtcaaagaagtgactgagtggatgtctaaggtgtttctctttcccatgcttaatctcagtcactagaatgatcttcttcttatgtctgagtaacttctttactggttgatgttttgggcatttctcattctcttgcaaatgttcttatcactaatggtaaatgctgacatatgttatttattttgtcagacaagtggaatcccggtttcagaaatctgtcagcatcgttttctattgtacaacaaggatgtcacgcaacatatatttgaagtctcagctggtctagactctcttgtcctaggtgaaggtcagatacttgcacaggttaaacaagttgttaaagtaggtcaaggagtcaatggttttgggaggaatatcagtgggctatttaaacacgcaatcacagttggaaagcgtgtcagaacagagacaaatatcgctgctggggctgtttccgttagctcggctgcagttgaacttgctctcatgaagcttcccgaatcttctcatgcatcatctgctaggatgttggtagttggtgctggaaagatggggaagcttgtaatcaagcacttggttgctaaaggttgcaccaaaatggtggttgtgaatcgaagcgaagagaaagttgcagctgtccgcaatgagatgccgcctggcgttgagattatttataaaccccttgatgagatgctgtcttgtgctgcagaagctgatgtagtctttactagcacagcatctgagacaccattattcttgaaggagcaagtagagactctccctcctgttagagatgcgaggctctttgttgatatctctgttcctagaaatgtcgggtcctgcgtcgctgaaatagacggtacacgggttttcaacgtggatgacctcaaggaagtcgttgctgcgaataaagaagacagggtgaggaaagcaatggacgctcaggctataattacagatgaatcaaaacactttgaagcgtggagggactcgttggagacggttccaacaatcaagaaattaaggggatatacagagagaattatagctgcagagattgagaaatccttgcccaaaatgggcattgacatgaacaagaagatgaggaaaacagtagatgatctaatccgaggtatagtgaacaagctcctgcacggtccaatgcagcatttgagatgcgatgggaacgatagcagaacgctgagtgagacactagataacatgcaggctctgaacaggatgtatggacttgatgcagagatactcgaggagaagattagagcaaaggtggaaaaaaagtagagagaagagagcctttgtttcatccattttttaggttcgtagaggttaaaaaccggcacctttgtaatatacacacttgagtagagggtgaagacagcctctggggaagatgatcttctggttcatgcccttgatgggaagcataccataattgttttattgcgttcttttgttaaagttaaaagtttaaaactttgtacacataatatatatacatttttttttccctaattaacatttgcgttcgaaacagtgataaccattattggagaagcaaacaaaaaggctttgaagatttttttatttttaaaataaaataaaatatacaactatcttgatgtgatgtttggttgagaaataaagccttgacgtaaaatttcggtttccttcatatttttgcattgattactctatgtaagtaaattgataatccgtctttcacaatcaaaccattccatcataaaaaaaattacaacaacattgcaacgtttttgtttatgcaaattttcttgggatttttggtaactaaaatttgggagtttttgcatgaattcttagggtgaatcgatttttttttttgtaagcaaacgaacctaaacttgatcaacaaacagtacaaaaattctagaatattggtgttaattactcaattgctaatcataaaggtttctagatagatggtgttaattactcaattgctaatcataaaggtttctagatagatgtgtgagagaaatttctaactaaaatatttcgacatgtttttgacgacaactatcttcagttatatcaaagacggaaatgtaaagtttcaaagctaaacgagtaaagactaacgactaacgagtattaatttttccagttcaaggcaatatataatatattaacaaatttcttgtagtgcacgatgtcttttgtctctttcggtttttcattttctacatgcttcgatccgtatttggctctaagatccaatgttgaaaaattggatgaaaaataaaataaaatcaatttcttggtgatataaacaaaatagaatatatgataatatatttatattactatgcctcaacttgttacgagatactgaatttcatgatcatatggtttctttagatccatataccttttgtatatatggaacaaaccattcatatcgaccgtgattaaagagaaaaaaactctttaactatcgttttgttcttgttgttgtattaattcaaatgagtcttggggaattaattcctctgaatgataattagaatctaaaaccaaaaatataatacttggaaacaatcatttgaaattggtcgttgttatacattagtaagaccaagctaagaatgagtctgcagatcaaaaagtttgacttgtatttgcatgaaagtttacgtacaattcgacttcacctgtgtggtcttgattatttcccagtatataaaggagacaaagagagcccatcattttgcctatcaatatcatcactttacgataaccttgagatcaaagaagaccccttgagatattattttcctgctaaaagctctttttaataggtttgatattgcaattctaatctttctagctagtgtaattactgttctcgataatatgttgtctgcctatatcatatttacaatgaaattattagttgtttcttaaagaaaatattaataatataatgtgtagagaaatg

SEQ ID NO: 7230 - DNA, 3000 bp, Unknown; identical to SEQ ID NO: 7218
  misc_feature (1)..( 3000): cDNA_ID_3050035_gDNA_ID_1621133_Annot_ID_172566 3000 nt of promoter + ATG

SEQ ID NO: 7231 - DNA, 3000 bp, Unknown; identical to SEQ ID NO: 7207
  misc_feature (1)..( 3000): cDNA_ID_1010209_gDNA_ID_1621133_Annot_ID_172547 3000 nt of promoter + ATG

SEQ ID NO: 7232 - DNA, 3000 bp, Unknown; identical to SEQ ID NO: 7206
  misc_feature (1)..( 3000): cDNA_ID_2123863_gDNA_ID_1621133_Annot_ID_172546 3000 nt of promoter + ATG

SEQ ID NO: 7233 - DNA, 3000 bp, Unknown
  misc_feature (1)..( 3000): cDNA_ID_3050062_gDNA_ID_1621133_Annot_ID_172545 3000 nt of promoter + ATG
cacctaattagcttgctgataatttttgttttgttttgaataaatgttgttatttcgattgaggggggatagtaaaatcttgaatacatttcctatgctgaggtaagttttgagagttgagagaagtcacgaggggacatggagtgtggtgtgaagtagccagtgaatcggtcaagagcttaaaggaatattgcatgtgaagtgaagtgtgatttggatagtgattaaaaaaaacaaaaccaaataattgtgctgccaaaaccaggacaaactataacagtctgttatttggtttcttctttcttttatttttgggttgggacaagtgaactatacatttcataatacgtcttgtttctcaagattcgcaatttaaattttgtagggtcttgatgttaaattttaacacttatcttggtacaatgctaagataaaaatcttggtgctctaatgaaaaagaacagtgtttaatatttttaagtccgtgactcgtgagcctcccttatcgtgttgacagtgacaaaccgacgatgcctctttcgtcatttactctcattgttcgttcacgagacctctgaaatacttacatctacaattgtcataatatttatatcctgaaaattgtcataatctttcttttaccttttgtcgctacagtagaatatacatttacatctacatccaactaaattccaagcaatttggataagttttgtttcaaagatttaagtgtagcagatattgcaattttttttttttggcccataatatggaaaaatgatcactaagggcaggccaaaagtcccaagaaaatcttggacctttaggcgaggcttgattgatcggttcagatttttcttacacgaattctttgtttctctcaactacttatccatgcctgcggtccaattaacatatcaacgagggtgagttagcccacattgtcaaccagttggctctgtaaatgtccttcatagtgatttgatgcaacaacattattcaattctcaaccgtataaaataaaacaacgaatatgaatacaacacatacactgagccaatcaatgtttctgtagctcttattaatttacattcacaccacttatttgggaagtaatctggtagaattcttgcttggcttctatagcttcacaaaacttcaaaagattacagatggtcttgatatccctttgcatatgtacatatatatcctgagaagtgaagatggtttgatactcggttacataggctacttgtaccaaaagagagtagtaaactttattgaggttggtttggatatgaaaagtagatcatgtgggttctgattgatgacttaacaaacttttgcatggtgaacatcgaatgaagtgacttgcaagaagctaaacttgtttacctctttatgcagaagaatcctcttttggtttgattatcacaacaggacaatgggcgtggttggtgcagtagttgcttacacttcccagaaacattctgttgaaagaaagaacaaactggattcaacactggcatttgctcactaaataagatttaactcactaaagaacacacagtgacagtgatatggtataaacattttcaaagggataaagattcctcgaagcactacttggtggttgagcagagatttgtcttcacacaagttcaaagattaactaaacatttcttctgttatttgaccgcacgagttgaaaaaaataacagtagatatctatatgccatttcaagcgaaagcgaaacaatcttaaactagagtaaaccgatatggaacaactaattcagcatagtaaccaagatcaaacgcctggaatttgatttacagcgctttcatcagtgttcaacatagcaagatactagagtactggaagaagagtttggtacctcttaatgcggccataagcccgggagcccatgacaagaagatcagcatgcaaattctctacagcttcgcagattttatacttgggatccccaataaccacttgtgttttcacattcacctgagagtaaaccatcacaacttggtcatgaatgaccaccctcaaatcaatatacacttctatagataacacataagtaattgctccagattctaatccatcagtgaaagagaaatattctaatccataaaacttatagaattacactactagatctggactatgaggtaaaatatcccattctcacaggggacacaagggaaataactctactcacagatttttcagcacaaatttgactagcgtgttcgaggatggtgtcggtgatccgcttctggtgttgctcgattgcagcagtgaaagcaggaacctcaagaccaccttaatcgcaaaattcccagagtcaaacaccacatggtcgagatcatatatacattaaacaatcacaaaattagtagtaacgagactcaactgggaccaccgaaaggtatggtgccgggactcacgccggcggctacagaaggcgacggctggacgtggagcacgacgaatgatgaatcggaagaagacgaagagagcttgaggttgtctagagcccacctcagagcttccatactcacctcgcttccatctaccgccacaacaacgcaattcaagcttcctgaaacatccatgacttcttcaatctctcttctctgtgctaaggctttctgtgattttcttcaactcttggaaagttcaagaggacgatggctttcacgtctcccatttttaaattcgcggcttacaaaagggtatacctgtcattccatagccgaattatgtaatgaaaatattaaattatttacgtactattataaatagagtaaacttacgtccgcgcgtgagtttcagacgcgctggcattcgttgttgacttatttcgtttagacgtttctctctctccttctccctcactcgaccccctcgatttctgatcgccgatctccggcttggattctccgttttccggtggggcttttcctcagatttccctagcgatg

SEQ ID NO: 7234 - DNA, 3000 bp, Unknown; identical to SEQ ID NO: 7204
  misc_feature (1)..( 3000): cDNA_ID_1817060_gDNA_ID_1621133_Annot_ID_172542 3000 nt of promoter + ATG

SEQ ID NO: 7235 - DNA, 3000 bp, Unknown; identical to SEQ ID NO: 7203
  misc_feature (1)..( 3000): cDNA_ID_3013398_gDNA_ID_1621133_Annot_ID_172541 3000 nt of promoter + ATG

SEQ ID NO: 7236 - DNA, 3000 bp, Unknown
  misc_feature (1)..( 3000): cDNA_ID_1028131_gDNA_ID_1621133_Annot_ID_172537 3000 nt of promoter + ATG
agaatgaagtgttatttattacaaaggtgaaagttattgaatcagtgaagaaatcatattttgttaacgactacaaagaaataagccaagtcatcgttttcaactcttacatctttagccatttatgtacatctggacccatttgtttgttctgttaacgacaaccaaaagggaaaccgacaactgaaaaatgtcgcaatattagattagggatgatgagtaagctaaggtaccttttgtcgcctaacgttaagcccaccttgtcagaaacagactctaaagcttccttccatttcttgatttgttctccactcgaagtcttagccaacctccagaagttgcgaccaaactcagccttttgatatctaacagactctgccttcactttaaagaagataggaaccactcgtagcttgcatttatcggctcttttcttgatccttgcaagctcgtccaggcaccagcttgactctgcgtatcttttggaaaatatggtgagagccatcctcgattgcttgatccttgcaaagagatgtttgaggtctttccctttttgttcgtctttgtctatgaagaagttgattccatgtcttttaaaagcgtcaacgaggtggctcacaaagctgcagcgtagctcctctccccggaaattgatgaacacttggatcttcctattactactactccttttcatgttgtttaatttcctttagttgtgagcgtgagcaatgaagagaagttggttagactttgttccactcttatacaattttgtttggacagaagacaagttttgtaatgtaatatggaacaatggttactaagatgtttagcaagagcttaatttatagtatatgatattgggatttgggagggtttaggtacattgttaatgttaggtttatcgatattactggagggaaggcgtcgttaggaactttgtcattaactttcttgagttaacatgcgtaaatgcagtggcggacccagaatttgattattccaaaaattggacagaggaggaagaaaagtcacaatcccaaacagttaatacaagatcgtagaaaagcgtttttggcgcacgtgcgcggagagagaaagcagaagcagacctcacttttctttttttcttggttttttcttgtctctggatcctcattgttgttctcaccaccacctactagctactacccacatttttccccaatgtcgaacttctatccgttttcttctttggttttaggtctttctttttggtagttgtactacaacatgtatacttttaatttgcagcaaacatgaaacttctcctttgtcagcactcagccttacggaacaacatgtacccctaaacaaaactctacatgacctaggggatttgaaacatcccaagaaatggatttttttttttttttttttttttgggctgtgattgttaatgaaaacctttttatgtatacatttgataaagtaaatactacatatattctagtagaataataccatttacctaatatactgaaatttcttgggatgtttcaaatcccctaggtcatgtagaattttgtttagggttacatgttgttccgtaaggctgagtgctgacaaaggagaagtttcatgttggctgcaaattaaaagtatacatgtgtagaacagctaacaaacagaaagcatagaaagaagggaaccctaggataaagaattaaaaaggggaacaaagatttatgctgtttcttctttatttctcattggcaaaacggcagaatcttcattaagttgcgttttattattttttccatttcttatagtagccaacttccaactacaccatttaacccggccgtttttttttgttgctaagtaataggtaaatatcctattaatgaaaattatgatttacatgaacaatagctaagatttaggatacaaacaaggaagacgatcaaggatcttgaagatagaagtaggcgcaaatgtgttgtgaattatgcagcatcttatttctttgcttccaagttgtatataaatcacggcttgagtaactagcttccttagtgtatatgtgactgcatctatcatatacagtatgtgtgtaaactgcgtttggtgtaaaatgtaattataatttatagaaaataaattaaagtagtggaacatggaaatcaccgttcagatattctaactgattcactatagacggaattcttgttttcgtccattgtttttactttttagaatttttaagtaaaataaatcatccattacatcactgaggtgacatcatcgctcaggggacatcactaactacgttcccactaaaaatataggcaaatgcaatcaagtgaatgatgatgacctttcaagagttcgtagagataaataaaataataaatatttggcatgttgaggatcaaatgaattagatgcataagaaaggtactaggtagaccaggcccggcccaatgtgttttgttgtctaaagcaaaacaaaaaaaattaagcccattaaagaatagttatattgcctcggaagggctcgaatccatcatcttcatttttttagtttacacggattggaagtaggctacaatgtccctgagggaaggtaggcccattattagtgacctgaagcccaataataatgaaaacgcaaagaaccttttaagaagaagatgacagaatctctagagaataaaaaactaaacacaaaaatagaaaatatcgaaaatgagatgagagagagaggaggagtctctcatcgtgagtagggcttttgactccctccctactttgcctacttcttcttcttcctctgtggccactctacacagtccacacctacttcaagacacctttctcatccttgagatcggcgtcagatcctccgccgcttctcctcttcactatctccggtcacaacttgtttttctctgtttttctttatctctactttatgcacaatctgactttctaagtggatttacagtgttaaagatg

SEQ ID NO: 7237 - DNA, 3000 bp, Unknown; identical to SEQ ID NO: 7201
  misc_feature (1)..( 3000): cDNA_ID_3050073_gDNA_ID_1621133_Annot_ID_172533 3000 nt of promoter + ATG

SEQ ID NO: 7238 - DNA, 3000 bp, Unknown; identical to SEQ ID NO: 7200
  misc_feature (1)..( 3000): cDNA_ID_1028612_gDNA_ID_1621133_Annot_ID_172532 3000 nt of promoter + ATG

SEQ ID NO: 7239 - DNA, 3000 bp, Unknown; identical to SEQ ID NO: 7228
  misc_feature (1)..( 3000): cDNA_ID_1816988_gDNA_ID_1621133_Annot_ID_56514 3000 nt of promoter + ATG

SEQ ID NO: 7240 - DNA, 3000 bp, Unknown
  misc_feature (1)..( 3000): cDNA_ID_1816980_gDNA_ID_1621133_Annot_ID_56516 3000 nt of promoter + ATG
tcgccgacccataaaataagtttagcgtaggagttaaaccacggtgggcagaagaaagtgaaaacgttgtccccggcgagggaaacggaggcgaatttctcttggtagtattgaagacagtgagatagaaactgggccacgagagattgttgttcttcgagagagatacgattagtttcatccaaggaagaagcacacataagctgttcaacgaaatacctgtgacggattaaccaaccatcaacgaagatagtgaagctttgagagctgctagtgtttggcatgtttcttatgtttggagtactcactaagtaagtatggactgtgagtgtacgttgtgcaagaatgtttatatactactacattgggcttgaccaagaaaaatcttttaggaattaatttacgatatgtcggtctatcgacgatgtgtcggcgggcgaaatggatttttgtgacttttgtcttgtcggagtgaagtgtaatcagagcagcgtcttatcatcatttgctgttgttattcaactctggttttagaatcaagttgggttaaacaatagtataaaattttaatatggatgaaaataaaatataaattatccttggtaattattgattataacctatagaatcgacaaaaagaaagactataacctagagaatttttttttttttttaaaacaagtgttcattaaaaatctttaaaatatttagtctgttttataattaaaatgtttatatctgaaattgtatctatcactactagttccagttggaattatatatctgtcagggtcgcatctcgatattatggaatgacctaaaataacatctgaagaggaaaccgacacatgttggtaaaataagaaggcacacgtcatgtaaagaagatgacatatgtcaggaaaggaacatgtccttacaaaatagaaaccaaataaaccaacagttcataaatgctccagttatgccgcgagccatcttttcttctttactaagaaaatttctacattattttaagatttttcttttccatgtagttgtctcatacttccttcgaaaagatctttctctaacttcaaccttggggatcgagcaaccatatttcaatcaacagattctttcatcactctaataacggacaaaaaaagaaaagatgtcaaaaaaaaaaaaattggaatatgcacgttgatactataagttcatttaaatcagtcgttagagtaaaccttattgagagttcaaattcatttaaaaacctgatgagataattatataatttcttataagatttttttttcttgtaagaatttaacgaatagaatttttctctctattacttaaaattcctcctcgtcaaaaattgcaaatgcttggcagttttaccattttctcagaactaccgtatgagaaataaagtacgtattaaaaaacaatacaagctttaaagataaaagaggcaacaaatttttttgacaaaaaaattagatgaaaagaagtgacgacaaataactgagaaaacacgttttgcaaaactaaaaaaaaaaaaaaaaagagagagttggaaaatgtttggagctggtgggcattagttggctatgcaacgcacggacgcggatacttttcaactcgttgcttacgcggccacgttttcgtcacaaaccgtgtttcttttgcggccttttaagttttaatcaaacatttttgttttcatttgaatcttttttttaaggcggttatacgaataaaatcattaaaaggagaaacgggccttcatgtttaggtttttgttcttcctcatttgggttatttagcttattggttcagcccacaagagtttccttcaatggatagggccttcagttgcatgccatcatcctttcttgtttctctataagccatttttgcaatgagaatttctcaatttcttatttttgcaataaaatcattttgccttagatgatggtggaatcatccgtttttctttattttgacccggtgagtaattgaacgcaaaaaatagtccaattattcaaaaccttacaatttcatatcgccataataaacctaaacatgattcgagtgagcaactacataaaaaggggaacgaaatgttggtacaaaactgaattccaacccaatcaagtgcatactaaactattgagcaaaaacaaagataaaaatcagttcacctaccctaattaaaacatgattaggcctaaaagactataagtaaagataaaaaagatgccattttagagtacgttttggtaaattggcgccatcgtgttatacgtttaaaccgtataacctgaatcatgcagcacgtgtacggctcacattggcccaagcttgattaacaaacaataacgtcattttcgtatttcaacaattttgatcgctcaatcctttcgacctaatttccatattaagtaatttattagttaaaacaacggactcaaccaaattacatattaagagaatatttgaaaattgtctatgtagatgaacatgtatttgaaaattgcgtaagcacactctttctctctctcttttttttttttttttttccccctcttctttctttgaataaagatgacatttttttctgttccaaacacaaaactgcatattgatagtgttattgaatactcaacgtctcttcttccagcttacgtaagtggaacttactttttgccccgtgatccaacagaaaatgacgaatgctccctcaaaatcatttcgtttcaacaaaaatatgtattttatccatagagaaacaacaaaccttacactatataccctcttttaacgtgcccacttttcattatttacacaatttccccaacaaatttaaaacaatttacaaaaagcactcaactttcctaaagtagattcctttagtccaatggaattcttacaacatcttcttcttcgccacctttttctctccactttaagctttttcactctctctacgccacgacgactgtgaagcgagaa

SEQ ID NO: 7241 - DNA, 3000 bp, Unknown; identical to SEQ ID NO: 7227
  misc_feature (1)..( 3000): cDNA_ID_1816976_gDNA_ID_1621133_Annot_ID_56517 3000 nt of promoter + ATG

SEQ ID NO: 7242 - DNA, 602 bp, Unknown
  misc_feature (1)..( 602): cDNA_ID_1816972_gDNA_ID_1621133_Annot_ID_56518 3000 nt of promoter + ATG
ttcaagttttcttgctgagttttctatatctcttaagttaatatatcaaccaacatgtttggtgcagtgatgcgagtaatggtaaaaatttgaccagtggcaatattcagtcttccaaaaaagtatgtgttcttagactcctttcagcattgcattttctgattcagcaaattgattattttgcattatgctcattcagagtctctacacatgatcgtatcattttcttctttaaacagtcgttcttttctcaggaagatgtaatttatgctagagttctattatactttagaatatttactttctggatgctagagctatcatacatcagtgtttcgatacgtgtttttataagtctatagaacccactagacttttcagtcttcttgacattgtttgtgtaaagctgcaaatagcatggtttcacagaacttattaagttctctgtttcgaagtaaattcttcccattttacaatacttttattgattgattgtttttgtaactcattaggcctttactcaaatcgcttctgctgacaagaagctggtgtcatttgtaaaagccttactcggagctcgtgacactttgcttgaagaaatg

SEQ ID NO: 7243 - DNA, 3000 bp, Unknown
  misc_feature (1)..( 3000): cDNA_ID_1817132_gDNA_ID_1621134_Annot_ID_56519 3000 nt of promoter + ATG
cctctgcacgtcttcaaaatgtaccaatgtctccatctttacgtataaatatgcaatttacgggcactaactatttcatcaccaaaacttaaaacctaaacacaatccaaaaatatttctaagttttcacataagagtgaaggagaaaaatttgaaatgagggcaatcacagcttcgtttttcattttctgcttccttgttccctctgttttcgggaagctccgacgtgggttttatgacagttcatgccctctcgctgaatctaccgtgtctagagttgttgccaaacatcactcccttaaccaaaccgttactgcagcgttgcttcgtatgcagtttcatgattgctttgtcaacgttcgtaagcttctcctttgtgtgtttgtatatgtatgcatgatgtatcataaactagctaattatattaaccaagcaaatattttgaatgctgcatgtgtagggttgtgatgcttccctcttgatcgactcaacgcccgaaaggccatctgagaaaagcgcggaggcaaacgtaagcgtgagaggcttcgagatcatcgatgaggttaagaaagagcttgagatagtttgcccaaaaacagtctcatgcgcagacattgtaactctagccacaaaagactcgattgcattagcgggtggtccacgtttcacagtacaaacaggataggtaatttccgtgatttatatcaagtcctagggctgtgattttgcccggaccactaatttccgtggctgtatcaatcaaagattttgaaggtaaaggtttgaatgtcaccaacatggttgcacttattggtggtggtcacagcgtcggtgttgcacattgcagtctttttcaggataggcttaaggatcctaaaatggacagcaaactgaaagctaagttacagaacacatgtcgtggtccaaatgacccatcagtggtcttggaccaaatgacgccacttgaggtagacaatcaaatctataaacagataaaaagtcaaagaggaatccttagaattgatcaaaacttgggtctcgatgactcaaccagtaggatcgtatcaaattttgcattaaatgaaacattattcggagaaagatttgctgaagcaatgcagataatgggtgaaataaaagttcttacgggaaattctggagagatcaggacaaactgcatagtcgtcagccactgaagatctctattctacatttggtggaactatgatcaaatctcgctagcttctacgtattcttcttcttcttctccataaacattttatttgtgattttcagttcggactacatattttcctttccattgctcatcttctttcgcttaatttcccgcctttttttgttttgaaaaatcaatgaatttcatttgatttatttatctacattgaccagtgtgttgcatattgtatgttattgttattttatgggattactcgccgtgttctattctgtgtattttttttatttttttttgtagatttggtagttgtttttataatatagttcctgattgtgataaattttagtttttattaatatggtcataagattagataatgtatatatgtggtgcaaccgaatttcaaaagatattgaatctttagagaccaacactctacacaatagatatatcaatcgagccgtgcatgtaggtttttggagtgatcgattacgatctcatcaacattttttggcaacgggagatccactccatgcacctacatacttataagttataagtttataaccaataatgcatgatgattttttttttccattgaatttttgttaaagtttgactgtatcatacaattgcttgttgtagtatttttaaaccatcatattgtagaatcatttataacttcattgtaaaaatagacatcaatttttgtaagtttcaatttttaaatattatcattttctatttcaataggctttataagcgaatttatttgcagtttttgttatacattgtcaaatgagtattttctcttcttaattgataacatccatcattatatgtaaatcaagttgtctccaatcatacgtttttaaaatattaataattaaaacaaatttatatttaataatttaaaaataaaattatattactataacttaataaaatatcataatatttaacattattattttatagagattttcctgtattattttattgatagtaaatatatgttttttcattgattcatattccgaacttttggtccataattacatatataatctttttttttttttctgaaaatctggaagttcagacacaaaggccctacctacatctccgagaggcgaaaccctcaccaggttaaattcatctcttttagagaagagatccttcccaacgtgcctcgaatccaacacctccacctgaaagatttactacatagacaatctttagtcgacttttgtttaaagaatccctcttcatcccaaaagagattgaaccgaggcacaagggaaccaacccttttatattaccactaggcactagaccaccatccctctggtgtttcatctaattgttaagtcaatactagcccttgtgccgtttgatacagtatggacattgttttggataagcaacaattttccaatgttactataacaaaatctttagtacaaatgcgaataatacttaagtaatagatagactcaggctcgtctttacgaagggaatcaatcaaaccattgtgtcgactaatccaaaacagaaaagtttacacgtaaacggatacatgatggaacggaacagaacgagaattatgcctattcctagtgtacacgtaagcgtcggcgtgtaattattaatttcataaaaagaatttcaaaatatgaattaattaataataaacaagttcgtcaaaaaaatcttcacccgccactgaaccatgaagaagaagatccttctctaattcctatcgccggatctgcaaaaacaaatcacaaatcaaatcaatg

SEQ ID NO: 7244 - DNA, 3000 bp, Unknown
  misc_feature (1)..( 3000): cDNA_ID_1817125_gDNA_ID_1621134_Annot_ID_56521 3000 nt of promoter + ATG
atctacttcacatgcattcaaatttatattcttttatgttagacaatgttataagcctttgtttcttaattcgtaatatggtgttattttccaaatctataatttggcttattagtttgcagttgaacaagctagggcatgtatagatgtgtctttatagttattagcgtatacaaagaacaaattggacgatagatgtctctttcaataatttcttattttttccttacaatgtttttttttgcctttctgtacttgatgtcttcttcataataattgcattttctatccctctcgaaaattagtacctcaatcaaattgatctcaagtcaagttctggacacaactaccttttatctttttgaatttaatgttaaattatattcaaaataaaaataaacgtttttctttgaatttaactctatttgttttattttggaaagttgatgagtgattgtcggtaactatactaaaaaatggttttgcatttttctataggtgtggtatgccttggtacgtggaggaaacaagttagacacataagcacatatgtactagacgcaaataatgtcacaaaaacggtttaaaatatctagttttcagtttgtatgtcgtacttataaccgaacgtgtgtgaagttctcatgtcatgtaccagttctgttaaactaatgaaatatgttcagaggtttatgaccactataactattagacctgatttcaattaatcaagaaaaatccaaactttttaatatatgcattatgctttacaaaattgtttgatcttctactgatgtaaagacatttacaaaatatagttatttaattgattctaactaatttgttcgcgcatagcgcgggccgtaaactagtatttgataattcaggtgcctttgttttgttttcttgtattaggagtgtgggggctaatgaattagttacaaaaaatataaattgaattgtggaatcatttgaccaaaaaattgagcaaaaaaagaaagaaaaagaaatgtagaatcaaaatattcatgatgaattgcgatggagacagaagaataactcaaaagatttgaccaatgtgaacttgttgaaacgtggaattggtccaaaagagaggcaaccttatcattaaattaggctaattcgcagttaaataagtagcctaaaatactaagaattaatttcacttagtttatcattgaaattggtttaggatcatgtttatgaaaatacgattgaaatctctttctgtttttttttacaactacaaactactaattaatattgaaatctcaagacttgaaaaaaaaaagataaaaactcgcttgtaatttgtttttcttttgaataattataacattccaaataaatgatcatacctttgaagttccaaatcattttatagcttttatcttttatgtaataaataagctatgggccatcacattccatttatttacataaatactaaatgataataacaattattttcctatatgatatcaacattttttttttattcaagcttcctacctttgaccatgctataaagctattatgacattgccacacataggttatttggtaaaacaatgtaatttgaaacctactttagattctgttgtcctttacttggtaaaaagtcaactttcattttcaaaactagatatgcatatacatgttgactgattttcttcacctttttctatttcaaggacttacaataattaccaaatacttccttcattcacacaatcaaaggtacaaaatggttaaatatttcaaaatttactacttgatacaacttagtttactacttggaatatacaacaaaagatattatattgtaattcttttatataaccataactcttttttgcctcaataatattgaattagaatgatttcaaacaaaagaaaaatagattgaaatcacaaagagaaaacaatatttattccgaatcttataactcgacgaaaatcgattttatcgacattaattattccatcacaatactaatttaaattccaaaaaacacctatcaaaagtgaattttcgcataacaaactcgaaacattacaccgatatgtatttgatgataatttgataacaacatatggtattcttcgaaattgacgtgtctttatttctgatttctgttgaagtgatcccaattcaaagaatttcaatgaaatccatttaaaagactatataaacataaatttaactatgtaaataaaatttggtaacatacaaaataattctaattatgtagtaatatttgataatataaaatatactgcaacttgttagtaaaaaaataataaaaatgtgtaaatgggattgagagttttgaagagtgtagaaatgggtaaaacgagaaaaagcctttgggggttgaatttttggctaacttcaccatctgacactctccaactcctcctctctcttcagactaacccaaattcaattcatctctcctctctctctctttctcgagtcgcgtttcttcttctcttttccttgtagacatctccacgattcttcagctgagagcttctcacttctctctagagctttgctcaagaactagcgacgaagaagaagaagaagaatctgaacttcaatctaattcccagatccaagtttctgactcttcttaggtctttcttctccattccttcaagctactgaattgaatttgtcgttttgggttcttctttagctagggttttcgatttcctcttgactttaaaatcttcttgattcattggcaggtttcgtatgagagaatcaagtttttttccactgagcaatttgctccattaatggactgttgctttcatacaaatcaggatttgcgattacagtgtttcgctggttacattgttcatccatttcaagtttcctagagagttcaatccgagatcagagtttttttttgcgtatggagagtttcgagagagtttgagagctaaatttggaaacttgctgtgatg

SEQ ID NO: 7245 - DNA, 3000 bp, Unknown
  misc_feature (1)..( 3000): cDNA_ID_1817106_gDNA_ID_1621134_Annot_ID_56526 3000 nt of promoter + ATG
atcaactatgataatacaacaaatttatctttatatacgttaattttatgtccataacgtctttaatattttaaaaaatcatgaatgttatcagccaaacatctaattctttttattggatattttttttttgtgtgggaaggggagtcaaaaaactccccccaatttattaagaactaaataaaaggaaataacaaacgaatagtacgagggacaccaggcccattaacatcctcgaacatgatcgaaagaacagattcgggacaaacatcaagagaaagaaaaccaaaatctaaagagaacgcatagtttgctaatccatcggcaagacgattagcttcctatacacatgagtaacccggactaaccagtcccgtgagataaagtcatggcacaaacgtaccaggaaagacagcggatgcattccagtcacccatgtttgtaagaaccccacaaccaacttagaatccacctccagctccacccgtcgaaagcctctctcccaggctatgactaaaccatagtacactccccataactccgccatgggaaccgaacagatgcctatgttcaacgcaaacccacctaaccactcaccttcttctctttttattgggtatttaacattgtatttagaatctctttactggagcgtttgtcgttttctttagggaatgccaacaaaataatataccatatattcatcatcatgataatacaacaaacttatatttgtatgggttaattttatatgttcgtaacgtctttattatttataaaaatcacgcatgattttagacaaacatctaattttgttttttggtatttagctttgtatatgaaatttcttcactgcatcttttgtctttatatttatttacactaattttatatattgtaacgtctttactattcataaaaatcacgtttaatttcaaacaaacatctgtttcttttggtattttactttgtatttgaggttccaacaaggtaataaagtatattgcatgttttgtctttagagggttccaacaaggtaataaagtatatattctttaacaatgataatacatcataattatatttctctatgttaggtttatatttacaattgtatttagaatctctttacttgtgtctttatcttaaggagatgctaacaataaataaaacatattatccatcaaccataaaaatatatttataaaccctaattttgaaatatccaacgtctttaccatttacaaaaatgacgctttagtctttagagaatgtcaacaagttaataaacttttatctatcaacaatacaaacaaattttttatataccaacgttaattatatattcgtaacgtctttattatttgtaaaaatcatgagataagaaaatatttatctatcaatgactatacaacaaaattttgtacatcaacgttaactataaatctgtaacgtctttatttatttgtaaaaatcatgagataagaaaacatttatctatcaatgactataaaacaaaattttgtatctcaacgttaactatatatttgtaacgtttttatttgtttgtaaaaatcatgcatgatgtcggtcaaatatctaatttatcgttttgatatttaacattgtatttgtaatcttttttactgatgtttttatctttaggcgatatcaacaaagtaattaaaagaaacacacaattttctctttttaaagttaagtacaaatgaaaaatgcagtagaattttttttttttatagactactaacttgcattaaacaaacaaaataactactctatttttttttctttttcacattcaaccatctacttcattgatcgtacatgcactatgtattatatccattgaattttgaaaatttattagtatttatttttttagtcaaagcagactatagccaaacgaagcaactattcgtacagataaaaactcaactgcgactaaacatctcttttcttaattagtaaaactaaccatattagaataaaatccttttacttcttgtttcagtgttcttaagttcatagaaaattgtaactttttcaaaagtctatagtcttcttgtcaaaattctatagtcttattgcagtgaaaaaaaagtgaatactcaatattgttttgtcttttagatatgtaaacagatttaacggtcaagaccaaataaaaaatagagaaaaaatggtctgaaacaaatatattttataatttagtttaaaaaaaacttaaaaaaaaaattagaatagtagaaaaaaagaaaagtggagcccacaggttttaaattaataaaaaggatatattattctcttcttcctctcttcttcaaacttcgtctccaatctttctctccaccgtcgatactcgttttccatttctctgtaagaaaaattcaatttctctctttgtttcaacagtgaaggcaaaaaaccccacaaaagaaatctgtcaaatgttctaagttttcttcaacctcttaaactcaatttcttcctcttttgcttccgtggtgagtcattctctcaacgatcttcttcttcttcttcttcttcttcttcttcttcttgttgctttctccggtgatttttttcttctccggtgataatcgattttcgttgaactgaaattttgaaaatcgattttactattcgacttgacttcgagtcttcgattgttgattttcgtcgtctctgttcttcattgtttcgtactgtagtagagttgttgacagagattcaaaatccgaatcgtaaattcttagatcttcgccggaatttgtgcgtatttgattttggcatatcaaatctccgtcggtcgatattttattttccttatttctggatttttatgatttggtagatttaatgatgatgatgatgatgatgatttatgatgcttaacgcgttttctttggttttaaacaggtggctacttctcgtgttcttggtcctgtggaccttggtgttacagaatctccattgatg

SEQ ID NO: 7246 - DNA, 3000 bp, Unknown
  misc_feature (1)..( 3000): cDNA_ID_1817086_gDNA_ID_1621134_Annot_ID_56531 3000 nt of promoter + ATG
gattcttctcgtgattcgtgtttcaaagctggtaagtttagtgctccaggttttcgatttcaccctactgatgaagagcttgtggtttattatcttaagaggaagatctgttgtaaaaaacttcgagtcaatgccattggtgtcgttgatgtttacaaagtcgatccttctgaattgcctggtaattttcaacaccttcttatcgattttgattcatgttttctctacgtatcgtgatcaattagtttaggttattaatgatgtagttgagtatatgacaaggaaaagttttggttgttgatgatttgttgagtatatgacaaggaaacgtctttattcactatttaattcgtatcgatcctcatttatgctcatatgatttcattttcacaatgtttaggtttccaatttgtttatttgttatgcaagtatcaaatttatgttggaattggttttctaacacggtgaatgtaacaggtctatcgatgttgaagacgggagatagacagtggttctttttcactccaaggaataggaagtatcctaacgcagctaggtcaagtagaggtactgcaactggttattggaaggcgacaggaaaggatcgagtcattgagtacaattcaagatctgttggactcaagaagactcttgttttctatagaggtcgtgctcctaatggtgagagaactgactgggtgatgcatgagtacactatggatgaagaagagctagggagatgtaagaacgctaaggttagtattatagccaaaactcatctgtttctctttttgatttatttgtagtttaactaatctgtcttaccttcaggagtattatgctctttataagctttataagaagagtggggctggtcctaagaatggtgaacagtatggtgctccgttccaagaagaagaatgggttgatagtgatagtgaagatgcagatagtgtcgctgtaccggattatcccgtggtccgttatgagaatggtccttgtgtggatgatactaaattttgcaatcctgtcaaacttcagttagaggatattgagaagcttctcaatgaaatcccagatgcacccggggttaaccaaagacagtttgatgagtttgttggtgttccacaggttagtttcttctctaataacatattggcttatgctttctttcttttttgggtcctttggttattctgttgtgcttccttcactaaatagatacttgtatttgcagggtaatagtgcagaagtgatacagagcacattgctgaataattcttctggagagtatattgaccctcggacgaatggaatgttcttgccaaatggccagctatacaacagggactcgagttttcagtcccatttgaattcatttgaggctacctctggtatggcacctcttctagataatgagaaggaggagtacattgaaatgaatgatcttctgatccctgagctcggtgcttcttcaacagagaaatccacagagttcttgaaccatggtgaatttggtgatgttaatgaatacgaccaattgttcaatgacatatctgtttttcagggaacttctacagatctgtcttgtctgagtaattttactaataacacatcaggccaaagacagcaattactttatgaacagttccagtaccagacacctgagaaccagcttaataactacatgcatcctagtaccactcttaatcagttcactgacaatatgtggtttaaagatgatcaggctgctctctatgttcaaccaccacaatcttcttctggagcattcacttcacagtcaacaggtacttaaaaagtctttaaactcaccctcatctcagagcattcccttatgttgtctgccaagttatatttcccacgaagcattagtttttgaatttaaccaagacatgtatatattatactctgttttctttttgttgatatcaaaccctcttgttaagatcttgaaacataataacctagggccttttttactgatactttgtgaataccaacttacttaggtgtgatgcctgagtctatgaatcccactatgagtgtaaatccccaatacaaggaaggacaaaatggtggtggaacaaggagccagttctcatcagctctgtgggaattattggaatcaataccatcaacaccagcctctgcctgtgagggtcctcttaaccagacctttgtgcgtatgtctagcttcagccgcatcaggttcaatggaacgtcagtgactagtagaaaagtcactgtagcaaagaagcgtatcagtaacagaggttttcttctgttatcaattatgggtgctttgtgtgctatcttctgggtgttcaaagccaccgttggagttatgggaagacctctcttgtcgtgacctagactcttgaatcttgattcagcataagttagcctgatccacatctttgattatgtatagagtttgaaagagtttaattcttaacaaaagatttcttttttcctggattctctgatggctttgaaattttgcttgcacttatcatattaagcagaatttttgaacctctgtcgtgtcagacaagaatgttggaaaaaaataacaataatgggcctgtcgaattaatgggcctgagctagtatatttcgagcccagtaggttctcacaaactaagtagcagaaaaagctgagaccatcaaatagccaaccaaaaaatcacctcaatctacacaaagtctcatttctcgttaatttccattttcgttatctctctctctcgccgatcaaaccctaggtgtatcaattcgttcagattcccggcggttggtctcactgtcatgtaggtttgattcatcttctcttctggatcttgagtgacgaagagagaagagatctgagtttttctgagagagagatttttctccctcgttgacccgatcagttttttttcgtcgctggggattttcaaattttttttgagggatcggttttgatttgttacgtagatg

SEQ ID NO: 7247 - DNA, 3000 bp, Unknown; identical to SEQ ID NO: 7246
  misc_feature (1)..( 3000): cDNA_ID_1817086_gDNA_ID_1621134_Annot_ID_172611 3000 nt of promoter + ATG

SEQ ID NO: 7248 - DNA, 3000 bp, Unknown
  misc_feature (1)..( 3000): cDNA_ID_1022211_gDNA_ID_1621134_Annot_ID_172605 3000 nt of promoter + ATG
tcaagaacaaattaatttctctttacctattaattaaacatgtgggtcatattatgaaagacttaataaaatacattactatacaacattaaataatctatctaaaacaaatatttgacaagataagatatatatttgtatttttttctacttcaatagcatcacttattttaaatataagcttatataatttgaatcttaaaaaaaaatcaacttgtgttgtaacataggtcataatctattactgatttagtagaatatcaacacaattacaacccaccagcaagtagaatatttttcatagaatcatagggacatattacaatacattaaatagataacataagcatgttttgaactaagaaacatcctaactatcacaggtttggtctagagaacaagtgaagtaagccaaagattagattaagagttgtccaccaattgaagaatgggaaagagctgagttaattcatgagttcttgacccatttgtagagatgacgaatttgatctctagatcatcttatccaacatctaatttatacttcatgcaagtatggcatattgaaatgtggttaaaagccatgaagaatctgatgatgaagttctgtatcatggttgttggtatgcaagagaagtttgacaaatattggagtgaatacagtgatatcattgtcattgcagcagtgtttgatccaagattgaagttctctatgttacaatattgcttcgatacacttgatgcttccattagtaaatttaagattgaacatgtgcgtaagaagctgaagaagctttttgaagtttataaagaatccaaaggaaattgcaattagaacttcaaaaaccatagtttgacaaaacattcttctaggatatggtgtaagtttccatctttaaccctctattaaaaactttctatgttttgatgtagtggtttgaatcgtttatggtttatgtgtattgatggttctcttaactttcacaatggaagagttttatgctttcatttctcaaacggctggggctaatggatagtcagcattagacaaatatttgaatgagctggttttggacatgatagcatttaagagcatggatattttgcatattggagaaataatgcaaatcggttcaaggagttgtctaaaattgtagcttcaaaagtcttcattcagcataggaagtcgggtcttaaacaagtatcagagttgtctccttccctactaacgtttaagctttgatatgcgcgaggaattggctatttgacatattttcttttgtcatatttcaatcaatttgaatttaaatgtaaatatgtttttttgttgtacttagatgatcatattgagttatttaatgaagacaaagatggcaagggagaaatataagaagtttaaatttgcatttaattgcttttagatttgatactttgttgaattgtgttcaaatttgtttttagatatatttcaaagtataagacttttgacttatgtattgattaaaatatgaaccaaaaactattatgttcaaatttggttctgatatgcccattgaacatcccatttgaacataaactttaatgacatgaacgttaatagacatgagttttagtggacatgaactccatttatctaatatcaaaatagacattattaaaaattggaatgtgttaatggatatggatagcctgctatagactaccatttttgttggacatatcttaaattatcaacgaagtactcaaaaaataagaaaaaaattctgaaatagtcttgaccaacatttctttcttcttagaccttcgaaacacataaaaatgttttctagaccaaaacacatattaatcatcatatttgttggagctcagattttatataaatatcaaccaagaagaaaggactagtttaaccgctaggaatctttttgtgaccagaaaacatttctgcctacgctaggaatcatctatcaataaaacatggaatttcttcgttacaaaaaagaactgaaaaatatgctaagctcattatttggtgctttgggaaaaggtcattaaaaccaagggcaaggttcacgtttgtgtgacaggttattttcaagatgtctgaacactttttggctgcttctgtaagttctctgctctctctcccattgtgaaccttatgactacaattattaactattcccttatagtaactccttttttggtcccacgccatatattatataccatatctttacgtataaaacttctctctatattcatgataccactaacacttacatatttaatgcttcgacttttgtaattatacattcgttcatccttgtgtacaatatgatcgatgggcttcttggtcttttagcggtagaactttgtgtatattaatatatatatatatgatttactggtcatatttttttatataaactatgatgtattggtcataaatcgatgctcaactaattttttttttagttttatgttgaactatgatttgtagtgaaatatagtcttctagttaaacattttcatccatggtttataatatgattgatgagatcttcatattatatatccactgactgaacatgaaaacatgcacacaagtcacaaccatatctcaggctttattgctacgtacatgtgaacagtttctcatattcaaaaatattcatagcccgcgaacatgttcattggtaactaaaagaataaatcataatgattttttctcagaaaatcgacgagaatcatgtgacccttcaacatgtgtgcctcttttcatcatttattatcataaatcataaacacataaccaattctttctcaccttttcctcaactatatatacacatatctcacttatcccacctttaatacttcacacacaacacataacacacgtagtacttgcttcctatcatttctagaaacttctctttaaaacctctgcctcaaccagaaagtttcttcttgttaaaaaaaaagattataaacatg

SEQ ID NO: 7249 - DNA, 3000 bp, Unknown
  misc_feature (1)..( 3000): cDNA_ID_2172730_gDNA_ID_1621134_Annot_ID_172602 3000 nt of promoter + ATG
gctttgttccacttagaaccatcacaacaatcatcatcatcatcagcaaaaacaccatccacctcatcttctggattttccggttcaggtggctcccaaactggaacatcatcactatcatcttcacgatcagataaaaactgcacattctcaacactgttttctttcgatttctcatccaaaatgtcgagaatatcactcggcatgctcttcgacttacgctctaaccgatctaccttaacctccttcgttaattccacatcttcttgactactatgacttgaacattcatcttcaatacccctaacaaagataacaacaatcttcatcatcaaacaaactgtttacaaaaattatcaatataaaagagtcatgttttgttgatctcttacctatcacaagagtttccatcaacagaacactcacctgccaaataaaacatcatccaaatcatttaaacgcgttttcggatgatttcaacagcacaagagaagaaatctataccagagagagagcgttcactgctagataaagaattagaaggagtcatcaatggagattctgtaacaccaaggtccacaggaccaagaacacgagaagtagccacctgtttaaaaccaaagaaaacgcgttaagcatcataaatcatcatcatcatcatcatcattaaatctaccaaatcataaaaatccagaaataaggaaaataaaatatcgaccgacggagatttgatatgccaaaatcaaatacgcacaaattccggcgaagatctaagaatttacgattcggattttgaatctctgtcaacaactctactacagtacgaaacaatgaagaacagagacgacgaaaatcaacaatcgaagactcgaagtcaagtcgaatagtaaaatcgattttcaaaatttcagttcaacgaaaatcgattatcaccggagaagaaaaaaatcaccggagaaagcaacaagaagaagaagaagaagaagaagaagaagaagaagatcgttgagagaatgactcaccacggaagcaaaagaggaagaaattgagtttaagaggttgaagaaaacttagaacatttgacagatttcttttgtggggttttttgccttcactgttgaaacaaagagagaaattgaatttttcttacagagaaatggaaaacgagtatcgacggtggagagaaagattggagacgaagtttgaagaagagaggaagaagagaataatatatcctttttattaatttaaaacctgtgggctccacttttctttttttctactattctaattttttttttaagttttttttaaactaaattataaaatatatttgtttcagaccattttttctctattttttatttggtcttgaccgttaaatctgtttacatatctaaaagacaaaacaatattgagtattcacttttttttcactgcaataagactatagaattttgacaagaagactatagacttttgaaaaagttacaattttctatgaacttaagaacactgaaacaagaagtaaaaggattttattctaatatggttagttttactaattaagaaaagagatgtttagtcgcagttgagtttttatctgtacgaatagttgcttcgtttggctatagtctgctttgactaaaaaaataaatactaataaattttcaaaattcaatggatataatacatagtgcatgtacgatcaatgaagtagatggttgaatgtgaaaaagaaaaaaaaatagagtagttattttgtttgtttaatgcaagttagtagtctataaaaaaaaaaaattctactgcatttttcatttgtacttaactttaaaaagagaaaattgtgtgtttcttttaattactttgttgatatcgcctaaagataaaaacatcagtaaaaaagattacaaatacaatgttaaatatcaaaacgataaattagatatttgaccgacatcatgcatgatttttacaaacaaataaaaacgttacaaatatatagttaacgttgagatacaaaattttgttttatagtcattgatagataaatgttttcttatctcatgatttttacaaataaataaagacgttacagatttatagttaacgttgatgtacaaaattttgttgtatagtcattgatagataaatattttcttatctcatgatttttacaaataataaagacgttacgaatatataattaacgttggtatataaaaaatttgtttgtattgttgatagataaaagtttattaacttgttgacattctctaaagactaaagcgtcatttttgtaaatggtaaagacgttggatatttcaaaattagggtttataaatatatttttatggttgatggataatatgttttatttattgttagcatctccttaagataaagacacaagtaaagagattctaaatacaattgtaaatataaacctaacatagagaaatataattatgatgtattatcattgttaaagaatatatactttattaccttgttggaaccctctaaagacaaaacatgcaatatactttattaccttgttggaacctcaaatacaaagtaaaataccaaaagaaacagatgtttgtttgaaattaaacgtgatttttatgaatagtaaagacgttacaatatataaaattagtgtaaataaatataaagacaaaagatgcagtgaagaaatttcatatacaaagctaaataccaaaaaacaaaattagatgtttgtctaaaatcatgcgtgatttttataaataataaagacgttacgaacatataaaattaacccatacaaatataagtttgttgtattatcatgatgatgaatatatggtatattattttgttggcattccctaaagaaaacgacaaacgctccagtaaagagattctaaatacaatgttaaatacccaataaaaagagaagaaggtgagtggttaggtgggtttgcgttgaacataggcatctgttcggttccc

SEQ ID NO: 7250 - DNA, 3000 bp, Unknown
  misc_feature (1)..( 3000): cDNA_ID_1817106_gDNA_ID_1621134_Annot_ID_172600 3000 nt of promoter + ATG
ttaacattgtatttagaatctctttactggagcgtttgtcgttttctttagggaatgccaacaaaataatataccatatattcatcatcatgataatacaacaaacttatatttgtatgggttaattttatatgttcgtaacgtctttattatttataaaaatcacgcatgattttagacaaacatctaattttgttttttggtatttagctttgtatatgaaatttcttcactgcatcttttgtctttatatttatttacactaattttatatattgtaacgtctttactattcataaaaatcacgtttaatttcaaacaaacatctgtttcttttggtattttactttgtatttgaggttccaacaaggtaataaagtatattgcatgttttgtctttagagggttccaacaaggtaataaagtatatattctttaacaatgataatacatcataattatatttctctatgttaggtttatatttacaattgtatttagaatctctttacttgtgtctttatcttaaggagatgctaacaataaataaaacatattatccatcaaccataaaaatatatttataaaccctaattttgaaatatccaacgtctttaccatttacaaaaatgacgctttagtctttagagaatgtcaacaagttaataaacttttatctatcaacaatacaaacaaattttttatataccaacgttaattatatattcgtaacgtctttattatttgtaaaaatcatgagataagaaaatatttatctatcaatgactatacaacaaaattttgtacatcaacgttaactataaatctgtaacgtctttatttatttgtaaaaatcatgagataagaaaacatttatctatcaatgactataaaacaaaattttgtatctcaacgttaactatatatttgtaacgtttttatttgtttgtaaaaatcatgcatgatgtcggtcaaatatctaatttatcgttttgatatttaacattgtatttgtaatcttttttactgatgtttttatctttaggcgatatcaacaaagtaattaaaagaaacacacaattttctctttttaaagttaagtacaaatgaaaaatgcagtagaattttttttttttatagactactaacttgcattaaacaaacaaaataactactctatttttttttctttttcacattcaaccatctacttcattgatcgtacatgcactatgtattatatccattgaattttgaaaatttattagtatttatttttttagtcaaagcagactatagccaaacgaagcaactattcgtacagataaaaactcaactgcgactaaacatctcttttcttaattagtaaaactaaccatattagaataaaatccttttacttcttgtttcagtgttcttaagttcatagaaaattgtaactttttcaaaagtctatagtcttcttgtcaaaattctatagtcttattgcagtgaaaaaaaagtgaatactcaatattgttttgtcttttagatatgtaaacagatttaacggtcaagaccaaataaaaaatagagaaaaaatggtctgaaacaaatatattttataatttagtttaaaaaaaacttaaaaaaaaaattagaatagtagaaaaaaagaaaagtggagcccacaggttttaaattaataaaaaggatatattattctcttcttcctctcttcttcaaacttcgtctccaatctttctctccaccgtcgatactcgttttccatttctctgtaagaaaaattcaatttctctctttgtttcaacagtgaaggcaaaaaaccccacaaaagaaatctgtcaaatgttctaagttttcttcaacctcttaaactcaatttcttcctcttttgcttccgtggtgagtcattctctcaacgatcttcttcttcttcttcttcttcttcttcttcttcttgttgctttctccggtgatttttttcttctccggtgataatcgattttcgttgaactgaaattttgaaaatcgattttactattcgacttgacttcgagtcttcgattgttgattttcgtcgtctctgttcttcattgtttcgtactgtagtagagttgttgacagagattcaaaatccgaatcgtaaattcttagatcttcgccggaatttgtgcgtatttgattttggcatatcaaatctccgtcggtcgatattttattttccttatttctggatttttatgatttggtagatttaatgatgatgatgatgatgatgatttatgatgcttaacgcgttttctttggttttaaacaggtggctacttctcgtgttcttggtcctgtggaccttggtgttacagaatctccattgatgactccttctaattctttatctagcagtgaacgctctctctctggtatagatttcttctcttgtgctgttgaaatcatccgaaaacgcgtttaaatgatttggatgatgttttatttggcaggtgagtgttctgttgatggaaactcttgtgataggtaagagatcaacaaaacatgactcttttatattgataatttttgtaaacagtttgtttgatgatgaagattgttgttatctttgttaggggtattgaagatgaatgttcaagtcatagtagtcaagaagatgtggaattaacgaaggaggttaaggtagatcggttagagcgtaagtcgaagagcatgccgagtgatattctcgacattttggatgagaaatcgaaagaaaacagtgttgagaatgtgcagtttttatctgatcgtgaagatgatagtgatgatgttccagtttgggagccacctgaaccggaaaatccagaagatgaggtggatggtgtttttgctgatgatgatgatgattgttgtgatggttctaagtggaacaaagcaagtttgttaggggagttgagtgatgaaagtagtgaaaagagaaaggtttatgaagaaaatcgaagagtgatg

SEQ ID NO: 7251 - DNA, 3000 bp, Unknown
  misc_feature (1)..( 3000): cDNA_ID_2107289_gDNA_ID_1621135_Annot_ID_56536 3000 nt of promoter + ATG
accagaaacagaattatttctcaagattttgtggttacggtttttgctgctatcatatccgaaagcatacgagcaaaagttctgataactctcgaacaagctacggttttgaatcaacctagtttcccccaagtacatgttacataccatgagcgtgtagttgctgtagtggttattggagatgcaaaacaataagccgtcgcagtgaaagagttgagatatcgcgaatccatcaaatgcacttacttgattcactgatgtgtcaacaaagtcatcgccgccatttaggtccagcttcattgaacagatcttgtcaccaatgaggataaaccctacgtgactgcttttccttgcggttgctttaccacctacaagattggttttcgatgaagcctcccatttcttgcacgttgatcggagtgatctaagagatgtaatgggaaccctagcgagaatctcgtctaccaaaaccactggaagggttgacatcgtcgtcgtcatttctctgaacttcagaaaaaccaaggactgttaggggttgtttcgtttttgggttcagtgtagccactagacaaatgtgttagtttacgatttaagggtaagaaatcttttctaaattggcaataaatgcttaatacagaaggaaatctggaaaagattttaattatttttggtggattttattccatctttgtatccctaatctacaaaggtgattggttaaaatgactaacagtaatcttgttcaaaaggacgttacacgaaacaaaaggagatgatgcaagaagaaaaaaaaaaattattgtaatcagtggaactaatttaataatctctctcgttacttttgcccggttgatagattcttcgtatatgcactaaacttggaacgtaagaagagaacacaagtggatcaaaataatatctaaacattttaggtttcgagatgtgatctgttccgattttcacaacagatttgtccaatgatgttaactgtttcgtatccacagttttcgttcggtctatacttacgagatttggaaaccacaacaactttcttctcctcgtcgatatagaagctctcaacacgaaatttactcgaaaaatcagagagcgatgtcctttccattgtgaagaacttggtccatgcatgatactgcattggactcaattttagtcgttatctccatgaccaagtccaaacataagtcgtagggttgatataacatagcgagctgctcttctctgatacaagatatatagagtcacagtctcttcatcactagagtgaaacggaagaggaagacgcggtccaaacctttctgatgtaaaatcaaaacagagtaaaaaaacaatacgatttgaaactgcatggctatctgacttctttttgtggagcataataataagtatttcccttcaaagacacaccgttgttgttgttgttgttgttgttgtttgtcgtaaccgaaagcatacatgtctaatctgtggaacttatggtatttgcttcttggttggatccacctgaattccccttaataagggttccacaccatgagcctccttctccttttgtgtatgacgcataacaatcaagccgtcacagtgaaatatattagatatatcgtattgatcaactatatatatttcctttaaagatggatcaacgaaatcgttgttgtggattccttggagatcaagtctcagggaacaaaccttagaatacattactacgaaacctagaaattgcttacttgtatctgctttaattaccaaaaacataattttccgacaaaacgttccaggataaagtgttccacgttgtacaagtacattgcacttcactcagagatatcaatggaactctagagaatatctctcccaccaaatctactgaaagatcggacaaagtcgtcattatttgttcgtctccttaaatgatgaagtgagagacgacacttgtatattctttgctaagaaccgtcatttgtgatcaaagaacaacttgaccaaatgatagatacttattgttctggtatttacaacattaagaactaattacaacttaatgaagaacagaacttgctggtctttgtgttagtctgactgtagaccataagtattagagatcttaactcattcattgatctgtaaataattcacagaactaacaactccttataaagcaaacaaaaaaggaccaatccaaaaacttgaacttttcctactatatacatcttcaaaattagctaacaaaagaaattaaaacttcaaacaagaaaaagatctaagaacaaaaatatcagtctcaaagattgcttgcggtgtacgtcaaagagagccagaagaagatatattaggttccaatctcatacttgaaccaaccttggtttcaagctttcattagtaatttcgagagcgagtcaaggtttgatcatccaatgggtggcttagcgattccttgtcctgaagatacctacatcactgcaaatccaacattttgttcttccgagttgaaaaatagacttactcattttaaacgtaggagtttttccccctcttcttcttaaagtttgaagatagaatgacaggtttttgcaatagacatgatcatgttcatgtcaatacatttaggatcgatcttagaaaaagaaagacaatagactaaaactagtcatctaaattttattgccaagagatgtacttcgaaaatgctagtatagattttagtctcttgacaataaaattttgtataaaatttgtctcctaaatagtatgtttttgtttttgttgtattccccaacagctaattctgtcttctggtatatgggtatacttcggttagtttcggtttgattacggttcacctttcaaatttaaacattgaaattgtaaaccatcttctttgtccaaaacgatgtcgtataataataacacgtagccgttaaatgaaaaccgaagcgtcaaaaaatcaaaatcgataaaaactaattagggtaa

SEQ ID NO: 7252 - DNA, 3000 bp, Unknown
  misc_feature (1)..( 3000): cDNA_ID_1690145_gDNA_ID_1621135_Annot_ID_56537 3000 nt of promoter + ATG
gctccatcgaagcttcctcaaaagaactgaagctgaaactgatttgcaactacttcgtgttgctttttcaatatctacttcttcatagaacttccacttgttgttggtaagatcatcctgaaccaataccttgttttctttagctgaatcaaacaaatcatcaataggaccgtaaattgcattgtggtttgttctattcggaggctgcggaaaactcgtcaagctctctttaatccatttacattgctcctttaaactcaatgcatcaggtataaagtaaaaacctgtataataatagttcaaaagctgagctcttggattctaatttaacacagatgattgaaagttggggattttaacttaccagggcgattatcgatgcagaacacaggagaagaatcaactttcgaaaccctaattccgtctggcaaaacaccgtcattgttgaaattttgtgaaatcaaattgaaatcaagtaactcagacaaatcaattggttttggtagcttcttcctgcgagttccaagtgattgattataagtggaaggattcaaacaaacgcaagtggagagaagataaaaaattggcttactttctagagaacttagaatcctgttcatagtaaagtttgtattttttctctgctcgccggaaagccgtacgatctgcgtcgtcggagacgttcgccgattcgtacatcttcttcttcaccagtcgacgattattctccggctgggggagcaaccaacccgagtttatttttttattttcttttatttgcaataaaaatcactagtctttcctaaattcttttttagacctataatacctttttgtgtataaatagaccaataatttattttgaaaaattgaacatttgaaccctgcatttctagtttttggccattggacataatcagagttggaaagtttacaaaaaaataaaagaaaaatctaaggtgtaacactttcatctaaaaactgataaaattaaatgtcaatggtattaattaattctaaggatgcaaaaacactctcataagctattaaatcaatggtgttaatttgtgaaacttagtcatctaaataatttgctaatttttgtaaaaatatatcatatatgtaagagaaattcattgcttacattatctaagacctacacttgattaatggtcagctttagacctacccttgatcttggtggccaattcatgtatagcaaatgtggacatcaaaatattttttttcataaatagagatgataacaatattggagataattattttgaacctttttcattcaccatttatcaagaaattaattacatataccatagtctataacaaatttccaaatttaccacaaaacttttctcaagaaggttttaaaaaatttaggaactcttttggcccaaatcctttgaaacaattgtgaaaggactccatttactttacaacaaaataaatagggaaatttgcaaaattgattaacaaaataactataattaagaaactaaccaacaaaaaaaacagagatgatattttgtatataaactataatatatactaaagtacccttatctacacaatcaccatctcttctatgctattacaaccattacccttgcaaccgtcgtcatcatcgcatccaccattatttccacaaatgtcataccatcatcaccatcaccactgcaatcgtcaccaccatagaaacaaccattacgctgtcatctctaccaccatcaccattattgcggccgcaattgacacacgaccactgcaaccaccaacacaaatattactacgacctacaccatacacaccatacacaccaccaccaccttaatcacttcttcctctcttccattgcttgtttcatctctctcgcctctcatctttttttttctactttaacttaattaaaacagaaccgaactatagttttctattttactttcaattttgtaccattctatttgctagttagaacgaagaaaaatgaaaacaaagactcacaagatcttattgaatattttctggtttgatcaatatctaaaattgaaaattcctaacacaaatttaaacccaaaatcgaatcgatttcaattcgcttaaggaaaggagaaaagagattaaaagtatataaacatgattttgtcagatttctaaaaactgaaacttgagatgattttatttagtttaattatttttgtttgggttctatatatagtatcttagggtttagttttcttaaatcaatagatgttttaaattagaatgaattgatataaaaaaagttaaattttctggaaattttctgttggattggagagaagagaagaagcaacgaagaagatgatgaatgaaaaaggtttgttaaaaaaacattacctttagatcaatatctgattcacaatccattacctttagaacatatggaatattacctttagatcaatatctgatcaacaaaacgaagaagatgatgagtcatggcaaattggaaaatagggaaataatacaggaatagacttgtaattagttagagtttttggttacttgctgaattacgtaaattatatggttataatcttaattttttgtcgaaatatggctacacagctaattcacccaaataaatatccacgcgtcatcaaaactatttattgttgacagaaaaaaaacaaacaacagacctttttgtcggtgaaattaattaataaaaaaatgatatatgtgtgtatgaaatgtaagtaacgtcttgcaaagtgtggacctttccgtctgagtaagagtattctgagttttgctcttctttgaaagaccttccagaaatccagactttttgttgtgacttgacgttatctctatgactctccattctttctcaccaaccccatttccccattgagacttttgttgacctaattcctccaaaatctcaccttcacattgctcgatttcagtcctctgaaaaaatctccctgctttgctatg

SEQ ID NO: 7253 - DNA, 3000 bp, Unknown
  misc_feature (1)..( 3000): cDNA_ID_1817179_gDNA_ID_1621135_Annot_ID_56539 3000 nt of promoter + ATG
taatgtcaaaggacatttactaatcttggatccaagaacacaacatagccacagacattattaatgtcaaggggcataatttagtactcaatcatttcttaatttcaacaatcaacagaacaaaagttcaagatattttaatacaagtgtaataaactataacagaaatcagcaaagactttctgtaaaaaccatgcaaggacataatcattgtaattcttcacacaaaatctaggctatcagtaagaatctatcagccacattatctctgagcgtatataccccaacaaaggatcctacagatcaaaattcagctaaacaagatccaaaatttacaaatttcgaaagtgaaatgatcgtcagaacacaagaaccaatcagcatttccataaaccaacatgttcgatgaaatcgagaagggaaaggagatgactcactaggaagcatacttaagtctctgtgaaaagaaagagattgagtctcctgagtcaaacccaattcatcagaggactttttgagctcgcggctaaaaggaatctcgccttcaatggcagtgacagctctctgagaagctgaagaagagcactcccagagacagaaacgacggcgtttatcagcgtcgaattcagcgagacccatgagaggagaacgatgatgagtcgtttggggacaaacccaaatgggaaaacacctcagagccatagcaaagcagggagattttttcagaggactgaaatcgagcaatgtgaaggtgagattttggaggaattaggtcaacaaaagtctcaatggggaaatggggttggtgagaaagaatggagagtcatagagataacgtcaagtcacaacaaaaagtctggatttctggaaggtctttcaaagaagagcaaaactcagaatactcttactcagacggaaaggtccacactttgcaagacgttacttacatttcatacacacatatatcatttttttattaattaatttcaccgacaaaaaggtctgttgtttgttttttttctgtcaacaataaatagttttgatgacgcgtggatatttatttgggtgaattagctgtgtagccatatttcgacaaaaaattaagattataaccatataatttacgtaattcagcaagtaaccaaaaactctaactaattacaagtctattcctgtattatttccctattttccaatttgccatgactcatcatcttcttcgttttgttgatcagatattgatctaaaggtaatattccatatgttctaaaggtaatggattgtgaatcagatattgatctaaaggtaatgtttttttaacaaacctttttcattcatcatcttcttcgttgcttcttctcttctctccaatccaacagaaaatttccagaaaatttaactttttttatatcaattcattctaatttaaaacatctattgatttaagaaaactaaaccctaagatactatatatagaacccaaacaaaaataattaaactaaataaaatcatctcaagtttcagtttttagaaatctgacaaaatcatgtttatatacttttaatctcttttctcctttccttaagcgaattgaaatcgattcgattttgggtttaaatttgtgttaggaattttcaattttagatattgatcaaaccagaaaatattcaataagatcttgtgagtctttgttttcatttttcttcgttctaactagcaaatagaatggtacaaaattgaaagtaaaatagaaaactatagttcggttctgttttaattaagttaaagtagaaaaaaaaagatgagaggcgagagagatgaaacaagcaatggaagagaggaagaagtgattaaggtggtggtggtgtgtatggtgtgtatggtgtaggtcgtagtaatatttgtgttggtggttgcagtggtcgtgtgtcaattgcggccgcaataatggtgatggtggtagagatgacagcgtaatggttgtttctatggtggtgacgattgcagtggtgatggtgatgatggtatgacatttgtggaaataatggtggatgcgatgatgacgacggttgcaagggtaatggttgtaatagcatagaagagatggtgattgtgtagataagggtactttagtatatattatagtttatatacaaaatatcatctctgttttttttgttggttagtttcttaattatagttattttgttaatcaattttgcaaatttccctatttattttgttgtaaagtaaatggagtcctttcacaattgtttcaaaggatttgggccaaaagagttcctaaattttttaaaaccttcttgagaaaagttttgtggtaaatttggaaatttgttatagactatggtatatgtaattaatttcttgataaatggtgaatgaaaaaggttcaaaataattatctccaatattgttatcatctctatttatgaaaaaaaatattttgatgtccacatttgctatacatgaattggccaccaagatcaagggtaggtctaaagctgaccattaatcaagtgtaggtcttagataatgtaagcaatgaatttctcttacatatatgatatatttttacaaaaattagcaaattatttagatgactaagtttcacaaattaacaccattgatttaatagcttatgagagtgtttttgcatccttagaattaattaataccattgacatttaattttatcagtttttagatgaaagtgttacaccttagatttttcttttatttttttgtaaactttccaactctgattatgtccaatggccaaaaactagaaatgcagggttcaaatgttcaatttttcaaaataaattattggtctatttatacacaaaaaggtattataggtctaaaaaagaatttaggaaagactagtgatttttattgcaaataaaagaaaataaaaaaataaactcgggttggttgctcccccagccggagaataatcgtcgactggtgaagaagaag

SEQ ID NO: 7254 - DNA, 3000 bp, Unknown
  misc_feature (1)..( 3000): cDNA_ID_1817171_gDNA_ID_1621135_Annot_ID_56542 3000 nt of promoter + ATG
ggcgtcggtgacgtaatcaacggagagtccgtattttcggatcatgtttccgtagccaccaccgctaatgtgacctccggctccaaccgtgggacaaactccggcggggaatccatgacttttggttttttcccaaatcctgtagtaaacttcaccgagtgttgcaccggcaccgacccatgcagactctgtggcggggtcgacggtgatgttacggagatttgacatgtcgaggacgaagaaaggaacgtgagagatgtaggaaacaccttcgtagtcatgaccaccgcttcgagttttcagttggatgtttagcgatttcgtgcagatgacggcagcttggacgtgactctcggaacgcgccgcgattacgatcgcgggtttcggagtcgctgtggtgttgaaacgcgcgttacggatgtaagcgcgtaagacgggggtgaaagcggcagcggtttttggtaaaacgacgtcggctaatgagttaggaggagcttttgtttggtttgtgaaacattggagaaagttttggtagattgtttcaggcggaggttcgacggcaagagaagtagagatgaaggaggagattaagaagagaattaaacaaaagatcttcatttttttttttttgattggattctatttggtgttttctgtagtataaatagttacatgtagtctttaaatttctgttgtgattcttatcgttggccatttttaggatttgttgtattggtcaaggtttctcctgttttttttttttttaatggtttaattgctcaagattttaatatagtcaagttaactatagaaagatcacaagtttcagaagtcaagttaactttagagattttaatatagtcaagttaactatagaaagaacacaatttgtttgaaggcattgtgagaaagataaatttttagaggtattggattaggttgttttgggaagagaataacatgtctttcaacctttatcttccttttttttgagggatcagttatttttgttttcatattagaacttgagatattaatgttctataaaacggtgaataaaagaccaaaaatgttttatactacaaaacaaaattatttttgattcaatctagagaatgaaaaaaaagagttacgaccatgacaagttatttgttattcaaaataaattttgttgaaaataatttaatgttcagaatatttgttctaaaatacatttagaataacaaatcttgaagcgattttacacttcgttctaatgacattaacaaactgaaaagatatacaaatataacgtttagcaatctttttacaaaaacataaggttatacttttcagctaataagagtagaagttattgtaatgatttgagaacaacatgtattttcgtgatgctactaaattaatatgttttgagagtttatgaattttgagagtagtgttgttatatgggatctgaagcatccaacatagcgaaacatcattcgttccatttttttcggtggcattctttcgaatttgcgtcgagtgtcacttttctatctacataaaccaaaattctaggcactgaatgtcaaaaaaaaaaaaaaaaaaatctaggcactataataaatgcaaggaggatgtatagctgatatatgatcttacaaacaaaaacacttcgaacaaaggcgagaacaagtaattaagcaatgtcaagagcttgtggcgcaaacgtaatgtttttttaataatggcatgttattttttgttcttgacgaattccttaaattgacatgaggataacatgcacataaacaaattgtccttctttgaatcattctgaaacttctcccttacacttttctttgaatgtaaagagtgattcttacatgaaaacaaagagtaataataatactttacaactatatcaaatcaaagatttgaataagcattttataaatattggataaacataggagagttttatcaacatccctaattccaatcatacatcttccgcatacggtgtatcaaagtactgtgatagatcccatcttcttgagcaacataattatacgagccaccatgaggcattctcttgtcttgaacatatgcgtcaaacttcttttgtaccttgtaatcagctcctttatacattgtacaccagaaaagtgtttctcccataacgtcatcgtggaaactaaaaccccaatcttctccaggtttcatatatctttcacgaacatcattgtccccagatttacaacgtaccttgagccatttgttgtgagaaagactgttcctgaataacaacgacgtcttttttcctttaaatggattcgaatggccatatgcattgctaatcatgcatagggcaaagacaactagaaagattgaagtatttttcattttttctttctagatgcttagaggttttgtcatcggagtaattttttatttacggtattgtatatatagacatatatgtatgctatttttgaatttacgttcttattatatattgctctcttattattagtattttctattaatgatttgcggtatcaaatcgtttcaaacacaacaatagatatggatggttgagtggagaacaatatatggatttagatctttgagtaaatatttccaaagaacatttgttttcaacacggacagtaatttgacgtgatacatttaccaaatactacctattatattctgccaattcgttacaaacagataaataattcgattagtatatacatatctatcgtttaattgtgataactttattattatattaacactaaagttgattaaaatcgtcttgatttcgattagatgttttattttataacattaaacacacatatttaaaagatgagaaattaaattgtatgtatatggaattttaacattaaaaaaaaaatccaaatgaccaatccggtttatgtcggtccggtttgtattaaccaatcttaatttcaatttttaccatataaacctaaccagactattaca

SEQ ID NO: 7255 - DNA, 3000 bp, Unknown
  misc_feature (1)..( 3000): cDNA_ID_2992483_gDNA_ID_1621135_Annot_ID_56543 3000 nt of promoter + ATG
ttattgttatgaaatgtgatgaaatacttgtatttgtgttcctttctagttaggaaagattaataagataagcgtagagaaatgtagtattctattgtttaaaaggagtttagtgaaatatgttgaaaaggaaatagaggatctatccttgattagaaagattgaaagaatgtgcatgaaattgtcctatctatgtattgatcagaactatcaacatctaaatgacttctagtagactcaatagatctctaattaatgttacaattacctgaattatctgagttactagtccacttataccctgttggtatcgtgaatggatccaccacttgttcctcatccaccaaacgccgccgtgagctcttgccggtggcattgatgttcagtctcaaccaagaaggcgttgaaaacgatggacgtgaacttgagattcttctatctaatttttcatcatcgtgcacgtcatgttggtcttccattgcagctaatagatgttttggacttgagagcggtgtgtagaattcatccaacggtggaagagccacgaacttgctgaatgtcatgactacttttactgttgggatcaccggtatggacaactaaataccaaaaagatggaaaaaaaattgatgtgaaaaagcaaaatctaaaccggttttggattttttacgtcccaacaaactgtaatcttttactgttagtaaaataccgaatctcaaatccgaaccaaaccaaaccatataaatttgataacctaaaagcctaaaccaaatcgtaaacgattcattttgttcctctgactttatgaggaatgtcacattagtgcaactctaaacatcaaccaatgaaattacgacacgtctgatagaatgttcatgatacttaaaatttctcatgcaaaacgcttaaaataaatttgagtaatgtccaagaatgccccttcttaccttgaccggaaaagttcccgccgggaacttggtggtaagcagctctcgcattctccgaacagccttgacatggttggctaaaatatcaagcaacggaagcaactcctctgttttcaaaggaaactgatccgttaaccaaaccgaaggacgcaaactcttcacaatctccttttctttgatccgccccacagaagaattcgccaccagaatcgccgcttccggtaaagaaaccgatctcctcctctgctcccgcctctgcggccgtaacggttctgacacactccgacgagtctcgtccaaacgcaaaccctgctcttttccgacttttcttgatttaaaactaaaactaacgttttcgacatcgtaagctttagctttccactctccgacagtttcaatcttcgcttgccgtcgccaattcgtaatctcaacgagctttgctttagtaacatccatccccggacggtacaagctagattgaccacaaaagccagctatatcgctatcgctaatcggatctttagcgttttcgaaagcgttcaagatcgttttatcgtctctgtttaacacaagcaacgtaccaggagacacatcaagaaactcatctccatcactaagaaagagaaagctctgattggcgcggcgtatcttgaaaccgtcgaatccggctaatgaagtatcggcgcgtaaatctccaccgcgtttccatatcttgtaagtatcggaaggagcgatttttccgacgaatggaatcacggagctctcgaagtgaaatgatatctccatgtagaaatctctcatgcggctgagtacggcgatgagatgaggaagtctccgtctccatttgcaccacgccgaacggtgatggtcccggagaattgcctccgtgatctctgagttccgacgacacaaagcctcatgcaaggagttccacccggcggcgttttggagcgtgatatcagcaccggcggaagatatagtctttgccgcgaaaacgtcgccgagacgtacggctaaatggagaggcgtctctccaaagggaacgtcacggcggtcgatgacggtggagattttctccgcgactcgctcttggctcattgagtcggactcggtgtggatttgttccgggtcggttagtttaggcaaagacgaaaccagacgagtcaaaccggcgtgatctcctacaacgacggcgtagtggacgggactgtgagcataatcatctatagtagtggccggaatatttgccggcgaagaccttgccatgttttccccggcgactgttattaaaactctaaaggagagagttgaataacttctttttaataaaaagtttatgtttcatatttatctctgacaacagtcaacgtaaatacaaaattaaaactccataatctttttgttcacagttttgaccattgtttaaattccttttaaaattgagtatcctagatctttgttttggcaacaaatgactaaaccttagattgttattcaaattcaaagaagatcctttcacaattcaaaagcacagagaaatggtgcatgaatttgtagataaagcaatgggattcatatgaggaacagaaatatatttgcatcaaaaaataatcagtcaatgcaaaaaggctaattaagtataagtgatgtattctatgtgaattaagtgttgtggtcaagcaatgactaatgaatcataatgactaattaagagtttgaacaacatgcacaacctctctttttttgtttcctttcacaaatgcaaaaccgtctctaattttacaaaattaacagatacagtgggcctattttgaatcatgttaaaaatattaagtttgtaatttgggcttattgaatcatggatttgggcttataatttggtttgaaaccttctgagtgcacctgagtctctgggacctgtgtcactgttgctgttgccttggttgggttcggtttaaagttcgtggccaaacagtaaccttgagtcttgccgtcctctgtcatctatccacgcctgaacccgaaaaactctgaaagctgagctctggtaatg

SEQ ID NO: 7256 - DNA, 3000 bp, Unknown
  misc_feature (1)..( 3000): cDNA_ID_1817167_gDNA_ID_1621135_Annot_ID_56544 3000 nt of promoter + ATG
gcattgtataggattaagtagtaacaagctggacctaaccaatccggtttttccataaagttccggtttgcttggttatcgtgtgtaaacaaaaatagaacacaactttcagatttttcagtaaaaaaataaacagtttagttttctcattctgtttagtagacaataaaaccaagaaaaccaaactgatttatgcacaaatatcagttacaaccgttcatattcaaatgaaaatggaagctttgaacattgcaatgagctgttgttgtgcattgtcctgtatgctgcttcagtattctgtttccaatagaccatcaatgagcccgaactcaagcgcctgcataaaaaataaccaagaaaatatcatatgcagaattcaacatcgttacagaatgatcatgaggaacataagaaagacaaagtccacgagatatggcgagacctcttaattcctaactatcagtgagccatgtctcgttgaaaaggaattcgcgttaatgtttcagataccagaggcaaattacctcagatgctgataagaaacgatctctttcagtgtattgctgcactttctccagaggttgtccagtgaaagctgcatacatcctgtcaattttctgcatgtacaaccaaagagatcaatcagtcaaaggttcaagttttggctccaaaaactcgatcttccatattcttaaagcaagaagcatgagaataaagagagagaaagagagagagagacttacttgtcgggcttcgatggcttcattgacctgtctcctcacgtcctctacatgtccctgcaaaattatgttagcatgaaatcaatgaagttcatatgcatataagatttccaacgagaatggtatattggtattgacaaggagaattcaagagccatactccgcatccagtttgtggttgatgtatcatgacacgagtatttggcattgcatagcgcattcctttttcacctccagcaagaagaagtgctccttggcttgcagctactccaaacgccactgttccaactttaggctttatctgaagatcattttcaagaaaattcaataggttaatatatcacagtttctaggagatgaaaacgttactaggaaaagaaaacctacccaagacatacagtcataaattgctaggacggagtaagtactgccaccgggacaattcaagtacatctgaaacaaggattacttccaagtaaatatgagactttacagaattgaaaaatgattgggaaaacaatgagctttcagctaaccaggatgtcggatttatcatcaatagatgcaagggttacaagctgagatatgactcgctgagcaacctgtgcgttaattggttgcccgatgaagattatgcggttacggaataacacagaagagaggtctaaaggtcctccaggggtcatcactgaaggcattactggggggtttccctttttcgcctctatcactccaaatctaaaacattgcaacatagaaacaaaaccagctaaatacattgaaattagaaaggttcagcgatctatcaaccaatttacaaccgtattgtcatcggttgacattagtactaagaactctaacaatcaatccagctaagagaaacagataaaactggatacataaagtacactgttgacgacttaagaatgttcaagataggaagaggcagtgagctattgcaatttctatggtgagaacataaaatggacacataatcaagaggcaaaacagaaaagagctgaccttggagccttgttgtcaatctttattggggatccagaaacattactagaaagtcctgaaaacatcaaacacaacccaatctcagaaacgaatcaatcaatccggaaactcttcagcatcaaagagcagcaagcagcttaattccaacatttaaaaaaacctaaaacccaaatgctttagagctagtagcagcaagcaaatgatttaaagttaccagctttcagagaatctccatatggactctgtagagcagaaactatacgtcttataggattcctacacaaatcaaaattcataaatttaaggtcagcataatcatttgagagtgtgtgattgcgtttagaaaagttagtagtacctttgattgtgagatagaaaggaagtgggtttagggtttcgagttcgagaagagaaggaaagaccgagaggaggtgaaattgctaaacccgccattaccagagctcagctttcagagtttttcgggttcaggcgtggatagatgacagaggacggcaagactcaaggttactgtttggccacgaactttaaaccgaacccaaccaaggcaacagcaacagtgacacaggtcccagagactcaggtgcactcagaaggtttcaaaccaaattataagcccaaatccatgattcaataagcccaaattacaaacttaatatttttaacatgattcaaaataggcccactgtatctgttaattttgtaaaattagagacggttttgcatttgtgaaaggaaacaaaaaaagagaggttgtgcatgttgttcaaactcttaattagtcattatgattcattagtcattgcttgaccacaacacttaattcacatagaatacatcacttatacttaattagcctttttgcattgactgattattttttgatgcaaatatatttctgttcctcatatgaatcccattgctttatctacaaattcatgcaccatttctctgtgcttttgaattgtgaaaggatcttctttgaatttgaataacaatctaaggtttagtcatttgttgccaaaacaaagatctaggatactcaattttaaaaggaatttaaacaatggtcaaaactgtgaacaaaaagattatggagttttaattttgtatttacgttgactgttgtcagagataaatatgaaacataaactttttattaaaaagaagttattcaactctctcctttagagttttaataacagtcgccggggaaaac

SEQ ID NO: 7257 - DNA, 3000 bp, Unknown
  misc_feature (1)..( 3000): cDNA_ID_2993855_gDNA_ID_1621135_Annot_ID_56546 3000 nt of promoter + ATG
attctttagggtatgttgagaatgtgaatacatttaatctggttatatattcgttttgtaaggagagtaagttgtttgaagcgttatctgtgttttaccggatgttgaaatgtggggtttggcctaatgttgttagctttaatatgatgattgatggagcttgtaagacgggtgatatgagatttgccttgcagcttttagggaagatgggaatgatgtctggaaactttgtttcacctaatgctgtgacgtacaattctgttatcaacgggttttgcaaggccgggagattggatttggcggaaagaatccgtggtgacatggtcaaatcaggtgttgattgcaatgaaagaacctatggagctttggtggatgcgtatggtagagctggaagctcagatgaagccttaaggttgtgtgatgagatgacgagtaagggacttgtggtaaatacagttatctataactctattgtttattggctgtttatggaaggtgacatagaaggagctatgtctgtgttgcgtgatatgaatagtaaaaatatgcaaattgatcgatttactcaagccattgttgtcagaggtctatgcagaaacggatatgtaaaggaagctgttgagtttcagagacagatttcagagaagaagctcgtggaagatatagtttgtcacaacacgcttatgcaccattttgtaagggataaaaagctggcgtgtgctgatcagattctagggagtatgttggttcaaggtttgagtctcgatgcgatttcgtttggtactttgattgatggatacctaaaggaaggtaagttggaaagagctctcgagatatatgatggtatgatcaagatgaataaaacatcgaatcttgtgatttacaattcaattgtgaatggattaagtaaaagaggaatggctggtgcagctgaagcagttgtgaacgctatggaaatcaaggacattgtaacttacaacacgctgttgaacgagtctctcaaaaccgggaatgtcgaagaagctgacgatatcttatctaaaatgcagaaacaggacggtgagaaatcggttagtcttgtgactttcaacattatgatcaatcacttatgcaagtttggttcttatgagaaagcgaaggaagttttgaagtttatggttgaaagaggtgttgttccggattctataacatatggaactttgattacatcgtttagtaagcatcgcagtcaagaaaaagtcgttgagcttcatgattacttgattcttcaaggagttacacctcatgaacatatatatctatctatagttcgtcctcttcttgatagagaaaatggaaggccttagtcaacaaagccaatgaaagcttgtttcagttttaggaagaaactactgaactgtccagagggtttgttttggaggtacggtacggatcagattcgtatcctgttcgtacacgtggacccttggacgattctttgtaatcaacggtcagtgttggaaacaggatcgcttgacgtggacctgtaaagcggggattgtctgacacgtggcgctaatgcaccggccaaacaatttggttgtcacgagctattacgatactttccacgtgatttgtttaagattagccgtccagattatgtaatgttggtagacaccgtaaggaatataatctgagaagcagacgaatattattttccacattatacaaacaaatggctgcgtgtgagagactgcgattgtaaaatctggtgttgttattttgctagatgtcaacaaatcagagcaccattggtttaatttcatgaataaaagccactgttatgataaatataataatattaatcaacacatgtattctctgaataaattggaataaaataatgaatgagatgagtttcagacttcggtgattgagaagtgtggtgtggtgaggcagtggagtcagggggctgcttcaacaacaaacattctctctctcttgtctaagcaaagcaacccatataagatatatacctgaagtacacgaccactttctttctccatctcgtctctctttctgtcttcttctttcttcggcagctatggaagtgtgttggcagatacagagaccagcgagtctcagaccgggttttcaggaaaagggtcgggtcaagatcaatactttttctgttgggttttttcctcgctccatttctagtgtaaatctcttttgtttcttctcgtctcaatttttttcgctgatatgtttgtatatctctttagattctacttatcgggaatttaagtgtaaagtgttctactttttcatagtgagatcgccttttcgattagtatatctttaattgaatcaatgtactatttttaaataagattcaactctggtagggtctctggattgggattctcatgttagaacctcgtttgaaattggtaagagtataggaattgacttaatttctctaggaaatgttcaatttcttctggtcaaaatcgtcacctcattgagaataccaactcgaggggagagaaatgattttggggactatgagctagaagtaagagtcagctgaagattcacagtagaatgaaaatgtctcatcttttatagtttgattttaatatccaccttgttttacttatagtgtgattagtttaggtgttcttggagatgaaaatgtctcattcaatatggttttgatttataaatggctaatattcttcttgtttattgctggtgtggctagtttatgtatttgttagagcttgtgaaccaggtgactgaacagttttataatcgatttctaaccatcagacatgtttggctttcagattgcttcattggaaagtcaatacaaatcaaatgggtttctgcatcagatcacggcaagtgcaggttaagaatctgtgataacctttcattgtgattactgattcagtccttttgatgatttcttattttcttaaccaagacttttcaaggaagaagcaaggaagaatg

SEQ ID NO: 7258 - DNA, 3000 bp, Unknown
  misc_feature (1)..( 3000): cDNA_ID_1378100_gDNA_ID_1621135_Annot_ID_56550 3000 nt of promoter + ATG
atagaagtcgaacttcttgcgggaaatcagggtaaaccaatattacaactcgagaatctcgtggtaaataattgtagaccaccttgatgtctatgtaagacgactataactcgaggatctcgtgggatcctacatggtaattcgatagatatattattaaaaagaacgtgagttttggtgaatcaaatgataaaaaatttatataaggataatattttaggtctagttagtttggtaagaattagctttgttaaactatatcttaaactaaataaatatctaattgataaaaattataaggatagtatttagtgtatattactagtagatattctattggattgcatagtacatatctgcaattagtattaaataacattaactattagattaatgcgtattacacatattttgatgaatgtaacgatttctagagatttggaattattattttttgtttcatacgctacgtaatctaaaagcttatactattaatttttattattgtaatcgtatatttaataatgtaagagagagaccaaaatttaatctcttttttttttcattctcgaaactcgaaaagcttaagaatttgcgttaaatactagtatttctattgagctaaatagattaattaacacaaatgttaattttgatactgccgaatctttttgtaagggttactggattaattgataagagcgacaccatgacagctatttttcgtctaactatttccaagcacttttcttaattctctgtatatatacagtatatcctattgttagggcgttaggatacattaatcgtactccatgattgttatcattaaattaattatccacttaaatttatcgatttttaatagacggtccatgtgatctcattatcttccatattaccatatctttgtttgtcatcctaaaaatttgtttcagcgtatcaatttatattagataagcatatattatgacgttagattaccaaactatttatcaaaaagagtagcaaagaaacagtttaccaaactatatatatatttaaactaattggcagtgaatataaaaccaaaattaaaaatttaaaaacatacattgacaaacaaagatatgatatgtctccacacgaacatatttttacaataaaagatttccaagaatcatgaactcataagagaactttttaaaaagaaaattaactaattaatataaaaaaatcttcacatcttggtaccggtgcgatctaaaaaaaataccaattgactaataaacatgtcttcgtataaacccaaaaacatgtcttgtcaattgtcataactcataaccggtctgagagagtcgttgtgtctaggccgatggtgattaatatctggtatcttacatgttatctatctctgtttttacacaaatccgacggatcagttcagagattcgatgagttttggtatagaagaagagaaactctagatttgttgaaaattctcaacatgataatccaaaacgtaacaggctcaataagataagcgggcctgaaaattaaaacaagcccaaagaacagaatcagaaactggtgggcgttagtgaaggaccactcctgcttgctcttggccttggctgcttagtgaagggaagggagagaattgccagagcagacgctaagcccaaagaaagtgtcaacatctgagttgtgcgacttgtgagacactaactgagaaaaaaactaattgtttatttatgttgaaaacagaaaaaaaaaactattctaattgaatattgtaagaataccgtgtgcgtaaacataaatgttatctaaagagattactactagtggttcctcgacatgcacacaattactttagtttaaagcttagcttttaacccaactcggcactactataaggtatggtgagagatcaatctcaagaaacaagaatattcgaagtctgggaactataatgagacaaaacaatctttaaaatactcgatcgcatgtgttgtgatcacgagctcactacgactcagtcactttgttctttctttaatttagtaaaaaagtcgagttactttgttttctccgtcttaaggcattagccatataaatcgcatcattgtccggatcaactcttgagtttaaaaacccacatagacataaatttggttcgtagtggaatcaatccgaatatatgttgtgattttacgcagaaaatgggaatttacattcgtcaaaatttgagttatgttggatttttacatgaataatactattgtgcaataacatatactacaactgaacataaattttaatttttgtgtcaaagcatataccatcaacgccgttggttttacttttgttgtaacgacgtcgttggctggttaatgaatatgaagcttttccgtaattataccatcaacgccgttggttttacttttgttgaaataatccaatcatattactagaaaaaaacaaaattgccacatgggtgtgttttcactttttactttttactttttacagttgaattttatattaaggaaaaagtcgaaatgaaatagtaaatcgaaaacaaaatcagagttaaaagagtaaattcaggtgagagaaatcagcttcaagcttaagagagcttcgaaagcgaaagcgacgatttcttctccatcgtgagagcaaatctccagagccgttttctcttcttcttcttcctcctcgcgccgtctctgaaactccatcatcgtatcaatcaaattgcttcctcctccaaagtaagcttcttttcgattctcaaccaatcatagtagtagtgtgcttctctcttatcctctgttttctaagttttgtatcaatctccacatagcttttctcgttctattatcgtagaaactcttaaactatagattagatcactcacgattcaatcataatcaatctggatctgaatctaattacgcatcgtgattcaaaatttgtgtttttttgtgtgtgtgtgacagttgaaaaacaatg

SEQ ID NO: 7259 - DNA, 3000 bp, Unknown
  misc_feature (1)..( 3000): cDNA_ID_2168750_gDNA_ID_1621135_Annot_ID_172647 3000 nt of promoter + ATG
ggacgaaccaagggctcaaatctctcttttgagaaatcaaaactctgtactgaaacgggtttatgatttgacttattgtaagctatccaataaggagttccttgtaaacacacactcgactatggttatcaatataaaccattagaggtcttatcaacagccgtcttccaagaatcagatttgaatgagtaaacttcaaccgttgaacttaaatcagattcaaactcataaaatgtaattcctatctgtttcttgaatttgaaagtaaaaaaaaaacataaaatatccaaagatagaaactgagaaatccttaaaagaaaaaccgaaaatgttccaaacaatggagccagcttctttgttcttattctcatctcgaaaagcctggaatctgaagcaagctctgaatatagcagcaatcactgagcatgggaccaagaccagtgaagtattcaaatcttttgaattcttgattctctcccccaatgtagatgctaatattcctgcttttgatcaataatgcaagcctaccatttctctcaatgaaggaactgaaatattttccatatatcgcatcttgaggtacatcaactgtcatcagcctgctccaatgctgcttcttcatcacccataagtgtaacttacatgtttcgtggcattcaagtaacaaagaaagttgatctcctctgaaaatccctaaagagatatactttaccaaattacgtgacccaatggattgaggaggaagaaacaagggctcaaatctctcttttgagaaatcgaaactctgtatcgacatgagttcattaccagatttattgtaacctagccaataaggagttcctcgcaaacaaacacttgacaatggcaatccatcgaatccaccaaagtttgtatcaacaacaaccttccaagaatcagacttgaatgcgtagacttctacccttgatgaatttttaattccacaacgaaatcttacaactttgtaatcataaaaacctgatgattggttaaaaaggtatccaagaccatacgcgtccatggaatggtcaaacccttcgctacatttaatccatctcttttgactcaacaacggattcgcaaccaaaagcatacttttagtgacgtatagcaatagaccgtcacaatgagatatattgatcgctggtgaaagagctattggaaaaggcaatttcacaccacaattttctggtttgttgaaatcgatacctacataagaagttgtggaaccgaacaaaggagaaactatgtgttcgttgttaaagactgtgaattgttgctcacggtaacgcatgtgagacaagtgcttgttgacgaatctcggctctgcgattagggcttcccactgcttgcatgtggatctcaatcgtacaagagatctcgctggaacccgtgagagtatctcctctaccaaatcagacgaaagatccattgtagccatcgtgatcagtagttttttattcttctttaaaagggagtttgatgggatcggccatacgaagatctaggagattatgatatttgttaatatcttcgtttatgaatcatgattattcatatttatctctaatttttttatttttatattatgtttattttaattagtaaaatgatttgacatttaaatatgtaaagtcttggataaatccaaaatttaacaacaagtacaatgatcctactatattatttgggaagtacattttaaatataaccttaatttttgtaagtaattacataggtatgccattagaaataaaattttaaagagtaaattaatttatctctttaaagattaaaaagtcaaatactaatttaattaatgaaatttaattaaaaacgaaatacattattaattttcaaaaataataaccaatcaaaatcaacatataagatttgatatctaaatttaattctaaaactaacttcagtatattattattttcttacagaagtacaatccaattcattattactacattatcattatcatctaaactgattctaataaaactgatggttcttattcataaatacaaaagtcaaaaggtatatatcaaattagtaaaactttacgattttaatattctaatacgagttgttaaaaagaacgtctagttccaaacactatagtttgtatactattttctaagtaaacaaaaatacagtcaaaattataactactatcatatgtcagctagctaaacttattctcatgattataatgaaacaattaaatatgatttttttttttttttttttgtcgtaacagttaaatatgaattaacaaaaaataactgtagtgttatatattactaacgtacacaaacattttttttccccattaaaaaggggtaattgcaaggccgaatggcttatgacggctacaagcccaaacacaaaagaaataatccagagcaaaaatcagaaaaggcctcaggcccaacaagctaaggtaagagcagagaataaaatgaagaaatgaaatgaccaaaatgcaaggattagttgttcaaaaaagacgactagatatagttgcccactggcactgagccactgactatagtacttttttactcttcaacgtatggacaattcctatttgaaaagtagccactgacgatagccactgactataggaatcatactatggacaatttctcactattcatgctttgtttgttcacaaaaaacgatgagttccaataaaccctattaaataacaagtagaactagttccaataaacccaaaatgcaaggacaagttgttcaaaagagacgactagatatagttacagaaaactgactataatatttttcacgtttcaaatattttttgtttcaagtattttttacttttcaacgtacacaattatgcaatcaaactattcacgctccaataaaccctataaataaccagcagaagatgagttaaaaatcacaaatcatacactttcattttcatacatgagcaatattcaagaa

SEQ ID NO: 7260 - DNA, 3000 bp, Unknown
  misc_feature (1)..( 3000): cDNA_ID_3050109_gDNA_ID_1621135_Annot_ID_172644 3000 nt of promoter + ATG
cttcagattccaggcttttcgagatgagaataagaacaaagaagctggctccattgtttggaacattttcggtttttcttttaaggatttctcagtttctatctttggatattttatgttttttttttactttcaaattcaagaaacagataggaattacattttatgagtttgaatctgatttaagttcaacggttgaagtttactcattcaaatctgattcttggaagacggctgttgataagacctctaatggtttatattgataaccatagtcgagtgtgtgtttacaaggaactccttattggatagcttacaataagtcaaatcataaacccgtttcagtacagagttttgatttctcaaaagagagatttgagcccttggttcgtcctcctttttatctttcgagtgagttatcttatttgatgaataatctttctttagggattttcagaagagatcaactctctttgttacttgaatgcggcttaacaagtaacatacacttatgggtgaagaagaagaagaagaagctgcattggagctggctggtggcagttgctataacagatcggcttccgatatatggttgtagatatttaagtttcttcaatgagaagaatggtaagcttgtggtatttatcgaaagcgggtatattagcatctacattgagggatataagcaagattgccaaaaagttgaatacaacactgatatgggtcgtacactcggtggttgctgttatgttcctagcttgctttggcttccgggcttttcagaggtgggtataggtagaagaagaagctggttccagtatttggaatggctagatatgatgcttttatttttttgttttggagaagaatgtaaatatcattataatgaagagttttggtcttacataagcttaacctgatggacattttcatgaagctaacatggtcccatgccaacaaaagacattcgagattcaattcatcagcaaggccatgaagcgattaggctcatcgtttccgatatattgaaaaatgttacattccatttatatacaacatgttcaaaaaaattcagtaagaaaattgataattcaccagcaccaatccttagagagatagcttcttaatctcaacgacaagattctcttcaaactatatcccctttcatttcaattttgacagatgatttcagctaaactaaccaatctcaaaaacttcaaatcctcatgtcaaatcgaagatgaatgacttcttctatgtgtacctttgttcactgaggcaaaggcaatgcagcttcgacttcattccacaagtccacatttctggtaaacttctctttaactaccgcaatgagctcctttgcttcatcgacctttgaacgacttgctagtccattaacaagccacttcatgacactaaaactcggaacccaattcttctccatactctctctacaaaggatcaaagctgtctcaaagtcccctcctttacacaaacaatgtatcaaagtgaagtaacattcactatcaggcttgtatccattacacaccataacctcaaacaaattcatagcttcatccaaattctcctcactgcaaaacccatgaatcaaaagcgaatacgtcacagagtttggtctcatcctacaagacataaccccatcaatcaacgcctttgcttctgcagatttcttccttttacacaaacattgaatcataatgttgtatgtagctacaccaacatgaacaccaaattcatccatcattctcatcactttcctcacttcatcaaacttctcctccttgtaaaaaccatcaatcattaaaccaaagctagcagctgttggctttatccatttcctctccatctctgcaacaatggagtatgatgaactcgttgaacctgattcacacaagactctaatcattctattgtaagtttcgagatcaggttcaatgccatacatcttcggcatttcgaggtagacacgattcgcttctttgtaatccttagccattaaacaagcgaaaagaagagcatttagagacttcaccgtccttgggatctcgtattgctcgaggttgcgaaatgtttgtatagatcgatcaagcatattcgctctgccgtataggataatggcacggactgcgaaactctcggattttggatcgggttggttttggatgaaaccgtcgagaagctgcgatacagcgacgaagtgtttctctctcgctagtgtcaccaccgcaacggagaagatgatacggtcgacgtgataatcaggtgagagtgaagtggatcggcagatttcgaggattcgatcaggattattctcggatttgagaagggagagagtatctcggctcttcttctgcttgctagtgagagattttagtgtgaagatagatgaagaagaagacttcaatcggaattgagtcgctttctggagtataaattccgatgttcgaatgcggaagaggaacgccattactagggttcatgatttccccgaagaaatggagacgacggctgagagagaagaggtttaaaccggtttaggggtttgacaaaataaaatttttaatttcaatggtttacttaaatcatatacataattcatatcatccgttgattttatgactagtcagcaacttggacggttccgattgaatctaggatattttttaaaaagttaaataaaaagttaaggatcatgtttaaaccgggggtttgaacccgacgtgaatcgaacacgcaaccttctgatctggagtcagacgcgctaccattgcgccacggatcccttgtgattacaagcaccaaaggatatttatatagtaaaacacatatcgttttattacaaaccgccgccttctcaaagggttatcaacaatctctcatctttagcattgttttgttatcttcttcttcatcacaatttttctacggtcagagattcaaaagagttctttctctctatcttattctccgatcatcatg

SEQ ID NO: 7261 - DNA, 3000 bp, Unknown
  misc_feature (1)..( 3000): cDNA_ID_2168742_gDNA_ID_1621135_Annot_ID_172642 3000 nt of promoter + ATG
gcttttctctaggtgtgtgttgagtttttaactcttaataatgtttctgcgatgcttctgtttttaatgttttcatcaccttttgaaagaacgtaagcgttgattatattttagggttatgtgtttatttttgaatgttaaaagagtggtcgatgaatgataatcaccagagatcttgagcacaactaggctccagctttagaacagttggagtctttagaggtctatgtagaggcagtgtggtatacgtctctcaaatctcaagttgaacattttacatactatgaatcttggagtcatgtatgtatggactcatatcaacagctccaagctttgaaaaatatatttaaaataattgtcttgacccgttgtcctaaccaaaggacacataataaggagaatcttgattaatttagtagatcttgcaaatcgttgtcttatatctgagaccaaaaattgttggctccgaaacaatattattattttctcaagttcataacgttatagacttatagctttttcataaccgaggaaattagaattctttcattacaataaaaagaaaagtcagcgatttttcccctgctagatcagtaatattcctaaattatgtccattaattgaaatcattattcattaattataagaaatctatcaaaaaattaagaactcaacaaaactattgattaatggtttttccgacatggacacaaaggttaaaaccaaattccacatatgtatttttgggctgcaaactcgtaaattaaaatgctaaagtagtaaatgttatcttatacatgtaagtactatatatatatgacctcatttttgcaaacaaataaattaagatatttggacggcaagctcttaaatttaaatgtttacagtctaagatgttatcttacaaatatataaactatatgacctcattttgcataattaaatatgaacaatgatttttatatacaggcattaactataagattgttagctggaaaattcatactatcttatatattatcttaatgatttgacttataattaagtttaattgtcctctctttttttttggccaaaaagtttagtttctaataagaaattacataacttgagaaaaagaaaataagaaacacgtatacaagctacaagttagtgcaccagcactgctcaatgcaatgactacaaatacttggtcatttcaactcctctcctcatctctctctgatcacactaccttctcttccaaaagtcgtcgccgggaaaacacaaaaagacgaaaatgaccctattcaagaggccatgtctttactcaaagatggacaaggaagatccagaagaggtacttagccgacgagccaagttcttgatttacaaaacacttcaagaagccgacttgatttctcggcgtgatcctcattcgtcgtttatacggctgaagctttatctgttgaaggtcaagatcggaaagaggttggctaagctacgccggagtgtagtatccgccgttagatttggcggaattcgaaagcattctcataatggcgtgagagcgttgaagaagatgttccaaggtggtgcaacaactggactacctaggcctattttctcccttgaagtttgaaatttcatttatttatatttcttgttttgtgtaatttttttttcttttgtttccggagtttcttttgatctctattacaaaagtttatcaagaaatgtaatatgaagagatcatgagttttgtttctttcaaaaaggtaaaaaaaaatcttgaaataatcatttaactatatgatgatctatttttattttgtcaaattttaattatatgatgatgctaaaatatatataagacacacagattagtgtaaatgtgagttatgtttacttaatttttgtacctaaacttttttttttttttttttttgctaaagaacctaaacttttcaaacgctcatcaaagtggttagagatcaaatttaagtttgatgtaaatgtgagttacgtttacgtaatttttgtacctaaactttttttttttgcttatgaacctaaacttattattcaaacgctcatcaaaatggttagagatcaaatttgagtttggatattttggatagtcataaaaagcatggttggatagcttttttcaaatttcaaattagtaccacatatatggatacaaatcaagtaattcatgcatgttagcaatatgtaagttcaaacgacctaccttttaaagcgaaataaaatctcaagtcaaaaagttattgaatccgaaaatccgatcctactcgattgaaagtttgaaacatgtgggggcattcgtgcgacatcgtgaatcaatcttgcgctaggttgtccaaaaatatctctgggatataatatcaattaaaaggaattaataaggacttaaatgcaaatacatttttcttttcgttagcctttcccttgtctcttatttttctaatttctagccctttctctcatcttcttcgttcctcgttcgagaagtcatcggaggtccttcgaagtttctgatcatcggtatagtcttcttcatcattttcttcttcttattgtttgattagatttatccttaacgagcacaaaattcataatgcgtatatatatatacctaagatctcttattgttgatttgctagaaaaatctaaaccatagagaagaaatttctgatttcgtttagtgttaacgatcctgttaggattttagtgcgcattcttgtgaagttgatcttggttgtatcaaatttgttgaatgtttgcgttgtttctcagattgtttcgggtcgtgttcttactttctatggatacatggattaaaaatctatggtgcattgtttcgattcctttttaatcagtagattctcttactgtttgagattggttgatttaattgtggttctggtttcccatatgcagagattcttttcttcctttgagctagacgaaatcaggtaattgaggtttgttaaaatg

SEQ ID NO: 7262 - DNA, 3000 bp, Unknown
  misc_feature (1)..( 3000): cDNA_ID_1817148_gDNA_ID_1621135_Annot_ID_172641 3000 nt of promoter + ATG
aattaatggtttctgttagagttcgattgcagaaaggttgatagaaataaagattcatataaaaggcatcggaaaattatttgattaacgtttgtttcgatacgagtatactataagtttgatagaaatgtgccaattgatttaaactcattagtttcattttcatactaaaagtaaaagcattattagttaacataatttttgctttacaactttagttgatgtgacgctcttcttaaatcttaagcatgtaccaagagttgtcaatttcctcttttaacatgtttcaattttgatcttgtagttggagttggtatttctataggatacacatattggataaaataagagatacaaattgcaagttacgtgctgtgcaaaccatatccacatactaatctttgtaataaccagaatcttatgttggtagtcagtagtctatattttttctcgatctcatccatattcggtcaaagaacactcaataaatcatttacttgcatataaagatcaatgatttccctttttcaaattagatattaacagaaattattattgttatattattacaagcttaatattttggtatgcttacgtatgtattattatgtacctaatcggctaagatctttgtaagaaaattagttgagtacgtatattctttttcttcaaaatattaaatatatccatgtcaccatgtgacatcgcagacgaaatgactcgttgtttttcataattgccacgatacgactgccatatttccaacatatcttaactgttagcattggcacgaatttaatgcaatatcttcaaaatctgtaaacaaaaaaaaaaactacatactataatgtagtgttctttatctacgccaacaaacccaaaagatatctttgatttttatttttttggttggtttcccatccgtttatcttcaaatgaaactcgtaagagatttaatttaaaagtagtattgtgatagattcttgttgagatttaaagaagggttaaattgtaaattagtcactttttcaaacttaattagaaaagtagtcactttactattcataatttgcaaaatagtcatttttcactgtttgatttgtaaatttagattgtacatcacttttagtgtacaaatatatataaaaatacacagtgtacactttacatttgtacactaaaagtgatgtacaatccaagtgtacgaatcaaacagtgaaaagtgattgttttgcaaattatgaatagtaaagtgactactttcctaattaagtttgaaaaagtgactattttgccaacacaccctttcaaaaatcggggaggtttataataaaataaaatatatctaagagacataattaataactacagttgctttaagaatacataatgatacacgtacgtcgaccaaaaataagagcttttttacccacacagtcgcagaagatacttagaacgaaactaaaatattaaacgtaacaaagtgtcaaaattggaaaggttacttttaattgctctgtgattgtgtagtagtgtctggacttaatttccgggaggaagtacgttaaactcacgtgttctgctttgatttccgcgttcggcgtttcattccacaagtgttgtcaaaaaaaagacaagatgtaaatttttcaattatcattatcattattgttatcgttactaatttatgactagttttctattttctaattaatatttttgttgagaaaattttgcgacaaacaattgtcaaaagaacataattagtaaactgtgacaacgaactttttcaataataaaaaaaaaactgtgacaaccaagagtgaaatgctgtgattagaacttgtatgattgttgatcaaaaagaacttgtatgaaaactgttgcttaattagagaaaaagaactgaaatatctgttttggcaaaaaaaaaaataaaaaaaaaattgaaatatacttctctgtttctttttatttgatttttcagaaaaaaaaattgttccaaaagattgtttttttaggtttttaatgcaatacttattagttataattgataaattataaaattcaatacaaattattgaatattattggtttatagttattgaaaattgtaaaccagaaagaataatatatttaaaagtaatatttaatatgatttcttaatatttctgtttttcctaaaagatcaaacaaaaaataacaaaggaagtatatcatttgttgtgtgaatacttaacaagacctatatttaaggaaaagagaagtttgtgtaaaaaatttataaatatgtaatatctttatacgttatatatatatatatatagatatgtatgtatttataactagttttatagttgcattaaagtatatgctacaccatacgtttttaattaagtttatgatttaaggataaatgattaatttgtgtatttgttgaagttcgtggatatcaagccggtggtcctgataaataaggttatgaatttataatcgcactttgcaaattatcgggtacaatctgctaaatgattcaatccggcacatcccatcacaaggcttatctggagtaacttgtttccatgtacgtactagctagtcatatcggtaggactcatatgactctatatatatattgatccaactattcaattttagttactttttagcctaaagagtaagatacgattaggatcggttcaccacatgccaaacatgcaaacgcctattttgtgtaaacattttatataattttcacgaaacggatgttatgattaaaaaaagaaacaaggcttattttcctctttttcagctttgttttttcttcaataatttaaaaaatagcagacacggcaaaatcgcctttatattacacctactctctgagccaagtcgcagaaagatacagacttaaacgaagatagagatagagagagagacgaagttttgtttttattttttcataaatatttgttttctttttggatatttaaaaaaaaa

SEQ ID NO: 7263 - DNA, 3000 bp, Unknown; identical to SEQ ID NO: 7258
  misc_feature (1)..( 3000): cDNA_ID_1378100_gDNA_ID_1621135_Annot_ID_172639 3000 nt of promoter + ATG

SEQ ID NO: 7264 - DNA, 3000 bp, Unknown; identical to SEQ ID NO: 7255
  misc_feature (1)..( 3000): cDNA_ID_2992483_gDNA_ID_1621135_Annot_ID_172629 3000 nt of promoter + ATG

SEQ ID NO: 7265 - DNA, 3000 bp, Unknown
  misc_feature (1)..( 3000): cDNA_ID_1817171_gDNA_ID_1621135_Annot_ID_172628 3000 nt of promoter + ATG
ttaggaggagcttttgtttggtttgtgaaacattggagaaagttttggtagattgtttcaggcggaggttcgacggcaagagaagtagagatgaaggaggagattaagaagagaattaaacaaaagatcttcatttttttttttttgattggattctatttggtgttttctgtagtataaatagttacatgtagtctttaaatttctgttgtgattcttatcgttggccatttttaggatttgttgtattggtcaaggtttctcctgttttttttttttttaatggtttaattgctcaagattttaatatagtcaagttaactatagaaagatcacaagtttcagaagtcaagttaactttagagattttaatatagtcaagttaactatagaaagaacacaatttgtttgaaggcattgtgagaaagataaatttttagaggtattggattaggttgttttgggaagagaataacatgtctttcaacctttatcttccttttttttgagggatcagttatttttgttttcatattagaacttgagatattaatgttctataaaacggtgaataaaagaccaaaaatgttttatactacaaaacaaaattatttttgattcaatctagagaatgaaaaaaaagagttacgaccatgacaagttatttgttattcaaaataaattttgttgaaaataatttaatgttcagaatatttgttctaaaatacatttagaataacaaatcttgaagcgattttacacttcgttctaatgacattaacaaactgaaaagatatacaaatataacgtttagcaatctttttacaaaaacataaggttatacttttcagctaataagagtagaagttattgtaatgatttgagaacaacatgtattttcgtgatgctactaaattaatatgttttgagagtttatgaattttgagagtagtgttgttatatgggatctgaagcatccaacatagcgaaacatcattcgttccatttttttcggtggcattctttcgaatttgcgtcgagtgtcacttttctatctacataaaccaaaattctaggcactgaatgtcaaaaaaaaaaaaaaaaaaatctaggcactataataaatgcaaggaggatgtatagctgatatatgatcttacaaacaaaaacacttcgaacaaaggcgagaacaagtaattaagcaatgtcaagagcttgtggcgcaaacgtaatgtttttttaataatggcatgttattttttgttcttgacgaattccttaaattgacatgaggataacatgcacataaacaaattgtccttctttgaatcattctgaaacttctcccttacacttttctttgaatgtaaagagtgattcttacatgaaaacaaagagtaataataatactttacaactatatcaaatcaaagatttgaataagcattttataaatattggataaacataggagagttttatcaacatccctaattccaatcatacatcttccgcatacggtgtatcaaagtactgtgatagatcccatcttcttgagcaacataattatacgagccaccatgaggcattctcttgtcttgaacatatgcgtcaaacttcttttgtaccttgtaatcagctcctttatacattgtacaccagaaaagtgtttctcccataacgtcatcgtggaaactaaaaccccaatcttctccaggtttcatatatctttcacgaacatcattgtccccagatttacaacgtaccttgagccatttgttgtgagaaagactgttcctgaataacaacgacgtcttttttcctttaaatggattcgaatggccatatgcattgctaatcatgcatagggcaaagacaactagaaagattgaagtatttttcattttttctttctagatgcttagaggttttgtcatcggagtaattttttatttacggtattgtatatatagacatatatgtatgctatttttgaatttacgttcttattatatattgctctcttattattagtattttctattaatgatttgcggtatcaaatcgtttcaaacacaacaatagatatggatggttgagtggagaacaatatatggatttagatctttgagtaaatatttccaaagaacatttgttttcaacacggacagtaatttgacgtgatacatttaccaaatactacctattatattctgccaattcgttacaaacagataaataattcgattagtatatacatatctatcgtttaattgtgataactttattattatattaacactaaagttgattaaaatcgtcttgatttcgattagatgttttattttataacattaaacacacatatttaaaagatgagaaattaaattgtatgtatatggaattttaacattaaaaaaaaaatccaaatgaccaatccggtttatgtcggtccggtttgtattaaccaatcttaatttcaatttttaccatataaacctaaccagactattacaatgaagaagaagaagaaagaaagtgacacaaatcggactctccgttcatcgccggtaagtttctcctctttatctccggcggttttgggctgatttttttagattctgtctaaaactgctctaatgattcaattccttcacgagtttacggattctatgccgtgaatttgaaccctaggtttgcgaaagcaatcgcgagttttgcaatttcgttaaatttctgtctcaaagatgtaatctttttgatcatttagcttccattgctaccgtagcatcttattctttccctgaggttttgagttctctcattctatgtgtagcgttaacgagaacgaattaagattttttgaggtttttagggtttcttatttccagatacttttgctgggatcttacttgattccttttgcagttttttcttgtttaacttgaaatctcatgattgatacttggtttgagcagttatttgaaggggagggatcaa

SEQ ID NO: 7266 - DNA, 3000 bp, Unknown; identical to SEQ ID NO: 7253
  misc_feature (1)..( 3000): cDNA_ID_1817179_gDNA_ID_1621135_Annot_ID_172624 3000 nt of promoter + ATG

SEQ ID NO: 7267 - DNA, 3000 bp, Unknown; identical to SEQ ID NO: 7252
  misc_feature (1)..( 3000): cDNA_ID_1690145_gDNA_ID_1621135_Annot_ID_172622 3000 nt of promoter + ATG

SEQ ID NO: 7268 - DNA, 3000 bp, Unknown
  misc_feature (1)..( 3000): cDNA_ID_2107289_gDNA_ID_1621135_Annot_ID_172621 3000 nt of promoter + ATG
gctgctatcatatccgaaagcatacgagcaaaagttctgataactctcgaacaagctacggttttgaatcaacctagtttcccccaagtacatgttacataccatgagcgtgtagttgctgtagtggttattggagatgcaaaacaataagccgtcgcagtgaaagagttgagatatcgcgaatccatcaaatgcacttacttgattcactgatgtgtcaacaaagtcatcgccgccatttaggtccagcttcattgaacagatcttgtcaccaatgaggataaaccctacgtgactgcttttccttgcggttgctttaccacctacaagattggttttcgatgaagcctcccatttcttgcacgttgatcggagtgatctaagagatgtaatgggaaccctagcgagaatctcgtctaccaaaaccactggaagggttgacatcgtcgtcgtcatttctctgaacttcagaaaaaccaaggactgttaggggttgtttcgtttttgggttcagtgtagccactagacaaatgtgttagtttacgatttaagggtaagaaatcttttctaaattggcaataaatgcttaatacagaaggaaatctggaaaagattttaattatttttggtggattttattccatctttgtatccctaatctacaaaggtgattggttaaaatgactaacagtaatcttgttcaaaaggacgttacacgaaacaaaaggagatgatgcaagaagaaaaaaaaaaattattgtaatcagtggaactaatttaataatctctctcgttacttttgcccggttgatagattcttcgtatatgcactaaacttggaacgtaagaagagaacacaagtggatcaaaataatatctaaacattttaggtttcgagatgtgatctgttccgattttcacaacagatttgtccaatgatgttaactgtttcgtatccacagttttcgttcggtctatacttacgagatttggaaaccacaacaactttcttctcctcgtcgatatagaagctctcaacacgaaatttactcgaaaaatcagagagcgatgtcctttccattgtgaagaacttggtccatgcatgatactgcattggactcaattttagtcgttatctccatgaccaagtccaaacataagtcgtagggttgatataacatagcgagctgctcttctctgatacaagatatatagagtcacagtctcttcatcactagagtgaaacggaagaggaagacgcggtccaaacctttctgatgtaaaatcaaaacagagtaaaaaaacaatacgatttgaaactgcatggctatctgacttctttttgtggagcataataataagtatttcccttcaaagacacaccgttgttgttgttgttgttgttgttgtttgtcgtaaccgaaagcatacatgtctaatctgtggaacttatggtatttgcttcttggttggatccacctgaattccccttaataagggttccacaccatgagcctccttctccttttgtgtatgacgcataacaatcaagccgtcacagtgaaatatattagatatatcgtattgatcaactatatatatttcctttaaagatggatcaacgaaatcgttgttgtggattccttggagatcaagtctcagggaacaaaccttagaatacattactacgaaacctagaaattgcttacttgtatctgctttaattaccaaaaacataattttccgacaaaacgttccaggataaagtgttccacgttgtacaagtacattgcacttcactcagagatatcaatggaactctagagaatatctctcccaccaaatctactgaaagatcggacaaagtcgtcattatttgttcgtctccttaaatgatgaagtgagagacgacacttgtatattctttgctaagaaccgtcatttgtgatcaaagaacaacttgaccaaatgatagatacttattgttctggtatttacaacattaagaactaattacaacttaatgaagaacagaacttgctggtctttgtgttagtctgactgtagaccataagtattagagatcttaactcattcattgatctgtaaataattcacagaactaacaactccttataaagcaaacaaaaaaggaccaatccaaaaacttgaacttttcctactatatacatcttcaaaattagctaacaaaagaaattaaaacttcaaacaagaaaaagatctaagaacaaaaatatcagtctcaaagattgcttgcggtgtacgtcaaagagagccagaagaagatatattaggttccaatctcatacttgaaccaaccttggtttcaagctttcattagtaatttcgagagcgagtcaaggtttgatcatccaatgggtggcttagcgattccttgtcctgaagatacctacatcactgcaaatccaacattttgttcttccgagttgaaaaatagacttactcattttaaacgtaggagtttttccccctcttcttcttaaagtttgaagatagaatgacaggtttttgcaatagacatgatcatgttcatgtcaatacatttaggatcgatcttagaaaaagaaagacaatagactaaaactagtcatctaaattttattgccaagagatgtacttcgaaaatgctagtatagattttagtctcttgacaataaaattttgtataaaatttgtctcctaaatagtatgtttttgtttttgttgtattccccaacagctaattctgtcttctggtatatgggtatacttcggttagtttcggtttgattacggttcacctttcaaatttaaacattgaaattgtaaaccatcttctttgtccaaaacgatgtcgtataataataacacgtagccgttaaatgaaaaccgaagcgtcaaaaaatcaaaatcgataaaaactaattagggtaaatgtcaacaacaatccgatttctgagaattgtcacaagtcgagca

SEQ ID NO: 7269 - DNA, 3000 bp, Unknown; identical to SEQ ID NO: 7262
  misc_feature (1)..( 3000): cDNA_ID_1817148_gDNA_ID_1621135_Annot_ID_56551 3000 nt of promoter + ATG

SEQ ID NO: 7270 - DNA, 3000 bp, Unknown; identical to SEQ ID NO: 7261
  misc_feature (1)..( 3000): cDNA_ID_1817144_gDNA_ID_1621135_Annot_ID_56552 3000 nt of promoter + ATG

SEQ ID NO: 7271 - DNA, 3000 bp, Unknown; identical to SEQ ID NO: 7260
  misc_feature (1)..( 3000): cDNA_ID_2992629_gDNA_ID_1621135_Annot_ID_56554 3000 nt of promoter + ATG

SEQ ID NO: 7272 - DNA, 3000 bp, Unknown; identical to SEQ ID NO: 7259
  misc_feature (1)..( 3000): cDNA_ID_1817134_gDNA_ID_1621135_Annot_ID_56557 3000 nt of promoter + ATG

SEQ ID NO: 7273 - DNA, 3000 bp, Unknown
  misc_feature (1)..( 3000): cDNA_ID_1989612_gDNA_ID_1621136_Annot_ID_57792 3000 nt of promoter + ATG
acctcttagctactgagagtggcatgagatttactgatggtcctaggtcacaaaggcatttattgaaagtcaatgaacctagggagcatggtagagtgaatgaaccagggtctcctagcttttctgagacatcgttctcctgtatgatggcactgcactcatggctcaaaactgttgttttctgaacctcttgaattctctccatgatcaagtctttgaggaacttttgggaatccgggatatgcgtgagagcatcagcaagaggtatccttaattcgactttcttgatattcttggcaaacatagctctatacttatcttctacctctttcttgtgtcgaccaggaaatggaagtggaggcttgtaaggaggaggaatgaatgctatctcattgtttttagcagcaactagttttagagcagcggatgatgttaatggattggttggtcgagtatcacggtcgagtatgggctcgagtacttcagttggtttgtcaacttgatcttcattgagactaaaatcctccccatcttgatatgcactatcctcagtgactgacttgggtctctctctagtggataactccttatggtgatagcatgaacattaacatactccttgggattctgaattgacttccctggaagtcccgtaactttgggagaagaggtagatgcggattctccttccaagtatctgactttagaattcaacgcctcaacttttgcattcaggtcattgtagctgcagtctagcttttggtgcaattcagatatctttttagcaatctcaatggagctagatacttgtccctgataagtgtgtattttgcaagttttgagcatccatttgtcatcactttagcatcatatcatcactgttttataccatttctcatcatttgtcatcactttaattacatgtttaggatagatttgcatgcatattgcatatttgcgttgatttcatgtgatttggagctgttgacgagctatctggaagaagcggacctgatcatgtcaaaccactcgaccccgaggtcgagtaggagcttcaagatctcaacagatcactcgaccccctggtcgagtagaggacatcactacttcaccacatcactcgaccccgaggtcgagtgtcttcatcccatcacctgaccatcactcgaccccgaggtcgagtgtcttcaccttcattgccagaccactactcgatctcgccactctaccttgaagtcgagtatctccatcaccaccactcgactacatactcgatggcaagcttcagagttttcttcatcccgcactcaaccagacactcgagcacaaggaagaaaagaagctattcactcgacctcccactcgactacgtgggttgagtacagttcttaatccgtcccaatacttcgtcgttttaagtattagggtttcggaatatttggctataagtagcatgtacttcacattttcgcagacaagtttttatctagttttattccgcagaccttgtgttctagaccttttgtaatccggatttttctttatctattcagtattcagtatttagtttctgttcttgatttcgtttactgttgttcattctgttatcatcctgctgttacacagttgttatcatgttttcaagttgttcaacgtttatgctttctgttatgatgtctgagtagtgaataggtttctgaggatgggttagagtagtgtagaattctcagtatgctaggtggttgagtattgattgatagatcccttctggattagttgttcttaatgcctattgctttctgatcaactggaatttgagcccagacatttccgcgcccaataggtgttcgatgaaatgtctgaaccactaatttcagagattcgtggccctgtaccaaggtattggttgcagggagcgttttggctttaacttgttcattcgtaatgcttgttaggttagctctcgtcaatggtgattgagtctgggactaggttaacttgagggtctctgttgcggtggcacttagatttggttaatgaacttgttgtgtagggtaatttattgagcatgtcaatcacttgtaaactgaggaaacgaaactactcgattaccccattctcgggaattctttatttgattgattttattgtttactctactgctgtttactgcatcctgtcatctgttgcttagtttctgcaattctttactgttactcgacctggtactcgaccacccagttgtctggcaacagactgtgcagtcgagtatccctgttacattttctgtctgttactcgacctgtcactcgaccacacccagtgctctgtaacgagctgtgttggtcgagtgtttatttgtttctgcttgattttctgttttctgcaggttcacttaggactgctagaacacaccaaaacctgttattgcttggcttgacttagtgacttctgatcacatcttgattgttagcatcacacccatttggattgacaaccttcagtactacaacgacatgatagtgttttaggtttaattgattaaaaacctattatcaatttggcgccattgccgattgggtgtttgtttgttacatttgagatttcagacttgcttagatcaagttctttttcaattttcaaatcggttgctaactgtgtgttttccttgttgtcttcttgatccaggtacacctctgttgtatgcgaactcgatcaacaggcaatcagaacctccttttcaacgacaacatcgaccacatagctcgcgaactcagagaaaggagaaacacagtcaaccttgtacctcagcaaccagtcgaaatggctgaagaatagaatcaacaaaatggccctgccaacattggtgctggagatgcaccacgtgatcaccgtcagaggaaaggaattgcacctcctgctatccagaacaacaacttcgagattaagagtggtctcatctcgatgattcaggggaacaaattccatggtctgccaatg

SEQ ID NO: 7274 - DNA, 3000 bp, Unknown
  misc_feature (1)..( 3000): cDNA_ID_1989609_gDNA_ID_1621136_Annot_ID_57795 3000 nt of promoter + ATG
agcaagtgtgtaatcttgaaccatgagctgattcaaataatccgagaaaagatcacgctgctacaataaatccgtagtagctttctcactctccttaccaacagtttcctcatcaccatgaaacagatttttacgcaccgtctttactgcgaccgcttccagccccaaggtggaggaattgttcgcagcaatttctgaaacatcaacccccaaatcaccagaaactgcttcaagcttacctgaatatgatcctaggaaagcatccatcatctgttgatgatctgagaggctatgactcgtctcaccaaaatcacagtaccaacccgtccagtgggacccagtcggtgctgcagcgcatcaaccctaacctctctcatgtgggcccttctagcccaccatgtaaattattgttgcgcttgacgtttctcaaacccaagacctcaccctttaacaatcttcccataggacaagttgttaccaattaacccacatgagagagattagggttgatgcgctgcagcgccaaccgaatcccatagagtgggttgttacaatcaccatcttacattttatatttttttaattagaaaattttcaaataaaacaatttgctgcaggatttaaattttataaccatcataattatctttttaaattttacatttttaatttaaatttccacataaaaatatttgcagcataatttaaatttagttgcaagtttaataaatatacaaaaatgaatattgtcaaataaatatttttgctacataatttagatttatctacaagttttataaatgtagagaataaaacattataacttcaaaagtattaaccgatgaagtggctaaccgcgattggtcgtttaaaagcttagttggacagcctgagaagcttatagcttctacttttctattttttaaatagtaagatgattaaaatattaattagtgagatgggtaatcgtgattgatcattttttgtagaaaaataagaaaaataacaaaataagaataaaaatagaaatttctaattaaaaaataaataaaaattgacatatttgccatctttgtataaaaaatattaaaatttaaaaatattagtcagtgagatgactaaaaatattaattagtggaatgactaatattacatagattccatatatttttctaagtttacataattactatattttaatataaaaagtaattataattgtaaaaatgttaatttgcaagtttctccatcacatgatgcgttaaaacttttaaaataaaacataagtatttataacattattattataacctcattaagtttttaattttgtttttatggttggttttaaagaatgaaaacactatattacaaagataaatagagttttatccaattaaattaatgttaaataagttatatagttattttaaacttcaatgggctttttaattattattattatctacactaaataatttttttttttaattacatgctaatttaattgaccaataacaaatattaaaagaaatttgttaattttccttattgttaataattttttccctcttttatatatagacatataaattagtatatttagacttattacgcttttttagttttttatacggtgattttgaaaattaccctatttttaagtttttatttgaaaaatacacttttccatatttttaattaaaaatacaattttaaatatgtgaaatgacaattatgtccagatttaaaacaaaagaattattttaaattaattaaaattaaatacgaatttttgaaaaagaaaagaaaaaacttaatttaaatcttaattattatttttaactattttttatatatcttaaatattaaattctaacatattttatcaaaaaatattttaaagtttatcacttcatatttatcacattatataaagaaattaatctaactccaaacacataattctttatttcttttgcttcttctttttcttgtaacaatattttcctttaaaaatttattcaagataaaattatatggaaaattgttagttagttattagcaaatatttttaaattaattttttttttgtgtcgacaaataaacaaaactgattttattttaaatataaatgttttcaaattattagtaaattttagtaaggatatttttgtaattttatattccatttatctcttagaaattatattttaaaagagaaaatatggataggttatttttcaaacaaaaacttagaaaagatcaggcattattccaaattttctctttttatatccaattaaattaatgttaaataaattatattgttcttttaaatttcaagggcattttttaattattattattatccatagtaaatgattttctttttaaaattacatgctaaattgaaatgaccaataacacatttagatctaaatttcttaatttttcttttttgtttagaaaaacaatttttattttattttatatatagatatataaattagtatattagatattttttttttttactttttgtatttttttccaaaaaacaaaacttaaatctcttctgacacatgtcaacatctgatcgatttatttgacatgtggtgcaatcttatgattgttttgttaacggaaatttaacggcatgtcttaaacggcccaatcaacgaaacttagctattttattgagaagtcaacaaaaacttcatgattattctaaatttaaaagttgaggctttttttttatattttttcctctatataagaaagaaaattattgagtctattgaaaattgaagcaaaaaaatggaaaaccgagaacgacgtaattgggctgagtaagaggccacgtattaaagcccagattgttatggtcggaaagtttaagattagagaccacttcacgcgacttaaacaacgaaccaaacctctctctgctcagcttttccgaccaaaagatccaagcgcaagatcaactcaaaatca

SEQ ID NO: 7275 - DNA, 3000 bp, Unknown; identical to SEQ ID NO: 7274
  misc_feature (1)..( 3000): cDNA_ID_3050138_gDNA_ID_1621136_Annot_ID_172667 3000 nt of promoter + ATG

SEQ ID NO: 7276 - DNA, 3000 bp, Unknown
  misc_feature (1)..( 3000): cDNA_ID_3050126_gDNA_ID_1621136_Annot_ID_172681 3000 nt of promoter + ATG
ggggtagcgtcttttcccacatataggctttatctccaagtgaaaatggaaacaagcgaagcttgaaaccatcttcactaactccattgattttagtatggccacagagcctttcaaacttgtcaagatgatctagcggatcctccattggtaggccatgaaacttgttcccctgaaccatggcaatgagaccgcttttgatctcaaagttattattctgtactggaggtggaacaattccatgacgctggttgtggttgtgagggaagtcaccagcaccaatgttggtaggttgctcttgctcatctacaacgtcagccattgtgtcggtttctgtgtgttctctttgttggcgagcaatactgtcgatgttatcgttgaataggaggttcagatttccttgtgaccgtgtatgcatgcaacagatagcagccgggatataatagacgaatcagagatacttctgtaaagcaggttgcaaggtacctgaaacacaaagacagaaaaggcacaatgttagtaacttgtgtaacaaaaacgaacttgatcttaacgtttctaatgatctcaaatatagcaaacaaaccctaaattggctacggcgccaaattgatagtaggattttactcaattaatccctaaaacactatcttgtcgttgtactattttaggatgtcaatccaatccggtgtgatgcaaacagatgagatatgatcagaaaactctaagtcaagccaagaagaaagttggttggttctaacattcctagtatgcaataacagaaatgaaatgaaactaaaagcagaaatggcaatagcaggcaagtgaatgacaaagcagaaatgataacaggcaatcaaatggataaacgattcctaaggatgggataatcgaatagtgtggtctacttaatctattcaggcggttgagaaaacttcacagaagctatccctagacaacaagttcaacaacagattaattcactcccgtgatagaaatcctcaagcaaagctagacactgacctaaatccctttagcgatctctaactaagcaggcattatcgaatcaacatgttaaagtcaataccctctctacagccaatcccttggggtagagtcagatatctctggaattaataggattcaacgcttaaacgccttatgagcgctggacgtctggactcatactccacattagccagtgaaacaagcaataagcgcaactaatccagaagggattctagtattctaaactcaacaacctaaaacgaccaagtaaaccacaactattctatcccatcctcagaaatacagttcactactcagacataatcaaagacaatagcaaagcaacgattgaaaacatgataacagaaatgacgaaagacttaaacgaaaacttaatatcaaatacttgaaagtgaaaatacaaagtcgcaggagaaacattgcggctatgaaagttgcgaaaatgtaaaagcgagataataacggatgccctagggaaaaccctaagaggcagtttatataagcgagaaatgaaacaaataaggaaactaaatatatagcgaatcttcacgtcatgatcctgcgaccgaatatgtcattggcatctgacgggctgaaatgagcttcctagtgatcgagtatgtcattgatcaaactgggctttaggggctccgtcttgcaatcgactaagatgcagtgaagtcgagattgaatggtccagcgatcctgtgatcgagtgcgatcgagtggatgtcatgaggtggtgatcgagtggcttcttcggcttctcttctattctttgttctcagcttgtctggttgagtgcagaaagagcagataggcttcttggtggtcgagtggtgatcgagtggttctgatggggtgattcctccggcttcgcgattgagtgaaactgagctgcttgcttctccggggttgcgatagagtgatttgccctggcagggctccgaggctgcgatagagtacttttgctgaaggcgtcattgggcattccgacttcatattctgtttttcctctgtttgaactccaaaagcatccaaaatacctgaaaacaaccaaatatgccatgcacatgcaatcctaatgcaaaatcgtcctaagtatgtaaaacacactaaaacgactcctaatgagatgatttatggatgaaacaatgacaaagtggtgaagaatgaatgcctaaatcatgcaaattatagacatatcacaaacacacatagtttttcatacgaaggaaaacgccttacgttattgcaatctcaaaagtgttctgagccattggttacaagtcaagatattgagaagaaatctgtgtctttggaagagacgaaacctgtactcttaataaataagtctcaactgttcgaagaacttcaagaggaggaagtagcatttgtgctaatgatggaaacaagtacagtctctataaattaatactagataaattaataatttctataaattaataaattcttccgattccgagttgggaccagtgtaaaaattgatacaaattgataaattaataagatagtaactttttttgaaaatcttatgtaaatatatggtcccatcaatattataaattaataattgtataaatttatgaatatatatatttatatttatgaatatatattatgtaaaaatttagtaaaatatgactctagtatttcttttatacaatttaaattaattttttgtagagttccgatctaatatttttaccaagtacaaaaagtttattttgttttaaacctaataatggttttatacttgtaattgattttaaaaagattattgattatatagaaaaacctattttttaaatcaaattttgtaagaaattacaaaaatttgtaaaatatctctatcaattaataattattaatttatcgataaattaatacctctttaaattaacaaatttttccggtcccgacattattaatttatagagtttttacatg

SEQ ID NO: 7277 - DNA, 3000 bp, Unknown
  misc_feature (1)..( 3000): cDNA_ID_2165569_gDNA_ID_1621136_Annot_ID_172686 3000 nt of promoter + ATG
tcgaaataggatcatccggggcaaagccaaaacgggagaaagttgcctcgaatacatggttgattgaccatatgtgcccaaaagctgataaacaatcaaagggcaaaacaaataactatttgagcaagaatgggcaaaggtgggcaagaatgggcaagattcggcaacacgggcgtgtcgtaggcgaagttgccctgccgggcgttaaccgccctttgaccacgccatggacgcatggaccggctaacttggggctcaagcaaagttgcttggagccgaatttgagttgcgtggagccaaagttttgctgccacgtgtcgcccaaccgttaaggcggcgagcgtgtcatcataggcggatgacacgtggactgctgactcgcccttgcgaatgacacgtgtatatgctgactcacccttgtcgcccctatataaacacaactcgacccaaataattttgagaggaaaaagagagggaaacaaaaggctgccaagttgttaagtgatcacctataaccgagaaaaaacttcccgcgattgagaaactttgcccgtgatgaagatcctttgcccccaactaaggaattcatgtttgtgatcaagagaacctgtttgtaaatgagaaatccctgtccgcgaccaagaatcgttgaagctaaccttaaaccttcagccgaatctctatgagtctcgaagcgtgtgatatggcacatgataggtttgagtgtttatttgggtgattgattacttgtttgttgcatgatcatatatactcttgtattcattgatttatttcatgaattatatgagtattgcttaatggtgtgaatgatggtagtaagccgcatatgagatcttttagtttcttatgcttaaggcttatggttgggaggttgtggtaagtaaggatattgatgattctatgtgtttgagtaaccatatgtctcataatatcttgaaatattgggtcttgatgtgtggtgctcgtggtaggagacagaaaccataagcgtatcaagatcatggtatgtctgacttcgttaatgaaccgtgctatcgtggggtcttgtaatgatgttacttgatcgccatgtagtgcgaagggctcggagagacggggctagctaccctggccgagttgtctacatgcctttgtggttgtaaagcgggagatcccgggagtttgtgtttttggtgtgggggtgtttgaaggcagcatatcagaccctataaaacttaataaaactggagtcttaattgcatgtgcatgtatttggtaggtgctttggcaatctacattttgttgttattctctgttgcgtgtttcgggatggggaactaatatctattgtaggtagactgagctcactaagtaatcttagataacttatcacaccatttttgttttgtagaaaaccctcgtgggaaccattagagggatgctcatgacgtaggaaaggccgtatagagtttgttgcttttgcaaaacttaatgattttggttcttgttggatttgagcgtataggctcgaggcgccattgtaaaaaagttttggatacttggttgtacgagaatttatatgttttaaaagattatttttgtataaagagtgtttcattcgatattagtcttgtccgggctaacacaactcacgatcatggcaagggttgaaaagcctaaaccgcgttcgtgagagatggttcatgtgggtaatcctgctaagggtctaaatctatttggaacctaaattgggttgtctgtgtgagctatcaatgtagtgtttctaggttgcccttatcttgttcggccatagagcgattcgggggcgttacagccgctgctttatcttttacgcttttcttcttcttctcattcttcttcacatcccaataacctctaacaaactaatcctcatgtatgtcttcgatcaagtgatcaagtgttgggtcttttacttcatctggccaagtatgaaacagctcgcttacattatccttcataaccattttatgcacatgcagctacaacacaagagaatattgataacacggctttttagcccgttttagctattgttttcttatgtttcagagagcatttggtgccattctagagccaagaaaagtagaaacacgtattctaggtgccaagaaggtttttaagagttgtgaagctaaaagtatcaaaaggcgatcaattccagtactttagaagtttagcatcctttcgaggttttccccatcacggcagcgagatatttcggtatgcatggaaagctagaagattcaagattaacgttgaagtcgaaccgaagctatccatgaagccgtttagaagatattacccgaagagtgaaaacatgtcaagaatcggccgtttggaaataatgaatccagaaagcatccggccaaggagacttgaacccgggcagctccgagaagcctatcaacgaccagtaggtcacgcccaagtccttccctctttgtgccaccgtcattaggcaccttcccttaagcccacgactcggcccgatcacttattcacctcgcggattgtcgttcttacccctaaacctatttcttggccctcaagtataaatacttgttttaagccctaactgatgtagcgtaatcatccatctatctctttattgggtttttccttttaagttttcataatactctcgttgggctttctttgttttgaatgacggtttagtgttgcttagtcgacaagctttcgtcatctagggttttcgtttttaggagagtataaatactcttattcttgtaagcttataacttggttgttttcgttttataaaagagaagcttttttcatctgaagtctttgagttcttctatcttttgatccatagatacttaagaaagcgagagatccgagctacgaacgaatactcttgatccattgatacaagagctttcaatcgtatatttccctacattagttggtatcagagacaaatgatccttcatcatg

SEQ ID NO: 7278 - DNA, 3000 bp, Unknown
  misc_feature (1)..( 3000): cDNA_ID_3088491_gDNA_ID_1621136_Annot_ID_172670 3000 nt of promoter + ATG
atagatcatccttttcttgaaaccctagtcgcctatcactctgcttatgatttttcgtatttcttccattttatcattatttgctaatgtgttttaatgaaaatcgcacaaaaactacctttaagttacaaatttatagtaagaatatatgtttgggttctttaattcaactctctctctctctctctgaggaatttcaacaaacactttgtggacgaatctaaaatttgtaaagagacggaatttgactaagactatgatggatacaataagagaagaagaaacccagaaaaaatatatgaaaatttcaactttatgaaattaaaggaaaaactgaatcgaaatctggaaaatcttcagcttttaagatctaagaagagaaaagaaaagaaaaacttagatctactttttggtgtttttgatgagagagaagagagaaaaagtatggaacaattgtcttttttctaagaataaatattgcaaatgttttgtatttacttttgtaaagtggagagaaagaaaaatgaatgaagagagaaaaaaaataaaggttggtaaccatagttagtttggattagttaggttgggttgagggtgtagtagtaaaaaaacttaaaataaatgctcactacctctaaagtaccccatagccaaattaagttttaaaaaagtgtctcatagcctaatattcccttagttttacttatgatttttttctccaattaatttctgcttttaaatttactcaattatattaaaacaaaactaggattaatatatgcaattaaaatatacaaatctatacaaaaggaaatacttaacattttgtgtatctattaagatatatatatatatatatatagagagcataataaacataaacattagaaatacataaaataaaaatttacctaatcttgataatcattaatacactatcgtttatgtaacaatataaaaatagaacaccttcattatcgtcaatacattaaaattatttaataactgttttgtcctgcatatagtgcaggttgtttatcaagttaataagtatctaataaaaaaaggtcacattggaaaaatacacttactctattttcaattgttttttataggctatttttagggttgtcaaaatggtttaagtttcatggatcaacccaattcaactcaatccatgaaatctaattagttgaaatatttgactcaaatgagttgatggttcaaataagttattgagtcaaatggttatattgatcaaataagttgggttgcaatgaacccaccaattttggttaaaatgaattaaacaaacttaaatctctaaaccgatatcaatttgagtttcacaaaatttctaaaccgattgaatatcaaaaatcttttttcaaatggcttcatccacccatccgtatatttattatcaactaaatatcatcatcatcattaccctctcataatatcatactaccatcaccatcatcatcatattatcttcatcataatcatatcaacatatcatagtcatgatagctatcatcatgatgataacattatcataaactcttaattttcccgccaaaaacattaactcttaatttttttgccaaaaaccggtaaacccgtaattttcccgccaaaaacgtaaacccataattttcccgccaaaaaaataaacccgtaattttcccgccaaaaacataaacccataattttcccgccaaaaacataaaaccgtaattttcctaccataaacgtaaatccgttagtcaatcataaagctcccgcaatcgcacctatttttaatcgctaaactagtcgttcaaaatattttataaagcttgaaaccgtaaccgttcgattccgtaaactcttgcagtcataaccgtaaccgctgcgtttcaacaagtcaggcccttagataagttttcttagtcatgggcattcggttatccattcagtttcagtttgtatccattcggttatcggttctttcggttataaagtatagtatccatttggttattttgaaattttggttcggttttggtttggttccggttcttttgcttttttaaaatttaatatccatccggttatttttctatgaatatttttagatattttggttatttttgttattttcatatattttcggttactttcgagtatttttactattgtatatatatttaattatttagtttagaaataactaatatttttgaaattataattatatttcggatattttcggttacccaaaatatttctgttgtacccaaaatgtttcggttctttcagttatagaatttaatatccatttggttattttcaactttttggtttggtttggttcagtttgtttgcatcggtttcagttcggtacattcagttcagtttatttgctccggcctaagttttctagataaggaagtttaggcccatgtttttatatagattttagttttgaaagtactttggtggagataggccatgacacctcgttaaaatcaaaatccaatcagaacatttcgattaatacacctcatttacgttgtccaattcaaacttactatttttcagcacatgagagattcttagtgtttttttggtattgattgatgtgaattatgtttcttttacgaaacatatatttatagtgtttagtattgggtcacaatttataatcgttaggaagcatattccgtattatgattttgcgaataagattagtttcttaaaaattctttaatgtataaatttattatcgtaattaaatgttgccgagtttgaaaatggagaataatgtgttcctcaagttggtacaatgttcactcatactaattgaatgacaaagttttagttgtcatatataaagataggctatgttcttttacttaacggagcggcaacggcaaaaaagaagaaaaacaattaggcaaagagaagaaagtacagtgatgagagaaaaactgtcgcagaagatgaacgccgatg

SEQ ID NO: 7279 - DNA, 3000 bp, Unknown
  misc_feature (1)..( 3000): cDNA_ID_2165457_gDNA_ID_1621136_Annot_ID_172658 3000 nt of promoter + ATG
ttctctggatttgaatgccactggggacagtgtcgtttaagtatgggggaggttcttactaatgatgcttttatttttgtttcttatcatttttcgttttgtagttcatttggttatttcctttatttcctttttcaaaaaaaaaaaaaaaaaaaaaaacgttttctttagtttagttaggaatcatgatctatatttctcttgtttattgcctgattgatgagtgctgcaggttcgagtcaatccgactattggaaaatctagatggcaaaccaacagacttgaggatatcctagtttccaactcaaccactaaagctggagctaatctgctcttccttttacctcttcaaacagttagtattcatagatcttgactccttgttcatagctgttatggagaccaatgtgataaaaataatatgttcctctcctcttataaaaagaaaaatataatgagagattgagacgactttcagatagtgtataggggtaggaatgtttcctatgaccccattattatacattatttggaatgatcaattacaaaggttggaaaatgccgagggtgtcgatcaagtatgcgagttcccctttgtttactctctaaaaagaataagtctggggagagaaagaacaccaaaaaagaaaaaaaatataaagaatggtcaaatgttcatggtatagtacatgaatgagtctagaaggatcttgaatgttggcttgtttgatgagacccagcgatgaaagcctggtgggtgtagttgtggaatttaggtatggaatctagaatgttgtgtaagcttgcagagaagtacatgttggtaaggatttgattagacttgttaggcatatggacttagtttggatgatcatggcaataggctagagaattttgggagttcctttgttttcaaaacctcttccacgggttcggtttttgtgtttcgcttgagggcaagcaaaagcaaattctaggggagttgatataacccgattttcaccgattttatctatgtttaggtataggattttgagtctttatgttatttctcgagtctttctagtgtcttttcaggtattctatgcagtgggacaacaatggagataagtagacattatctggagcaaaagctaaggaaaaggaagctaaggacgattttggttcaggaatcagcgaggagtgtcgatcgacacactcttggtgtcgatcgacagcagtttcggcccagcaaaaacctagacgctttcgagtttacagaagctcaagtttgccccagaagatttccttatttgcattattagtcccttgacgtctttagggtctatatatattgtttttagacctaagtttcttttatcaagtcttttatcaagttctttgccaaccctattgtgagagatataagctattcatccattgttcttgagagtttcattcagatctatatacagtgaagagatcccttctttccctttctctatctcaaatattttgtttgcttcatccaatatgtctgagtaatctgcttgttaggaatagggtttctcattagggattcatatggtttagtagattgccccctttgctaggttatctgtagaattcttcatctttaattatgcctaatgctagatctagagtaattaactagatcttgaatctagacaatagatatgcccgccataggtatctggtgttggatctattatttgatgagtctggtttataggtgtgtaataagaatcggcctatctactaagatgaccaattgaactcgttaagaatgcatatttaggttgatagtttatcggcttctccggttataattagctatagatatagggagtttcgcggcacgcccaccagttattccataattagagtttgagtttaagaatggttcgttaacaacctagctttcactagatctactaaccaatagtttcctgagaatactctgttcctagctctttattaaatcgttcacaaccaaatcaatttgctgtctttttactttgttctcttttattttcactattaccctgctagcttaatctcaatatttaactcattgtttgaacaaaagaactccgtgaattcgattctaaaatactgcaattgatctcttatttgagagagtagttctaggttatttgaaccatatcagttaataatttagttcttataaaaaaaccagaatttaccttaaaataagtagtcattggcttagagacttgagagaattcataccaagaaagactctcccaatcacaaatatttcctttagtgcttgagttttgttaaatagaaaaaaaagatcttcatagattagaaaatttaaatactctttaagaaaacgaaataacaaagtttaaaaatgtttccatataaatagttgatatcttaatagatttaattaaataacatcactgcaaatattctgtcaatcttttctggccggagaacaaagaaacgagcacataactaggttaacatattatagaaaagtcatttctcataaagttttgagtgtttagctatcacgtttttactggtatcttttatttgttcttcatgtcaaaaagaaaaaaaattcaagaaactcaatcttcagatttgtctaatgttattcaaaacacaactgataagcggttcagacatgaagaaacttctgaaaatacacccccgtcattcaatgcaccaagtgtgaagaaatcagtgccagttagttatgtttttaagagcgttctaagtgatattacaaatcaaagagttcatacaccaagcattagccaaacgcctggcactttggagtcatctttaacatcaaaaacaagttaagtttactgattaatctataatatatatttaagctttagaggttgtcctctataacataactacatttaacaagaattatttatgaaatgttaacaatgccagcaggaatcgatctttcaagttctatttaatcatatcgaaagcatttaacatatg

SEQ ID NO: 7280 - DNA, 3000 bp, Unknown
  misc_feature (1)..( 3000): cDNA_ID_1989607_gDNA_ID_1621136_Annot_ID_57797 3000 nt of promoter + ATG
ttctagcctcttttgtgaaaaccctaaatatgttcctgaattaatgaccgtcaacacacatccaccaaactctgaccatgtggtcatttcaatcatttggaattatcgaccatccatgcacatccacctaactctgaccacgttgtttgcataatagtaatttgcatacaaatgagaagggaaaaatagtaatttgcttatagatcatccttttcttgaaaccctagtcgcctatcactctgcttatgatttttcgtatttcttccattttatcattatttgctaatgtgttttaatgaaaatcgcacaaaaactacctttaagttacaaatttatagtaagaatatatgtttgggttctttaattcaactctctctctctctctctgaggaatttcaacaaacactttgtggacgaatctaaaatttgtaaagagacggaatttgactaagactatgatggatacaataagagaagaagaaacccagaaaaaatatatgaaaatttcaactttatgaaattaaaggaaaaactgaatcgaaatctggaaaatcttcagcttttaagatctaagaagagaaaagaaaagaaaaacttagatctactttttggtgtttttgatgagagagaagagagaaaaagtatggaacaattgtcttttttctaagaataaatattgcaaatgttttgtatttacttttgtaaagtggagagaaagaaaaatgaatgaagagagaaaaaaaataaaggttggtaaccatagttagtttggattagttaggttgggttgagggtgtagtagtaaaaaaacttaaaataaatgctcactacctctaaagtaccccatagccaaattaagttttaaaaaagtgtctcatagcctaatattcccttagttttacttatgatttttttctccaattaatttctgcttttaaatttactcaattatattaaaacaaaactaggattaatatatgcaattaaaatatacaaatctatacaaaaggaaatacttaacattttgtgtatctattaagatatatatatatatatatatagagagcataataaacataaacattagaaatacataaaataaaaatttacctaatcttgataatcattaatacactatcgtttatgtaacaatataaaaatagaacaccttcattatcgtcaatacattaaaattatttaataactgttttgtcctgcatatagtgcaggttgtttatcaagttaataagtatctaataaaaaaaggtcacattggaaaaatacacttactctattttcaattgttttttataggctatttttagggttgtcaaaatggtttaagtttcatggatcaacccaattcaactcaatccatgaaatctaattagttgaaatatttgactcaaatgagttgatggttcaaataagttattgagtcaaatggttatattgatcaaataagttgggttgcaatgaacccaccaattttggttaaaatgaattaaacaaacttaaatctctaaaccgatatcaatttgagtttcacaaaatttctaaaccgattgaatatcaaaaatcttttttcaaatggcttcatccacccatccgtatatttattatcaactaaatatcatcatcatcattaccctctcataatatcatactaccatcaccatcatcatcatattatcttcatcataatcatatcaacatatcatagtcatgatagctatcatcatgatgataacattatcataaactcttaattttcccgccaaaaacattaactcttaatttttttgccaaaaaccggtaaacccgtaattttcccgccaaaaacgtaaacccataattttcccgccaaaaaaataaacccgtaattttcccgccaaaaacataaacccataattttcccgccaaaaacataaaaccgtaattttcctaccataaacgtaaatccgttagtcaatcataaagctcccgcaatcgcacctatttttaatcgctaaactagtcgttcaaaatattttataaagcttgaaaccgtaaccgttcgattccgtaaactcttgcagtcataaccgtaaccgctgcgtttcaacaagtcaggcccttagataagttttcttagtcatgggcattcggttatccattcagtttcagtttgtatccattcggttatcggttctttcggttataaagtatagtatccatttggttattttgaaattttggttcggttttggtttggttccggttcttttgcttttttaaaatttaatatccatccggttatttttctatgaatatttttagatattttggttatttttgttattttcatatattttcggttactttcgagtatttttactattgtatatatatttaattatttagtttagaaataactaatatttttgaaattataattatatttcggatattttcggttacccaaaatatttctgttgtacccaaaatgtttcggttctttcagttatagaatttaatatccatttggttattttcaactttttggtttggtttggttcagtttgtttgcatcggtttcagttcggtacattcagttcagtttatttgctccggcctaagttttctagataaggaagtttaggcccatgtttttatatagattttagttttgaaagtactttggtggagataggccatgacacctcgttaaaatcaaaatccaatcagaacatttcgattaatacacctcatttacgttgtccaattcaaacttactatttttcagcacatgagagattcttagtgtttttttggtattgattgatgtgaattatgtttcttttacgaaacatatatttatagtgtttagtattgggtcacaatttataatcgttaggaagcatattccgtattatgattttgcgaataagattagtttcttaaaaattctttaatgtataaatttattatcgtaattaaatgttgccgagtttgaaaatg

SEQ ID NO: 7281 - DNA, 3000 bp, Unknown
  misc_feature (1)..( 3000): cDNA_ID_1817235_gDNA_ID_1621137_Annot_ID_56563 3000 nt of promoter + ATG
gtctatgtttaataaaagagttgagtgatatgatataaaataatgggagaaaataatgatattatgatattccagaaccaaaaggtgtattttttgttgttgtaattaaacatcatttattatctatgttgttgtaattagccaattaacgaaatataataataaataatgataaaaattggaccagctttgttttttttcatatttgtttttcttttccgggcaaggaccacttatggttaccgtatcagctgtcttgtatgtctcattctgtcaattttaggttacaaacacgtgcatgtacatatcgtagtaacatatgagtccatacaattctagtttcttttttttttaaaagacttcgaggttgatcatcagagtaggcaagatttttttttatgatacacactttgtcacagtccatggtcactttgaaacttttaattcgaaaagaaaagtttgttgcatcatgcaagggaagcgaaaaaaaatcttctctcgcttcaataccagattgagaaaatggatcgaaaatttagtttttaattaaccgtcttttatgcatctatgtttttattcttctttgccatagatccatatgtatagatttcaaattttatgtttgtaacctaaattttgttcattttcaatgaaatatttacaatttaacaaaaacaaattcgaaaaatacaaagcatcaacttaaaattcataggcaaaaggcttttttttttttttttttcaaaagactgtcttgttattatgaaaatgtcatttaaataattttgaatgctagcttttagctatctaacctagtggtagctagtaaccaaatggacattaacttagcttgtttatcataatttatctaagatcgatcgagagtgttattagacatttctttgaaacatcgcaaaatgataattacggctatagattttaaagtttcttatgtatttcaagttctaatcatagataaagaaatttaaaacagttttaatcgtatcttttaattcacacatgcacatatacatgaaaagtaaataacttaattggaaacattttttttttgataaatgtatcgtaattttaatttggttatcttacctgttaccaacataaaatgaggacacgttatgatttttttttattttttttttaatgatttgttttagtatataaatattttgattttcatggccaaacatatagcacagttcttattagttattacgcgcaagataacacaattatttgtttatctttagcacatactcgaagtcgaagatcctcaactgagatcaagtttagtcaaatatttaagaagaagctataaacattacgtactattatagacttaaaaaaaattcgtacatgattacaccaataagttaactgcacatcctcgatttaaagaatgtcatttgatgataagatttatcagataacgtgtctttttaaaacactaaaaaaagagagaaaaaaatacttggggtgtatgtattgttaaacaagcattatcttgtttgcgatttatctatttctgaacatcattttctttgagtcaaatgtctaatgtttgaagtttgaacatataaatacgtattacaagatgatacacaatataattaaggaataaataaattaaattttgatgaactctaatttccattttattttggttacccaaaatggtaaagtacgagaccacatgatagagatagaacagtgtactttgaccttaattatgcttttttttaaacgaagttaaaaaatctcacaaggtcaaagctggaaaaatgaagttttgttcttcaaagagaatttacctgggcttgaagtcctagcggcaaagccggcagcgaagtttttgtccaatttatttatttattctaataatttatactccacattatatatgttaataaaaataacaacacaaatcaattgtgtttctgtaatatttttaacaaattaaaaatacagttactattccttttttttattcttccctatttcatctataggaatataaacttgtaaataattttttggtatttttattttttgacagccttgtatagaaatttaaatatacgtaaataaattaggtaatgtccccaaaagacagagacagttttagtataatacaatttcaatacaatgacataaagtttaattatataatttttaaaaacgctaattatatttttaattaaatctctcaatcctcgtcgttgtcgtaatcatatatcccctccccagttcttcttccctctctctctctttcaccataacaaaaaaactgatttgtttactctgttaatcagagaactttctctgagaaaataacaggaattcagttagttcttagttcctatcaatcaccagctgaataaattcgtttttaaaagagaacgaagaaattcaaaaaacccaattctgctttttcccgataacttcgatcgtcttcgcttgggttttgtgtaatttgagtctgtgaattgaaccgagccccaccaaagtaaatgctccataacgttgaaaacattttcttctttatacaagaatttcaaattgtttcactttctccataggggtttttggggttctctgtttttctttgacgaattttgattttgcaaattcaggaaaaaagtttaaacctttaatcgtttgtttaaaggatcgattttttaatttcttactcaaattgggatgcagtacataagtagatgtttgcctttttgtgtaaactttgtgaattttcaatgtttatttctcctttagggatttgtaggttctctgttaattgagaatttcgaatccaccaaattggaattgaaacgtggtgattccaaattcgaggttatattcaggttttgggttaggtgaagatctgggtttgaagttatagaggggatttagggttctgggtttatagcaacaaaagggttttgtgttttagaatcaaagataagattgagaaagtaagaaatg

SEQ ID NO: 7282 - DNA, 3000 bp, Unknown
  misc_feature (1)..( 3000): cDNA_ID_1817231_gDNA_ID_1621137_Annot_ID_56565 3000 nt of promoter + ATG
gttgatcatacaaagcggtcttatcaatagtctgatgatgataactcttacaaacatagtaaaacacactctgaaccaacaaacccacaagattaaccatcacaagaacaccaactaacaatccaccaaccaaagtcctagtaaaagttccatacttcccaccaccatgaaccacaacagcaccaaaaacaactccaatcaatccacagaggaaaagataaacaaagattaaccccatagccatcttagtcttccctttaagcaactcataagcttttctcatagcggcgattccgtaaaccggttcaagaacagagattacactacctaaatgccataaagcagtgaaataaacatgaacaccaaagtatagaacagagattataaccccggctacaatagctaaacctaaactattcaaatcaagagctacgagaagcatcacgaggaagacaaagaagactgcgttataagcaaacatcaacagagcaacccaaaggaaagttataaagagtcgtttaaagactttgggaatcgcagagagagttgacgagaaagaaacaggctttccggtgtaaagagaagcgacggtgaagacaacagcagcggttgagagaagagagaaggcaaagaggaagatcaagtaactgaactggaagattagaagaacagtccaatcatgacgtgaacgatctgagtttggtgggtcggatttgtcgagtttggctaagattggttgagtgaagagtgagtgagcgaggatagcgaaggagagagggaagatgaaggagagggttatgaggtagaaggttcttggagatcgtttcttgattgagattgattcttgaagtagttgaggtattgtcaagaattgaagctcttctggttggagatccatggtttgtttctttggaatgaggtttgatcggagaagaacagagaggagagattaagaatcaccgacgggtcaatttcgaaatctgagagagatgaagtttttttttttttgttgaggtgtgttttgttgatatcaagaagatggagaaaaaatgtttacgggtaaagactttttttttccttggaaacttctgggaaactcatataacacgttttgactagtattgttattgtgaccatttttttttggggggggggggcaactaattgtttattttttgctttaattaatatgatggaatcgttattttatgggaaaatatgtaagtggtaaagagatggacaaaaaggaaaaggagatttggtcaagttttatgagcacaactctctttgcatgagctgagacgcaatcatggaactagactttctatagagtttatgaatcttgtatacttacaaagaaatggtaagatagggtaaatctaattttgatagagtttaattatgcacctaatacctaatattcaccgtgaagaatactctagaagagtattcagattttcatatttgtaatacatatatatgtactacatttttttaatgttatttatttacattttgaaattaaataaataagttcaaagaataaatatgatttaatttgaacgacatatcagaaatgttgtaatctgttttttttttttttttgaatattgtaatctgaaaaatgaaagtttaatggtttgatatttcggttgtatgtgtgattatgtatgttttgatttgttttcacgtaataatgaggaaatcaggatcaaaactttaaaaagagcaaacagaaaattaatgatgttaaaagtttattaatacgaagaagaaaaaaaaaagttttattgatacgaccttgtttgaaataggattaataaattttctgatgaagttaatttatgatagaaacaaaatcaaagattaatgcttacttccactgaatctgaggtgcagggaaatcacatggaccgatggtcccaacagttaactgtccatgtcaacttaaatactactaatttacataattaatagatgtgaaaattatctttgcaatgaatattgaacttgtaactttttgtatgtgtttaatttggagatcttataagtttacgtaaggaaatagaactagcaatcaaatgttggtgtataagcactatcctacacacacgatttctttaattatactttcaatttcgaatagagaaatataagaaatggacaagaccggccggtccatgattatatactctcaagtttcaacttttgttttggttttctaacttttataaagatatgtaacaaatgtgtttttaatcgaatgtgttttaatcttttttcttctggcactaggttctttctacactagctactttaatcgaatgactaatggaatgtaataaaccaatacttaaactaaacacttgcctcttaaagccttattacaagaaaaataatagaccgtgtatcatcaaaatattgaaaaataaataaataccccaacacgtaatttataacagtaagactatgaatggaggtagcggacaaagcggtttaatttgtctgcgatttagtccatctcatttttgaggcgaacaataaaccgctgcggaccaagtttatttgtatgtaaaaacggtccgtagatgatccgctgcggttttcttctattttttttggtcattgatgaattgtaaataaaaatagtctgattcgttgacggttttgtccgtcccaaccgccataaccattcaaaccctaaatcgaattcacaagtcataacaactaattctccctaaatataagcatatcctaacacaaactaaagaaatacctattattatttaataaatttagtaagaatacctattattatttaatgaaccatccaaaccatacttacaaaagtagcagtccctatctaaatagaaactgttgatctcaaggtttcatttgctaaaaaaaaaaaaaaaaagcaaccacatttctttctctatctcactctctcgtttaacattctcatgaaattagggttttagaaagatagatcgattgaag

SEQ ID NO: 7283 - DNA, 3000 bp, Unknown
  misc_feature (1)..( 3000): cDNA_ID_1808497_gDNA_ID_1621137_Annot_ID_56567 3000 nt of promoter + ATG
ggacgcacaaaagaaccaactgtaaccacctatagtacatttctaattttgaatagtttttgtactacttttataattttgttttagaaacgtactactttacaaacaaactctaatatatatatgttgagaatttcttaaatcttttgctaaatcttttggctaggtatcatctgttttggctagcacatcatggaaggatttcgtaggtcttgttagaaaccaacaacaacaccttctctgttgggcgtatgcagcatctgactaattagtcagtgccaaaaggattctccgccaatgggaaagcgactattatcctctctgtccgcgttacctctaccgttttacacatccaagatggcttggaacagataagaaagcaaaactgggacatgtctgttacttcattgttggtggcaatgatataatgaaagagaaggttaggcgaactccccaccagatgcatctactctctaattttattgtcccactaatggactgcgctggaagcttccatgcaggattaaaaaacaactaggttatataagacttatatgagcttgagtgaataaattttatggaaaacaaatatgataaagagaatcctcagaagcatttatttagtatattagtattagaaaaacattatggtaaatagatgtaacatttcacagaaacaatcctaggaaaacaattaacaaataactgaaattcatagttatttagaaggaaaaaataataatatacagtacaaactctataaattaataatgttaggaccatgaaattttattaatttatagtgatattaatttattttatatattaataaattaatatttatcaatttatagaaatatttaagcaaaatataacactatattctttcagaatagaataaatgtcaagagcttactcgactattcgggtaaaaatgaatcatagtaaaaaatttagagtttttaaaagaaattgctatttatgtctataatgttggtgaagaagttgaagacgataatgagaaacttttggaaatagtgacacgtaagaaaccaattttcgcatctagaactcttcacaaattttggatgcatattgagaagatatcacccggagtttttgatgcaataaaaagaaaattacagatgaaattcaacaagattcaaactttaagaaaagacaacaaacaacactggactcatattatagtagattatcttaaaaattttgattattaatttatgttattattgggaccatatttttacatagagatttcaaaaaaattattatcttatcgattttgtttaatttttacattggcccgacttgggaccaacataatttattaatttattgtgtttattaatttatcaagtattaatttataaagtttctactgtagatgacaaagtatatacatgaatattaggtagccaaagaatacaactttctataaaaaggaaataataaatatacacaattattctcaaaaaaggaaaaatatatagaaatttaaaaagacatgaatgtttaaatagacaaaattgttggtaagggacataattattgaagataatagaaacactaataaaacatagtgaaaaatatacaactctaagtgaacatatataacttcaattaattctcaaaaatatctttaatgactgtaaaatacaattttgagtataacaaaaaataaaataaagtaaagtcgcgtaaaaagacacaacttttcacaactataaattaaaaattaagttattaatttatgaaaagttacactgaaaaatgtgacaatggataattatccatagctttgatttgtcggagatgactagtagagttcctttgttaaattagaaatggtttgcttacatattactaactgattactgtttttgttagtgtttcgattttgatggtttaatcagtagctattgaacatgtggagccgccgaatgaaagactcaacgccaaacgtgcgattgtcacagtaaatttgggaaaataatctctttatgagctttcatttgaaaaataccctatccttttttcttttctaaaaattaaatttttaatatataaattattaaactaggctcactaaaatttagcaataattaaaattattttgaacttaaaataaaaagaaacccataatttaaaagttgatgcaactaaaaattttaaagataatttttctcttaaatatttttaactaaaattcgtcaaaacaaataaataaataaactttattaagtgatagactaaaaactattttagatatcattttgttaaattttaatataaatataataaactatttttatctcaaaaatatttgaaaaataaacaacataatatatttattttattttattttttctaaatttcgttttttttttaatttatcaagaaaacagcttttgttttaaatctggacaaaactgttattttatatattaaattttttaatattttttaaaaataaagaaagtgtatttttcaaataataactaaaaaacaaggtagttttcaaaatctccctaacttttaagggcttggccatgggtaggaatagtgaacatgttgaacgcaaagctatagttagaagagtcatcaatgagcatgaaggatacttgtctctcaagggtgacatttggagttgagaaaaagctttgaattcggaattgagaagatccagtgagaatgtggacctaataataaccaactaattgactaaaaaaatattttgtgaatttgaagttggacaccgttaagtagatttgtatcttggattatatatacgtgtgtgtgcattgacattcttcttggtggttttagacgttttagttttccatttcggtatttcccattaataaagagttaaaacgacgacgtatgttgataatctctaaatgacgtcgtttgattgaaaatgtcgtaagaaaaatcgatcgaaacggttagcgaatcgaagcagagagagcttcaatg

SEQ ID NO: 7284 - DNA, 2264 bp, Unknown
  misc_feature (1)..( 2264): cDNA_ID_1817193_gDNA_ID_1621137_Annot_ID_172724 3000 nt of promoter + ATG
ttcgatatgtgatcttaacaaaatttaaaaacttgaaaaatcaataatttcgtaagggatggtttttaccggttcgccggttttcactggttttaagaattcatatgttcaaacttatgtttttcatgataaacatgaccggtcaagggtctcactcgcggttcgatgggctcaaaccggtcgatccgtatcggttaacagtttattttttcccttcaattatatactttgtttagattaatatttaggatggaataagatcctggcttcgtggcttgtagtgctgattaaaaatcactgataaccaatgcaacgccggttcgatacttcacaaaatttagggttctttaaaaaattcataaactccaattcgcctccttctctctttctcgatcctctcaaaatctctccaccaccaatgaagcgacgacgccgtaactccaaacttaaattcgaagaaacctccgaccaatcaccgacatccacggcagagttctccttctctctcaccaaaatcgccgtcagccaaatctgccaatctattggatacaaagccaccgatgcctccgctctcaacactctaaccctaaccaccaccaaattcttacaatccctcgccgaactcgcatcgtcgttctctaacaccgctaatcgcacggaggttaatctcttcgacatcgtcaatggtctccaagatatcgctttatctacttccgattgtttccccggtggctctacggttcacgatattgaatctcagtgcctgatcaaatccgctgttctccgtaacctctccgatttcgttacctacgctcctgagattcctttcgctaaaccgttaccgagacgggaaagagacggatcgttcggaggagatttggatcacgtggcggtgactcgatcggtggatgtgacgtcagttccagcttggcttccgccttttcctgactctagtctctgctccgatcgttgttcaaaggataatagatctgatcacttgtgggaaaactctgattccgttattcgccgtgaaattttgccggagagtttgaaatctaaaagcggaggaagattaccggtaatgagagataaagtgagattcaagatggaacaacgagattggagtagtggtggtgatacgagattggagcggtcgcgggacaataacaatggcgaatctggccgtgatcttgaggttaagaagaaaattagagaaggatacacttactgtgccggcgagtggccgttttagtctattctgatgacgtggaaaaaaacaaaatcgcgaggtttaagatggattcgaacccgcgaggcttgagtatatgtgtgattggccaattggaatctaccgcacgagctgcttctctgatagtttcggtgctccaattgtttattttataaagccattactctaaggatttactttatttctttctatgggattattttaaaaattgaaatagaaaaatggttgaacctgttcgactttactcaatgttaacttggttagtccattgaaccatcgtacaagtgatgaagtaaacaacggattcgtctcacaaatagaggtttgttcatgaatataatgcttgtgggtgaagtgtggttcttttggaaactagaatgagaactcattggatgagttatatctcaaagaattggggaaagctatgtatgtaattgtttgtttcatttttattttctcaaaataatgcaaactataggttggtggattaaaaaatgttagaaaaactaaaatgtcatgttgttattcttttcaccaaatttcatgtattcagtatttatatgaaaaaagctttttaagcaacttgactctagtgtggcttgtatagacacatgtatgcagtctttttcttaacattatttttcattaagatctaaatgaatctcaaccgtccattcattagagaagtaaaacaaaacttacacgtggcaaccatcgaggtttgaggtacactgtttcattacctccactatgtttcatatatatataacaaaaacaagtcgccttccttcttagtaaaatttactgaaattgccactgttttcgattttgttggttctccgatctcagtggtgtcttcttctccggtagataattctcgtgttgaaaatctccggtagtgtttgactgagttacggtatgattttgttcttcattttcttttgcaataagtcgttgttatgaagtgagtaatccactggttttgactatagaaatcaaattgctacagaatatg

SEQ ID NO: 7285 - DNA, 3000 bp, Unknown
  misc_feature (1)..( 3000): cDNA_ID_1817197_gDNA_ID_1621137_Annot_ID_172723 3000 nt of promoter + ATG
taatttttttttttttttttttaattatattcctgtataattatattttgattgtttattttaggatttcacccatgttatacatcttgtattaatatcgaccaacccgtgctaccatataatatgtcccgtcaaattgaacaccatattttttttttttttttttttgaagattagctgaagatataacatattaatttggttttttttttgaagattagctgaagatataacatattaatttgtcttatttaaatatagatatatatctatgtattatttagtgtatgattagtattgtttaggtttcaatatttaaaatttagatacgaaacatacagttcattaagtaacgatgtagcagattttaaaaattgattttttttggttttaggattttagtatgaaaatattaaaagtatataggaaatggtatgtacgtgaaataaagaattatttgttttttttttgttccatatatactaaatattattaaaaatctgtataatatcttgtatttaaaatttaaaatctaaataattagtgcattattctagctgagattgatccgcaatatacgacgggctgtttcttaaaaatttttgttatttataaacttatgattttgttgtatataaaattaaccaatttattgtgtatgatttttaattcgatgtaactcttatatttaaagtatagtattatttagctttattatggctgaatatttatatgaatatgtttttgacctgatccatcaaaatcaagaggttttaacccccatggcaaatatttagtttttgtactttagattttaaaaataaaatttaatatatgattattatttttagatcaaagtaaatatagtaattttaggttctattttatagtcaaagttctaaaccattcacgtttgtttaactattattttatttttttcaacgaaaaaactttattgaataaagattattaggtccgatcataatacaacatatcataaatctaaatcaaaggactcaaacaatccgagaaaaacatagaatctatctaacctttttctgccaacaaatgagctaactgattacacgatattttagtaaaagagaaaaagatatttctaaacttggttgcccaaaagtgaatatttttgcgtaaggcttcggtaatgaagtccaccgtaagaaccttgatgatgttgatgagcgcttcagagtctctatttttgataaattgatgtatagcagtcagaccacacttgatgcattgacattagtagagctttagcttcagcttccggtggggtacgtacggctccccatctttttgcttcaccttgacatgtatatttaattttttacttacataaacttctttacaaaataaaaaaaaacagaaccgcaaatacaacaaaattaaacacacgtatatatacacacaaacgttcatatatgaatatctaaatagtttggaacaataatacacaggtcgttaccaaaaagaaaaaagaaatacacaattctcaagtattgtgttctttaatacagaaatcaacatcaatacattgacatcacattcataaagaagggtaatacgtacaaaaaaataaaaaaaaaataaaaagaatgcccatgatgtgtgtgtttgataatgtgatgggagataaacatatgtagtatatataggcttggaatgattaggtcaatattttggtgagcaagcaaaattaatttgcgatcttaactaaaatggaatcaaatatacgtaattagaatattttaggtatatgctataaatgcgatttgtcataataattaaaattttctataaaatcttatgtataaatattttgtagtgtatagcaattagttatgtcgagatattttagaaagatttttccgagaatattggcaaagatttgggaaataatttgatgtggtaagattatgatattgtgaggcactaatattccttaaaatcaagtatatgcttattttaaataaatagaaatgtagatatgagtagttgataaaaaatcaaattgttgatattctcatatatttcgaaatgaatgtatattattgataatagtggaaagttttaatggcaattgtttagcgttaatcgttttgtattatacatttttggatttactaatcaaaccggaattattgttgtaattgataacaaaagaataaattttggtaagatttcattagcatttaaaactataatgatttccgaatctaagtaattatagatatggttagttaggatttagtatcaaatttagtaattaggaattaatgatttgcgaattacgtagagtttatagggattgatttgtgcaatttattagggtaataattaacaatatctatgtttaggcaagtagttagtgcaatatcataatagttaaacaaaagtttggtcattgtcctaaataaaatatcttgtttgattgattttatagggactaaacatacaatatcaaaattgaaaaagaatttttctacacaaatcgttccaaaaatgtatatgtagattcttaatataaacaacaattattcacttggccctaattaaaccatcagcccattaagcctcttattaccaaaacccttcaaacccaacttctttccttcttgttgactttccttcttactctgtcgttgactctctttgcgacttcttcttctcttttcttcatcttcttctccctgattcctttttcttttgttgcaggactaaaatcccaacacctccctcctgagttctttgattaaatccccaatttcaattttagggttttgattcccattgtttcttttgatttatcttcattccggaaattgctccggtgaaacagcagccaccgccacatctttctccttctccggcaagcaacttcattccggattttcgtctgagacttcattcttgtctccctcttcgaccaaactgacacttattccgacaaaaccctctgattagaccgtcgga

SEQ ID NO: 7286 - DNA, 3000 bp, Unknown
  misc_feature (1)..( 3000): cDNA_ID_3050185_gDNA_ID_1621137_Annot_ID_172722 3000 nt of promoter + ATG
ccaagagtatcttgaataatcatcaacaaaaatagcataatatttgaggccttggttggatacaactggagaaggaccccataaatcacaatgaatccgatctagaggatgtaaaacacgagaatctgaaattaaaaatggtagtcttgaacttttccccatctggcaaggttcacaaactggagatgttctgctcttatttatctgaatcgccttgctgttttgaaggtgctggagagccttagaatttgcgtgtccaagtcggtgatgccatacttcctctgttgctgcacactgacggtttgaataaagagccacaaactcttgattctccaacacatagagcccatttctacgaggacccgtggttaccactttctgtgtttgtaaatcgattatgcaaaccttattagcatcaaagtaaacaccgcaaggatagtcatcacacaactttgacacagagagaagagatttttgtatatttggaacaaccaagacttcatttaaaggaatcttaccatttgaggatttgatagtggtagatccagtgtgagtaatcgggagataagtgccatcgccaaccaagacagcatcatccccttcgtactctgttgcagactgaagtccattggtcgatgatgttacgtgagccgtcgcagctgagtcgggatgccattccttgcctgtatcatctgagacccggagagtagaaaaagcttgtatttcagcctggtaattgttatcaaaccgattgtaacacttgagagcagtgtgaccagtgcgaccacatatctgacacaccggtcttggacctgaaacttgtggggaggattgatgttgggaaaaccctcgtccacgagttgagtagcctcctctgcctttattttgaccagaacgtcctcttcctttttgattggggttgtattgaggagatccagactcagatctttcaatgttgaaggcaaggtgaggagtaacagatgccgcttcttcatatgattgtagcttactgtcaaagccttgaacttctgagacaacatcattgaaagttggagtcggaagcttgctgagagagctttgaatcaccgtggtgatggggtcatagtcacgaccaagaccgttaagaaaaccaaaaattttcattgattcatcgactggcttgccaatggagctgagagcgtcgcagatggtcttgaactctcggcagtagacagagaaaggcttttcctttttggagagaagctggagattctgacgaagtgagaactcacgagcaacactgcttttgttgaagttttcagctagagacacccaaatttgacgagaggtgcttagattgtgaacatgaccaaggacttcttcagacaacgtgccaaagagccatgaccgaactaactgatcggtacagaaccaagattcatacagaggattgggttcctcggaggtgacttcgccattgacgacaaggcgagactgagatggtgcattgacggcgccattaacaaaacctatgagtttttgactcgataggagagactcgaattgagttttccacaagaggtagttactgtctgtgagtttgagagtaacagaacttgtaacatgaacattatctggaaaagggtatgaggtcgccatttgaaatacctgttaaggctacaaaggctctgataccatgaaacgattagagaaagtttcaagcttttggtaaaaaaatcgtttctttctcaataattacattagggttttacactactcttttatagacattgtagaaggaggtagatatggaacagtctagaatatggcagatgctgtgtagctggctatggtgagtcatcaggcaaaacgcccctcctctgtacgatcgttgctctgttttgagctggagtctattttgtcttcttctatttgactgggctgagatgggccttttgttgttgttgggccggttacttgtttgttgctcacaattgccattttcttatttacaaacaatgtaactagggtgtatgtcgtttatatttgtcttagttatttgtttttgatttgcaaatctctaaattctatcaatctgttttttttttcttctaattttcaatattttttctatgagtaaattattatatcaactgtttctaaaaattatctaatcatggtatgtcttagttatttgcttttagattgaattacatattaattagataacaaaaatggtatcgaacttccaccattggttcaaaaagaaggtaccactacaaaaaaattaatatgcttaacataatttacttattaagttagccctttttaaaagtgaaattctaattatataattgcttgtaaaattaagggttttgtgcaaaaaaaactaaaagttgttcttttttgtaactttacccttcacgtcaaaaaaatgtaaaattatcatatgaaatctaaaataatatacaatatagcttttctaattgttaatttttaaaattttgataaataatatatgtacattatgtgattatgaaaacgtttatagtatatgtaaagttaagaaaaatgggttatatattattgcatattattttggatttcatatatttattttgtattttttagacgtagaaggtaaaattacaaaaatagaagagtttgagagggtttttttttacacacccctatatataataacactagatattgaccctcggtacaccgcgggttgattatttgcgttagaaattaaattattatttttatttaatattatccatatttaatatcaagttatattttgaattcatcattttacattttatatctatttacttttgatgttatattagtatttgtttggtttgatgttgtttagtttagaaaaatctttttattatacacatcatttatatagagtgtgtattttatggtacgtaattatgtgtttgttatataatacttttttttgttaaaagtaaaagtattataactacctaaaatgtatatgtagat

SEQ ID NO: 7287 - DNA, 3000 bp, Unknown
  misc_feature (1)..( 3000): cDNA_ID_2025553_gDNA_ID_1621137_Annot_ID_172717 3000 nt of promoter + ATG
tttctttgctattgaagataatttgcaacatctttttaaatgaaatcaccaaactttgattaaaaatgttttatcttgcttttgtattttccttgttaaattctgcagaacaatagaaaagcatggatttcacaaccgagtggtcttaactttgtttggggaggtgactcgagatattgggttatccctaaagaaccaaggtatcatccgattcattccgacttaaccgataaacccaactttggtttactgataccaaaaatcttaaactgattcatttgattgttggttttaggatgcctgctgagctgaagatggtgagttggttagaagtaaccggttcattcgacaagattgaacccgggaaaacatatcgaatcggttttaaaatctcgtttaaaccggatgcgaccggttgggacaaagcccctgttttcatgtctgctaaaatcgggaagaaaggcaagacagtgtggaaaagaatcaaatccgttagccagaactttggtatactgaaaggtggatcagaacccgtcaatatacctgacgagtccgatggcctgtttgaaatcttggttagtcccacagcgcttaaccaagatactaagcttcagtttggtctgtatgaggtgtggactggacgatggaagacaggtctgttgatccacgaagcctttgttcaagaagtgtaagggggaatatgatcattattgattttcataatccgaacgcaaatcttatacctcgtttcagttcaaatataagagctttagatcataacaatgtaatcttatatacctttcttgaacaagtcttaaagctctgtatgataatcttccggtttgaaccataacgagaaatcgattcctttcgacttcaaattctcagttgcgggtgcaattctttccagaagctacaccgattaaacaaaaaatatgtgagacctgatctctaagcacaacagattaaaagcattgataaaagtatgaacagttcatgaaaccttggggtgaagaacgccgttggagaccaaaacagacctatcaaacacagaaaacttccctccgtccatccgagtcacagctcctccagcttcctcaactatctgtgtccattttctgacatggattaagctctacaacttaagtactttagtaagaaaaaaacaacaagaaggatgaagaagactacaagaacaccagcagccatgtcccatggctttaaacggtactcccaatatgattccgcaatcccaagtgcaacatgacacatgtcaactgcagcagcaccgagtcttcgcactccccgactcacatcagtaaactctttgaacagttccatgttagtgctccatgcatcatcatgttcataaccaaaccctgtgataagaagtgctctctccaccttcattcaaacccgaataaatatctaataaaccaaaaccattgaacacaccatgtcgaaacttaaaattggattcttgataagttacttacagcatcggtcttactgacatgaattttttgcccgttacacaatgctccaccacctaagaagtgaactagttagacaaaatttagatatatagccaaacataagcttgtcacatagtacctgcagttgcagaaaaggttcgagtgttccagcacatcggaccaccgacaaactctacctgcatgatgagattttgttgttaatcctactgaccaaagaatcagcaaataggaactaacaagcattagctggtttgtgcaagtatatattggatttaccacagaagcagcggcgggatttccacgatacagaacaccgacggaaacagcaaaactgggatatccatgagcaaaatttgtagttccatctatgcataaaggaattaagagactaatactaaaaatctcagagattccacacaaacacatgaaaagaaagcaatgagatttgtaaagagagctaaacctagaggatcaatgcaccagaggtaatcagaagacgaatcgccgatgatacctccttcttcaccaagaataagatgatcactaaaattcttcttcactacttccaaaatagcagcctcgcttgctttatcagtactgcaaattcatcaaaagtactaaaactttaatagcttcaaccaatcaagtcaacatgaacatagttaaaacctcaagctaacaattttaaaaggtgaagaagtccttactcagttactaagtcactgagacctttataagtaatattccttggcttatttacagcttccataaccacctaacaaaccagatgattcaattcaagttagttttgttattattctccttgtgcagttgtgccctacgaacccaagaacttgattctagtaccattgaacacaatttcaagtctcatcaagagtttttgtttccaataaacataaattcagatattgtattctacagacatgaaatttcgaacctcagcgccggttttagcggcgagttcaacgacttcaaggaggtgtgccggagatatagttccggtggttttagcgccgattctgggatatcgcgtctgatcagaaacctcagacagaacagctttggtttgaagtctcgttgtggacttgaagctattagacaaaatcctcgtacaccgatatcggaaagttctgttcactgtccggcctgaaattgggttttgcagcggaagagatgatctgggtaagtgagagattctcaatgacatgtttccagagaatattagagaccttcccattgttggtgtcgccggagaattttcgaatttttgttgttgttcggtttttggtttatatgaacgcggccaagtgaacggatggtggacatgagagagtccaaaaagctgatagaacttaaaattgaaattaatgagaacattgaaccaaaatcaggttaacaaataaccagagataaccggtctctgtagtatactcaaatggttagtttttgccgatggtggtgccctaaactcgaaaaaaagatg

SEQ ID NO: 7288 - DNA, 3000 bp, Unknown
  misc_feature (1)..( 3000): cDNA_ID_3050201_gDNA_ID_1621137_Annot_ID_172716 3000 nt of promoter + ATG
tagaagctgaagctgccagcatgatctggtaatcgctacatacgacatacacacatcactaaacttctttataatttatgcacacacatacagctcttaatggccacaactcaaagttataattagtgcatgatctctagttatttgactgcttttaatatatgtttatggattcacgcatgtgtgtgtatgtacataatttacatgcatgcactttgtgtatggtacacatcaatttgaacccgttcaaaattctgtttttattagtatatatatagatgtatgtggtgtgtgtgtcagtgtgtgtgtgtgtttatagatagtagtactaggtcatcctgcagcttcagtcactaaatcaccaacaatgcaaaaaagatataaacacttcatttcatgagaaaggcgtttccgccttaacttttacgatccctctatcaccattggagaggtaacgatacatttacttgtcattttcttaattttacttcctatagtaaatccaatccaattatgtgttattttcaaagtatcacatcttcattctccgaaatatacgcatatatgtcttagttactgtgtataatcaatatgtccacaagttcatgtttgttggtagctagcgacgcgtttacatgtgcctatgtgtttctttctcttgacctattatacttagatctattattaaataaacatatatcttgtgacaaagaaaaaaaagaagcgtattagtttagtgacaagacccatgatattaacaacaatttatcttatattggagacttaggaaatatttcaataaaatatatataagttattaatgaacttaaatacaattggcttgttacacatcactctaatccatgtgatagatgttctacaaaatatacgtttttattttaacatggaatcttatgattgctttattgtacatacaatgagagctaatagatcaaacttgtttgaatgtaaataatttggaatcttttttgtggggatatagagttgggttttataatctcctcgagttagaaacaagcattattggttttagatacatctaagattaatcttgcatactattgccatttttttggctgattgttactcatatatagttcgaccagagaaaaatcaacgtctacacttttcatgtacaactgactacggctcaagccttctctaatatagattgtgccatatgcaaatgtaaccaatcatcgacattgagattctctgctttgatcagcaacttctgtttgttttaaagattcttaattgaaggattcataatggaatttttttttaagatcgtgaagattatacttccttatagtttggttttaaagatgtaaaatttatttcatatggtttctgatgtcttttgatcatttgtaagtatattagttgtttgtgcaaacaatattactagttccatgcatcgatacatatttgattaagaacattcgccaaatggtcaatacaatggggtatcagatcaaagatacaaaccaaattaagacccttggaatctgtaacaaatatggtgctggagatagatatcacaattcataataattaattataggatttataatcaccattttaatattgatgtatcaattaatggaaacaattgcacggacctacttgcagtatatgcaaaatgaaattggtttgagctatgttttggtattaacttgctttgtaacgtttgaatctttttttctaaatatattcacattttaatataacattgtacaattacagatgtatgagaactataatatctaaacaaagccatgattaatgacaaataataaattttcgaaagtgaatatattattatagaacttaattatttatttaaaaagtaaaaactaatcataactcatgaagtaaaaaaatagttggtctagccaattgcaaagtagtcacatataaccacttcggttaagacattggcaaagatcaaaaagtcacaaacatacttttttctctggttgactaaatcgtcgaaccaccacatgtaattaatttgacttaaactaacaattaaaaagtaaaaataaaaagaatagtggtattttactgatgggaggacatttttccaacgattattttgtttcacgagaaaatgactatgtacgaaatcttcatatatgtgagaaatcggttttagtcaactcacgacttgggccagatttggaagtttaattctttagaacattttcaacgggagttctcttgaataattagatggattctcttgaattagtagaataaaaataaatataaacggattaaaaaacagagaactagctctctcaaaagagtttcgacttttgagtaagtgatagaaccggacatgtgtcaaatagataaaataatacatgacgtaaaaaacaaaaacaaaaaatgtattaggaaaatagttaccttacttttaatttacttatctatatgtcgtgatttctggttggttgccttcagagacgaggacatgagaaatgagacctctgtaaatactgctactagtttgtataaaaccaaaacactaaagattgtagcatcaagttgtattgtaagcgtcactctgaatttgttattgtaaagaaaacattctacgcagacaatatcagatcaaataacatcattgtctaagcaaatcacttatttttattttttttaattggaaattaagaatcatctcttttaattttagtgtctcaaattttaaactacattttctaccggttgtcattatttcttatgttttgcatatatttttcttatgttttgctcatttatgtatattttgctagttgaattttttgttcaaaatttccagtatttataacatattcaattttaaatttagcattaattttttaataaatttaatttgatattttgaatttgtttaattattttgtttttatataatgatataatgtgtgttaaaaaagtgggtttgactctattaacaaagagataaat

SEQ ID NO: 7289 - DNA, 3000 bp, Unknown
  misc_feature (1)..( 3000): cDNA_ID_1817223_gDNA_ID_1621137_Annot_ID_172711 3000 nt of promoter + ATG
ggaggatatgacgattcccatggatgatgatatggagaactgcggcaagcgtcgagtggagagggatcagatgtaattctgtttctttcatcttctgattgtttagaggttgatccatgcatgtgttggaatttatccacagctttgatttgtcggaaatgactagtagagttccttttttaaattagaaatggttagtttacatattaataaataattatttttttgttagtgtttcgattttgatggtttaatcagtagctctggtgccttggaagcctcctactgtgaaggcgaagggtgtcataaaaagcatacttatcttgccttggtcaagcttatgcgaagacggggcttcatctttacaagtgtaaaaactaccaacgagctgttagccgagtgataaatcttccaaatggagtagttgagttcgaggcacgttaggagggatctcttctcgaaaggagatgaatttaacttggtgtgagtcccgcctctggaagatgtagggcctttgggcttgaacttccagatattcaagaaaaaaaaaatgtaaaaattagtctcctctctttgtgctttttattgacatgttgtacatatctcttagtttcttgttttcttgatctacgaggggacaaacttgaagctcgatctcctaaagagatttaacaacgatatgcattgtctttgctctttctacataactttgcttgcattcgatccaaccagccgtttgcaagagacttttcaggttaaagttgaataaaaaatgttatggcagtttagatttcatatgtcgtattgctaaacctagacccctaggtaaaaggtgacttgtggtgcattttttcatttttacatcacgtaaatctcacttgttggctaattaatgttgcgtagtgaacactaggcctgggcacgaagcgaatatccggaaaatttgggatatttgttattcgattcgttttaatcgaatacttaattttattatttgctttgatccgaaaatttccgaatatccagaaatacgaatatccggatttttgtgtgatatttgccggatatccgctttgctttgctacatccaaattttttttttaaaaattatttaacatgatttcaaatttcttaccttatggcttacgagtgtgagattgagagcaactggaaattttctggttataaattatgtaaccaaattgagtgataaaaatagtgaaaggtcgaagaaaggaaacagaaacgtcgctcttatatttgatggattggaaactaaaacgacaattttaggataaaatataaaatatgaaacaattttattttaaaaaattccacttatctaataaaaactgtgtcacaaaaaaaaacacatgcccaaaggatacaaatacaagcccaaatcccaacatatacaaatccacaacctatattatgatatatatacggatcgaagcgaatatccgactttaaaaaaaatagtatttgttatttgcttcgatttttacgaatactacattttcctatttgctttgctccaaaatcttatggatattcggattttttgaatcaaatcaaatcgaatagcgagtcgaaacggatcgaacgaatattttgctcaggcctgaacacggagccctcgcctttcatacctcaggattacacacctttgcatggtttctacaaaggtagattgtatgtgtggccaatagaggatgctttcaataacagaaaataattttacttggtacacagattaaaattagttccacgtcacttgtgttggcaatagtattgctttgttcatgatcagttaagtaggggttatcaaaatgacttctcagtgacagtgactgttcaagtcaaatctaactattatactatccaaagaagcaaacttcaaagagaatgaaacaacaaaattggcacatctagctactaatcaaaccaaagcatcagaccaagtcataacttgtatccaggcgcttcatattcacatggagttcgctcccagaaatatagctacccctaccccctcacgtcaatcccacgagctaaacaaaactcagcaaatgataaacaacttcaatcataatcataaatttgacaaactaaactatcaataagttagtacaaaaccgaaaatgatttcagacagagaacaaactcgctcaagtgactagatctacaagacaaggcaaaggcgagttgaaacacctaaaaacaaactttcacttatctcgtatgaggtggaggaaaagcacaaaatgatactaatttgcttttaaatttcagttctcatctatgtagtgagcagttaagcataaataaccctccactgtgagtgccatccacaaatcagtagtcaaatagattttacccggaatttcactcaaaatctttctaagcttagttttctccctctcaaatattttaagaacatcagcagctgcaatatttctactccactcttcaatactagaattagcatatgcaaaagcttccctaatccttctatattcaacaaatgagaaagggagatcatgctcaattatagcaacagcaatcaaatcacggaatagcatcatgtcaagttttctattacatccagggactaccatgagttaatttgcaacgtcgactatggcgaagaattgtgttagtaccattcctatccagacataatgtcgctttaataattatatgtatgtgtatagagtgtgtaaattatatagcttgttagctcgagcaataattataaattccttttcccaaccctaaaggaccaattatgtatcatacgagaggaaactatatattatcatcattaaaaaaaaaaaagagtaccattaagataaaacaaatcatcggaaaaaatcaataaacccattgaaatattcttgggccttaattaggttagtaccgactctgaataggttcaaattcttgagattaattaagagtctgtgcgattcgtattcatagatctttctcatcatg

SEQ ID NO: 7290 - DNA, 3000 bp, Unknown; identical to SEQ ID NO: 7283
  misc_feature (1)..( 3000): cDNA_ID_3050205_gDNA_ID_1621137_Annot_ID_172708 3000 nt of promoter + ATG

SEQ ID NO: 7291 - DNA, 3000 bp, Unknown; identical to SEQ ID NO: 7281
  misc_feature (1)..( 3000): cDNA_ID_2044319_gDNA_ID_1621137_Annot_ID_172700 3000 nt of promoter + ATG

SEQ ID NO: 7292 - DNA, 3000 bp, Unknown; identical to SEQ ID NO: 7289
  misc_feature (1)..( 3000): cDNA_ID_1817223_gDNA_ID_1621137_Annot_ID_56568 3000 nt of promoter + ATG

SEQ ID NO: 7293 - DNA, 3000 bp, Unknown; identical to SEQ ID NO: 7287
  misc_feature (1)..( 3000): cDNA_ID_1842703_gDNA_ID_1621137_Annot_ID_56572 3000 nt of promoter + ATG

SEQ ID NO: 7294 - DNA, 3000 bp, Unknown; identical to SEQ ID NO: 7285
  misc_feature (1)..( 3000): cDNA_ID_1817197_gDNA_ID_1621137_Annot_ID_56576 3000 nt of promoter + ATG

SEQ ID NO: 7295 - DNA, 2264 bp, Unknown; identical to SEQ ID NO: 7284
  misc_feature (1)..( 2264): cDNA_ID_1817193_gDNA_ID_1621137_Annot_ID_56577 3000 nt of promoter + ATG

SEQ ID NO: 7296 - DNA, 3000 bp, Unknown
  misc_feature (1)..( 3000): cDNA_ID_1817289_gDNA_ID_1621138_Annot_ID_56581 3000 nt of promoter + ATG
tttgctatttagtcatttaattagaaagtttttgatgttttacaataacttaagttcaaaattttaataaaaatcataaattttgtcttaaatctatagttttatgtatctatattattaattgggaagcattgtgtgaactataaaattgtaagggtagtttaaaattaactaaatgaatttttgcatgggtaatttagtaaattaacaactagtacaactaaataaatatcttggattttgttcttttaaaaaattaaatttaaaatcaataaatttgtaactacccaatattttcagaaatcatttaaaaacgtttccataacatatcagactattttaattcgaattgtatatatgtaaatttatttattttggtaatatgttattagataattcaaaaatttcaatctaatttaataacaaataatcatttagtttagattttaaacaatttccttaacaaaactatgttaattgtttctcattagtacacttaaaaagaagattttaaattatgatttagcatattcaaaagataatttttggattttagatttgtaaatatctagaagatattatgagtatagattaaaatatttaacattttaattagaatttaaatcatataaacttttcaagtatttttttaaacatgtaattttcattatttttaaacaagtaattttcattatttttaatgctatgcatatattcacattgcctcacaatcaatctagaatatcgattctttaaaacaatagatagagattcataagtaaattacttcatgttctaatgagtttatctcctaatattactatctatttatgcgtattcttatggatttttctttcaggctaaacactagattacaagaaactagattatagttatacaatcttaaacaataaacaaaacaaatataacttaatttaattttttatttttaactaaaatcaacaaatttattagtttataaaaaaccaaaaactattactcaaccatataaaaaccaaatactattatactttaattataagaactacatcttatggaaaggtatacactaaaaatcggttttatatactagaatatcataaatatataaatcacaaattatttttaaatatattaatctaacatgtaccacatgtcaacccctcgatttttttatatattacaataacaatatttaaaaataacaaaatagtttttcattttacggaataaagttatatggtggaactagtttgggttgatattaatacgggacaataatctacaagtgaaatcttagaattaataattataacataattatacaatcttaaacactaaacaaaataaacaatatttacaaaacaactatatcttaaaatttgagtttttagttacaaacaaatcgaccaacggtgtaccgcggagtaaattttacattatatcatctaattgatcaaaaatttcaaacaaaaataatcaatttatatatacatcaaactaacaaaaatacacaaattttccaaatatctctatattattccgcaactcgaaacaaatataacaatctatttactatgctaaatacaaataaaatataaataatataaattaattaaaaaaattagctattttatcataaataacactatacactttctatgcatattataatttgtacactataatatctttcactaaaaatgtattccaatacatttcttaaaatatgaaaccccgcacgtatgtgcgggtcagaatctagtttactataattttgaaaacaatactagattaatatgtttttaaaacattaatataatcctaaaactaatctcgtttaatctccgattttaatctccgattttaatccgatttatcgattaatagctagtcccataccgagcgcccgattaacgcctaacgcgattttttaacaataatgatatatatatatatataaatgtatatatgatttatatattctagtgaattttacttgtaaactaaatctacaatttaaaagttaattaataaagtagtttagaagaagaagaagaaattgggttgtcttccctaaagattttttctacatatgttcgtagagaactattttttctaatgacaaaaaaatatttatatttaatatttttaatataggtttcaaaatgtatcattcataaactgcaatactaaatttaactaaaatgaatgaatttttaatttcatgctcaagtctaccgaaaaagataaacaaaccacaaaaaataaaagaatattatgggggtgattggggaggaggactttgaaaactgtaaattctattaacaatttttacagttttaatttatccgatcacacttttttgcttttaataatttaaaaattctcacaaccttttttctcattttgttctttgatttcatgtttttgtttaaatcgcataaatctggctttaaaatgataataaacaaaagtcaatagtttttccttttcgttcttctccatatttatgaaaactcccatagatgaattattcctttttaatttttttttacgtttatttacaattgaagtctttttcttgttttattaagttccatattttcaataattatttaaaatcataatttatgttgtcacaacctatagtatatagttatagtttttaaaatattaaaaattttatagcaaaaatttatgcagcaaaagtctttacagccaaaagtaactttcgagatgcatgttttaatttgtcttatttacttgatgatatacaaaagtcagcctaggcgacctttaatgagatgcatgttttgttgtctacaagggtctagttgcaatataataataaaaatgaaattaccatgtcatttcctagaaaatctcatattacaactttgacacgcaaaggcattccatagattctataaattgctctcccaaaacactccaaacaagtcaatataacaaatttttatcttcaatcctctccccatg

SEQ ID NO: 7297 - DNA, 3000 bp, Unknown
  misc_feature (1)..( 3000): cDNA_ID_1817285_gDNA_ID_1621138_Annot_ID_56582 3000 nt of promoter + ATG
tgttatgatccatcactcactgtctaggtttacttttttactttggttctctgattcactcattgttgttaacagatccgtaagtcgttgttcggccaagttactgcctgatgaaagaaaggaaaagagaaaagagattattcaaaccggtttgcgtttggttatttacctattttgggagagatttctctttgttgtgattctttgtattttgcaaaatcttactttggtgccaaacccatcgaacgcttctttttttcgaattcctttttttcattcctcctcgaatgtgtgttatcatggctatacaaataaataaaatgaaagacttcttttctttttcttcactttttctattcaatgtctatgctttatactagtggtttttcgtcatcatagataaacacttaattcataaaaagacccttgaatttttattataaggttagcaatttatccaacacgatcctgaaaatcgtccatcctagtatttttttcgtctaaacacctttaattgcggagttttgataagtttttaacagaaaaaaactcgaataagatatttttttggtttgggctaaaattgttatagacttggcccttgggttttatcccaaatacattttaggtatcacaaacaagaaaaacatagaagtaaaaaactagaagttttttgcgcttttgatctttgtccttttttctacaagttttttctccagactaatctcctcacgattgtctgaagacaagagtctacaagaccggagattcaccgttcgacaataatttccgtacctttcaaggttagatgttcttgcgcttaatttgacttgtgttctttttgtgaattttggatgcgcgcacaaggtgtttgttcatttgcctagacaaagtaaaattgatttagttattcttctcattcatcttctatagtatttgtacttgagccaatcattattcatctttggtgcaatctgaatctgacccatttgagctgttttgtctccttgttcaaattttgtgtgaatgtgtgtaaagaacgcagaatctaatagaagcttctctttagggtttgggttgttaggacatgcgtttcatcctctcaaattttgattttgtttcttttaatgaactcaagggttagtttgatgcttatcaaattgagggtttttgttttggatgcagagactgatttgacatatgaatgacgtcgaggcacttaggcaagaaggtgctctttttatactctttaccttttttttttagtgaatttcgtcgagtgtttctgaagaatttcagcgaaaagtttgtagctttagcttccatttcgttactattttctggtatttttcccaagatatgcatagctttaatgcaaattcttggtgtatttatgtttgctggtttgattagaagttatggatgatggatgattattaaatgttgtattcttagttctcatgctgtttatttattggggtttaggcctttagcttggatttaaaagtctatctgacattttatagtgaagcaaatttgcatatgtatgaatgtgactagacatacgagtatgcgtttatcattgtctaagctattggtattttaaattcttgatgtgaaatattactatttcggctgtctttcgaattgttgattctaaaaatcgttagacgctactctgccggtgaagtagcgcttagcgcctagacggtcgaaacggggattaatcggggcctaggcgttaaagtaaactataatgaatttatattgttttataagaaattttatgaaatttattatattataagtgaagttgtgatgtgaagttatgttggtcctgtggctttctgctcaaattttattgctacagcccttggttcgatacttttcacgctaaaaaaatcgaatttcccccacttaaatgataggggcaaaattgtaatttaaaaatgttggggtcatcttcttcctcaaaaccctattcgcttgtttgatcgttttttcgcttatactcaatttttttcgtttttatccgcttgtttgatcgttttctcacgtaatcaaaccaaaataacacagatctaccactaaaatacatattcatgatcaaaaagaagataattaagtagattctcatgaacgccgatttgttcaccgattgagccaaaatcgcggcggtccacgcagaaatagcgcttttttcgacgcctagtcgaccgattagtccgatgtttagaagcgtttgttttagagaataattatgccttcatttttgtcaagtttgtttggtttggtgagtagtagttacacaatgttcttattgctttgcatatgtttatggatgtctcaagaaactttatgaaatttgcagggcattcaagcctcttttagaataggtttggttcttcctcgagtagtagcatctacagagagacagatttcctctacggttttaaaaagagcttctgaaagtgtctctttttcattcgctccgtacataaatggtaagtgtcactcacaggcgattacaatttttcttagattgttagaaaatgaattagaataacgagtaatctcacccttttgttcatgtttagggtttggttttagttcgttatcaaattggtctcgtagttatgaatctttccctactgaaacatccataaggtaaaccattcgcctagacttttctgtcatttctctcttaaatttcatcctcagagcactcactatgtgaatgtttgctggcttgggttgtgtttcttcttgaacaggtattttcatgcgagtcgagaaacattggcgaaaagaaaagaggatgctgatcgactgctgagtcatcgtgaacgcaagaaacagactgtgaaaacgaaaggaaagttctcaaaacgggagaaaaaaacagataagccacctgttgaagctccttatgtgcctcctaggctgaaaagattggcaaagggattgcctgggaagactgtcgacatatttgaagggatg

SEQ ID NO: 7298 - DNA, 3000 bp, Unknown
  misc_feature (1)..( 3000): cDNA_ID_1817281_gDNA_ID_1621138_Annot_ID_56583 3000 nt of promoter + ATG
ttcattttttttaatcaaaacaactaagaaagtaaaataatattttattaattctagatttagagagatattttttaaaagaaaataaacgctattattcggtgttactacaaacaaatgatacttaatagtgatacacatttatttatttgtctcatttttactggaaagtaatttgctttataagaatgaagtatttgccttataccctaaggcctaagcaatatatggatgtgattagtaacatatatgttatgattgatttaatttgaggtatggatgttatattcatagttagcttaaaaatattgctaagtaagaattcatttaaactttagagttcgcgttttgttgagtattaatggttgagttacaagttttagttatcacttctggaaactttatcttactatatagtattgtgtaagaaagctcatcttctgtatacattggatgatatacttattcatgctaagcaagaactaagaaaataatttacacagcaaaaaataatattacaatttataactatgttgatagcggcaaaagctgaaatctttgtaattcatcaccttcacggggtacacacgactctactaaaataattcatgtaaaatcttgagtcaccgatatccacacgtgtcccttatgtttaaattttaaaatgtggatattgcttttcctaaatttggttagtatctctgactagtgactatataaacttttagttacttatcttagccgattggataaatttggctgacaagtttataataaaaaaaaaaccacttcgttttagtttgttatcttgatgttattacatagacaaattgaggttttggcctaaaatcatgttaaaaaagacatcaaataaaacatcaaaccccatttttgaaaacaagttagctacccaatcatttgagagtccaataaaagtggtagtaatagaaactaggttttcaaagtttcttcgtgagaataaatagcatatgattaaaggtaatgatgagccttcttcatgacacgaaaataaaacaaaataagtaatgatgtgcccttggtccatgtaatattatgattatgacaaaatcatagagaaagtttttttaatagcggtaaattacgataatcgtaataatgtatacttaggttttgaataatgactcaaccgcacattaccgtgcgttttaagtagtaacaacttttttttaatatatatatatatatattttttttattactatttaaaccacaccagattttatctgcagttgaaccgtacattttcatcgaagccttaaaacatattagctcacgttattgggagatgtagctatcgatatggattaatggcttaggaagtaagagtttgattaattttgaaccaagtataagaaaaaaaagagaccgtacggataaatgtcgaagaatataaggacaagagttggacgttagctagtaggaagtgggcctcacttaccgctcgcaccgttagtcccgcaaacggcgccgttctctcgtttcgagccatcatcccacttgtttgttgtttcatgtgacttcttcgtctcgaggcaaacttgactcttcttcactttcgcttaattacccatttgtctgccaacatctcttttggctatatactcatgaaactttaaaaaatcttcttatttgtatgttcgaaactccctgaaagtttcagtcttcttatgtatgacaagaatcgcgagagactatgcaatgaacctaatcaaatataactcttctcaagaaatgatatgaaaaagattcatgaacataagagttggtccttggaaagcgacctcttcaagtcttcattaattagacattgattcaggtgcttaggagttaggacaatgtaaattaataaacaaaggtggtgcttaaggcggtccatgacgttgtagaaagtattttttttcgtataagccgactatatacatatgtgtttttcatttacttatcgcaaataagaaacacacactaatcaactatttgtaaattcaaattcaccaaaattatttatgttatatgttgaacctacgaaactcatagacacagaataaaacataagtgaaaagactgaattaaacacttacttataagtgaaaagactgaattaaaataacaaagaattatcaatagtatttttaataaaattaaacatttaaaaaataaacttatttgaggacgtaacctaaaaatctctatatagttgtttttgacgaatatgagttttattataagactaatttttccaagagataaatttataaaaaatattaaatacgtaatattttttaactccaataaaatattgtaatttcaaaccaaatatttattaattaaaatgtgtaatgagatacttacatatcatctagacaagttgagattttctttatagggttttgtaaaaatttgatgatttttaacaagaagaaatccataggaactaataataaaaaatacaatgcaatgatatttaaaaaaacaacaactgcattgcagtgaatttcatcaaaatccattaaaacatttccaaactcaaatagaaacaacttcaaaaccttaatccaaaatgttatagatagatatgcaatagctcttaggcctagtacatagctagatcttgtaactcgtgaaggcaaatgattgggacgttggttcggttctagtggtcgggctcagcctggcggaaaaaattgttatgggtctaaggcccataaagtggcccagaaataaactcgtcgtatttacacacgttgtcgtttctcttatcttctagaaaactgtatcccgtttttgttcttgtactctacacaaacagacaacttcaaattactcaacaccacgtcgtgaaaatccgatctacgtctctgtctctctccaatctctctgcgccacagaattgtgcgatttacgaaaatctctgaaacctccgatcgttaacggcgaccgccgattttcccggtaaaaatg

SEQ ID NO: 7299 - DNA, 3000 bp, Unknown
  misc_feature (1)..( 3000): cDNA_ID_1817265_gDNA_ID_1621138_Annot_ID_172749 3000 nt of promoter + ATG
caagcgtttgttactcacttcaagctccttagctttgttctcatgatgcaacttaatagcctcataagcttcctcagcatgcttaatcctctcctgaagactctcataatctttcaacagagtctcatgattctccttcagaatttcatgctccaaagtcatcgttttctctaaaccaaacatcatcttcttctctgatttgtcctaaacccaaacctgaaacaacatcaaccaatttctacagattattaccaaactcataagcttaatcaaaaattctgcaaaaaccctaaatatccaagctttatgttctctttatgactgaaatgcaacgaagatgagaattaaaccagatttatgagctcagattgtggaaatcgaaatgggtttcggaggattcagagagaaaatggtgagtaacagggaagagagagtgtggttaaaactcagattctttcaagcattcaacaatgtaaacagaatcagatagaaagaaatggaattttctcgagaaaatcttaccaggattgcgaacttgaagaacctaaagagagaagaagacgaagaagcaaagtcctcctaaacgttggttaatgataacgtaatcgaagatgacagataatgtttgtatgtatttaagtaatattattcaaattaattaattgtttattccatgtgaccaaaaaaataattaataaattgttcattcttaagctaatttaacccaaacctttttttaatttaatccaaaccttgtaactgatgcgatgttttttttactagaactttaattttctgtttttaccgttttatatatggcattcagtaggtctgggtacgaaacggatatccggaaaaattgtgatatttgttattcgattcgttttaaacgaatacttgattttgtgatttgctttgctttgcttcgaaaatttccggatatccggaatttcgaatatccagaattttttgtgatatttgcggatatccgctttgatatatttaaatattaaaaaaaatctatatactatataactatatcagatattcaaagtttttatttaacatgctttcaaaataaaaactaaatacttgttggtaccaccagtctacaaaatgttatcaaactaattccgaaaactaaaacccgatagtttttgatgtcgttgatcaaaacataacatgagaaaaatgatcaaacaaacattttaacataaaaacgtaaaatagcaacaatacacaaactattatgatatatatatagatataactatattttctaatatatatataaaaagatacggatcgaagcggatattcggttttttttttttaaaatttgttatttgattcggtttttacgaatactacattttcctatttgctttggtccaaaatcttacggatattcggatttttcgaatcaaaccaaatcatataccgaatcaaagcggatcgaacgaatattttgcccagccctaacattcaggttaacaacagaaattaaaggtattctaacattgtaacattaatgtatgttttcgtataaaaatgaaagtttaaatatcaaattgaagtttaggttaaatcaactgtggtataatacgtgtataaatgcagcatagttcaaactaaagatatgaaaaaaccaattttccgttttttacataacatttgtgcaaattcctatactattaaaagagaaatataaatttgtttcaatttgaattggatcgggttatgttaaaaaattaacataaattgacctgaaatttaagtaattggatttttggcaaaacaaaattcggaatataatatgaaaatcaatgtttttaaacccgatctggacagtgaaccggacaacagttttttttcttctacgcatcgtttgtttgtattatttatatatatatatatatatagtgatatgataacttccctaaaattagctgaataattaaatgaaaaaaatttcagttgatttaacattgaatttttttccttgttttttttaacccatttctccacatttttttgtagtagtttagtttcgtaatttctgcagtcacaacttttagtaatgagttataaacaattacaatcaaggtttttatagtaaacacatcttttactaaaaccacgtagaataattggaaatcaaacataatttttctaaagctcctaaatttttttagtttgtccttagaaatcaaatatatttttgaatcttttttatctaattaaccgcaatatctataatctgaaagtgttaggaccgattggtaacaagtgttatttctaactatatcaattttggttgtagaaaattttggtgtaaggaatttgaccgtagaaaatatagagacttttgcagttaaaattgcagatgtgaaaattttgaaacaattggtaaaaattatgagtttagaaattaaaactttaaataatataaacgattagattagttgtgacatatgcgatacaattttttttcatctctactgaagagatcgtttttattgatattgacacaattgatgacggtttcatatcattaaaaatgataatttagagaatgttttttccgattttaaatgatgctttcaactttcaatataaaagttaaatgtatttaatattttttgaccaataatattctatagtatattttttattggttgacttagatatagttacttatgcaaaaaaaggtaaattaaactaaacttttgtaatatgtgtaaaaaaccttaaacattacttaaaatcagagagagaataattacggttgtttagaatcctcattaatcattctctgtttcatttattaactttctgtatatcattaaccccacaagcattaaattactcactaatctttttggattctattattcattggtttatcgcttaggcaataagtacggaatcaaaaacattccactttctgaccaaaaaaaaaaaatcgtatatctctcagcgcgagggaagaagaagaag

SEQ ID NO: 7300 - DNA, 3000 bp, Unknown
  misc_feature (1)..( 3000): cDNA_ID_1817277_gDNA_ID_1621138_Annot_ID_172743 3000 nt of promoter + ATG
ggaaaaagaaaagaacaaaccttagatagaacacattctcagagagattgcagtagaattagacatttctcttgatcgaatttcgattccgaaacacaattgagaagattcacagcttcttgtcgtcaaattggtaggggaagctttttctccattatcataaaccctaaactaaaagtttctgcaaaaacaactattttatcgaactcttaatgggccatcaatgggcccatacttataaacttaaacccttttccaatttcagtcgtattttacaaaaaccatcaccgtcgttatcacagtaaccaaacaactttcatcgccgggtaagctccattcccaagctatttcgatctcgtttcacgtcgatctatttctagtcaagttaatctcttcttttagggtttaattagttaagacttgcgtttgattatctcaagttcagaatttgtttcttgatgatctaaaggaaggaattttatacttatcaaattgaggatttttgtttttggatgcagagaactgattaacatataagaaaatggcgtttgctagagcagtgagaagaccaattggagtcttttattatagtgttagtagtagatttagttctggaaatgagtattctactgtggcaagcaaattcgaaactttgtctcagtacaaaagctctgtaccgtctggttacacaagccttgttcgtggttttgggaatttcatacggagttttagttcggaagctcctcctgctgtatctgaccaaatgagtcttattaagcaacttagggaaagaactagtgctcctattaaagatgttaaggcttctttagttgaatgcaattgggatcttggtaagaatttggtttaggttttttgttttggtgaaggttgtgtatgttttgttgtgttttgaagtgggtttttttggatttgacacagaggctgctcagaaggatttgagaaagagagggaaagttttggcttcgaaaaagtcgtcacggactgctgcagaaggaatgcttgccgttgctcaaaatgaagggaaagttgctgttattgaacttaactgtgagactgattttgttgctaggaatgagattttccagtacttggttagtcccatagcaatttcacattggttgttgctgaatgatgggctttttgtttattttactgttccttgtcttctaaaattgacatgtcttgcaggctttagctatggcaaaacatgctttgctggttgagagtagttcgcagcaagtttctggtgtcttcccctttgggccggagctttttgaggtcagttttttatgtactcgcttgtttccttttttgttatttaaatttatggatttatgttgtttcctttgcactgtctgagatattgatatcaacttttcatttctaatcactctaatggatgctatcaggagttcaagcttaacctcgatcatccaaaagttaatggtgaaacaacggtttcaaacgctgttacagaagtagctgcaatcatgggagagaatgtaaaatttaggagaggtttcttgatgtcaaaatcttcagcaggcgtcctttctgcatatcttcacacaagtcctcaaccaggtacaatttgttcaatatacttcccattgtttctaatctctttttttatgatatttctgtgcatttctaactttaaaaaaaaaaatgagaatagggttgggtcgtatagctgggattgtatctctcgaagtagaaggtgaaaatactcaactagaggctattcagcgtgtaggctcagaactggctatgcatgttgtagcagcaaagcctttgtttttaagcaaagaccttgtttcttctgaagcaatggcaaatgaacgcgagattctaaagtctcaggttagtgtcactttatgttatgaaattgaactgtaatttgtaaaaagtacacaacctgcgttagaaaagtttgcttatcaaatgttgtatatgacaggcagaaagtacaggcaagaatcagatggcgatagagaagattgtggaagggcgtctccgtaagtattttgaagaagttgctctaatggagcaaaagtttattgtgaacgatgctataaacattaaggtatgtgggtcttagcttaaaacacctagtttaccgttttattacctctgcatcgcttgttgaattcaactcttgggctcctattccacagacactggtggataatttgtccaaggaggtaggttctccagtgaaggttaccgattttcttagagtcgaggttggggaaggaatcgaaaggtaaactaaccgtcacccgtatgtccagtacggcttatcattgttgtaagattagtcgcttatgaattttgttttttttgaaggcttgaagcatctgatgaaccagttgctcaaactgcttgaagacaaagaatcaacgacatggttttagatttacagaactctttccttctttggttcctttagagttcatggcttcaacgccttcttgagattatagaatctttctcatgattttgtttctcacacaatatggcaataagagtgattgtgcctaggaagctatgaccagaaaaaaaaaacatgtttgtgttctcctactcctactaagatcattatacaaaaaccttcacttatgtgtttgattttaaggtactcaagtatttgaataagcagatagtgagttcttggctcctccggttaccaacggtcgaaattgacggtttaatataattcatagacaaaaccggtcaactttatattatccacaatcaacgatcaagatcaacgagaactaatcttacggttgatatcatacatctgtattgagttacagtacaccacaaaacactcaataaacactaagcactcttcttctaccttttgattttcgaaaaacgcaaactttctgaaaaagcaaaaacttctgattctctcgagaatcatttactcttcacactgtccccgtctctctttctcttgggttaatcatg

SEQ ID NO: 7301 - DNA, 3000 bp, Unknown; identical to SEQ ID NO: 7298
  misc_feature (1)..( 3000): cDNA_ID_1817281_gDNA_ID_1621138_Annot_ID_172738 3000 nt of promoter + ATG

SEQ ID NO: 7302 - DNA, 3000 bp, Unknown
  misc_feature (1)..( 3000): cDNA_ID_2144432_gDNA_ID_1621138_Annot_ID_172737 3000 nt of promoter + ATG
tcgggctcagcctggcggaaaaaattgttatgggtctaaggcccataaagtggcccagaaataaactcgtcgtatttacacacgttgtcgtttctcttatcttctagaaaactgtatcccgtttttgttcttgtactctacacaaacagacaacttcaaattactcaacaccacgtcgtgaaaatccgatctacgtctctgtctctctccaatctctctgcgccacagaattgtgcgatttacgaaaatctctgaaacctccgatcgttaacggcgaccgccgattttcccggtaaaaatgaacgacggagatgtatcgaggcagatccagcagatggtgagatttatccgccaagaagcggaagagaaagcaaacgagatctcggtttctgctgaagaagtatgatctttagtgtttctgtttccatttatcagatcttatgatatgaatctctaattcaatcgtaagcggtttatctgattgttatcgatttggtttatttgaataatcgtaggaattcaacattgagaaactccagcttgttgaggcggagaagaagaagatcaggcaagattatgagaagaaggagaagcaagctgatgttcgcaagaagatgtgagttttctgatttcaatttttttgatcttggttaagttttaagttagatcgcttgttctggattacaatatctctgaactttgaaaaaattagaagtttatgatttatagatttgaagttttgacttgattgatttcaaacttgtaattttcttcattgatgaataagaaacatagtctggtttagtctaatcggcaaaactgaagactaatttagcaattagtctgatgtaagattatggtgtagtagtgtactgtgttgatctagctttcaaattctctaatattgttagttctctgtgaaaattatgttgatcttgttcatttactgtgttatcgtgtattactttgccagaaaataactgtcatacatgttttttcagtgattactctatgcagctaaatgcatcaaggatcaaagttcttcaagcgcaagacgatattgtcaatgccatgaaagaccaagcagctaaggatcttctgaacgttagtcgcgatgagtatgcctacaaacagctcctcaaggatctaattgttcaggttggtacttaaaacaaatccctgatgcattcaaataaatatttgatatttggaacttttttttgtatatcctactggagattatgtaatcgtgtcggatggcaatctttttttgtgtgttttgatccgttctgctgatgtcattttgcatttcgaataccttttggtctgttaaagattctctcttgaattgttgcagtgtttgcttcggttgaaagaaccttctgtgttgttgcgttgtcgtgaagaggacttgggtttagtggaagctgtacttgatgacgcaaaggaggaatatgctggtaaagcaaaggttcatgccccagaggttgctgttgacacaaaaatattccttccccctcctcctaaatctaatgatcctcatggtctccactggtaaaatttcatgtttctcatcattactttacatttaaatttttataaaagaacattatcagtgtttagatccggtttgatagtgtattttgaacatgtaatagctctggaggtgttgtgttagcttctcgtgatgggaaaatcgtgtgcgagaacacacttgatgcgcgtcttgatgtggcattccgtatgaaactcccagtggtatgaaaaacaaattctctaccgcatagattacttgttatgatccatcactcactgtctaggtttacttttttactttggttctctgattcactcattgttgttaacagatccgtaagtcgttgttcggccaagttactgcctgatgaaagaaaggaaaagagaaaagagattattcaaaccggtttgcgtttggttatttacctattttgggagagatttctctttgttgtgattctttgtattttgcaaaatcttactttggtgccaaacccatcgaacgcttctttttttcgaattcctttttttcattcctcctcgaatgtgtgttatcatggctatacaaataaataaaatgaaagacttcttttctttttcttcactttttctattcaatgtctatgctttatactagtggtttttcgtcatcatagataaacacttaattcataaaaagacccttgaatttttattataaggttagcaatttatccaacacgatcctgaaaatcgtccatcctagtatttttttcgtctaaacacctttaattgcggagttttgataagtttttaacagaaaaaaactcgaataagatatttttttggtttgggctaaaattgttatagacttggcccttgggttttatcccaaatacattttaggtatcacaaacaagaaaaacatagaagtaaaaaactagaagttttttgcgcttttgatctttgtccttttttctacaagttttttctccagactaatctcctcacgattgtctgaagacaagagtctacaagaccggagattcaccgttcgacaataatttccgtacctttcaaggttagatgttcttgcgcttaatttgacttgtgttctttttgtgaattttggatgcgcgcacaaggtgtttgttcatttgcctagacaaagtaaaattgatttagttattcttctcattcatcttctatagtatttgtacttgagccaatcattattcatctttggtgcaatctgaatctgacccatttgagctgttttgtctccttgttcaaattttgtgtgaatgtgtgtaaagaacgcagaatctaatagaagcttctctttagggtttgggttgttaggacatgcgtttcatcctctcaaattttgattttgtttcttttaatgaactcaagggttagtttgatgcttatcaaattgagggtttttgttttggatgcagagactgatttgacatatgaatg

SEQ ID NO: 7303 - DNA, 3000 bp, Unknown; identical to SEQ ID NO: 7296
  misc_feature (1)..( 3000): cDNA_ID_1817289_gDNA_ID_1621138_Annot_ID_172736 3000 nt of promoter + ATG

SEQ ID NO: 7304 - DNA, 3000 bp, Unknown; identical to SEQ ID NO: 7300
  misc_feature (1)..( 3000): cDNA_ID_1817277_gDNA_ID_1621138_Annot_ID_56585 3000 nt of promoter + ATG

SEQ ID NO: 7305 - DNA, 3000 bp, Unknown
  misc_feature (1)..( 3000): cDNA_ID_1817269_gDNA_ID_1621138_Annot_ID_56588 3000 nt of promoter + ATG
agttgcatcatgagaacaaagctaaggagcttgaagtgagtaacaaacgcttgcttgaggaatgtatgaaagagagaagggagaaggctaaggttaggaagacttttgaggagatgaagaagacaatggagagtgagagaactgctattgttgatgagttgaagtcgaagaatcaggagcttttgttggggaagaagaaagaggaagaagagttagtgaagatggagaataagtatgttgagttagctgagaagtttgatgttgttgaaaaggaatgtgcttacttgaagtcactctatgatgcggaagtagtagcttcggttactcaaagtgctgtaatctcaggggttggagagactgataatcttattggtcaaggagagaacgaggctaatcagaatgtgaacaatgctgtgacaggtatacatagacatctctgtacccaagtgttgtttagtttacaatgacatttcttttgaatctatctttgtgtgcagatgcgataatgataagtgatgatgaaaatgataataatccacctattgagagtaacataagctctcatcggtctggtgatagaaaccaagaagaagaaggcaggaacagaggaaactcagcgactgagaaccgagcttcgggagaaacctttactccggtatctgctaatcatccaccgcctttttctccttcatcgtcatcttcatcatcatcatcttcagacggcgctgagattgtgcttaagctgcctcgtaattggcctgaatgggcaatcccgaaaggtcccgggaaggattccaacaagccttagaacatttcagatgcaacagagagccaaaagaagtaaatttgaagctgcactcttaagttaagctagttatggaaatcttcttacatattgctttctgtttttgtcaggagtttatttaacaatctctggaactacaacaaactattctatctactatcaaatcaattattcattcatgagtataataatagctgaaactttctgtgttacaacaatttcaccataactaaaattgcatttgcatttgaatactgcaaacgcaaattggctttgtatacgcatcttgtttatatatggattagttttttctacataattaatgaaagcttttgtaaactaactcttgagtactaactaataagaaagttccgtggcaaaataatttccgaatcatcggataatcatccatttacgaggttaagttccgggaactgctggtgttaaggttctggaagatctccggaagattggcattagtgagtttgattctcttgctgatctgttgtttgccatgccatgaatatgtgcaacagctcttctctgtgtagtgttcatcacacatgcttcaaactaagcttatgcagctccttctcgactagcttgtcgcttgagttgtctatgccgcggtatagaggtttaaagtcgtcataaacctgaatctgacccttgaaatcagcattagacagtccttaaacttttagagccagcaaatatgaaagacaatcctgaaaaatggataatcataagaccacaaaagtcttttgaaaccatttaagatcaggagccagtacactatccgtctatcagaatctggcaataaatattatcagaagcttattgattatgaagttaatacatcttaaatagaatcagttaagcgttttttgtaaatctaaatcacatgtgaaatttctttatgtcacgttttcatttgtgtaaaacaatatcttttgatttattaagcaaataatttgcagctaaagctctcaagattcaaataaattgaaatgtaagtagtgtaagtagtgatttcttatagaaatagttgaaatctaaaagtattaggacactgatgtaagtattgttaaactaaagagatctatcaggaaatcaaatcactatagttttttttttttttttaaattccttgagtttatcaaacaaaaaaatgtaaatgtccctagcaagtactgtaggttcattttttttgtttcaaaagagtatgttatttcttaaaaatcgccaaagatagataagattcgaaatttgcataaatgtggcaataaatattatcagaatctttttattgaataatgaagttaatacaccttaaatagagaattaagcgttatttagatctaaaaccacatgtgaaatttctttatgtcacgtttttgtttgtgtaaaacgatctctttgagttaatttgcaactgaaagctctcagcattttacattaattgcaatataaatagtgatttctcatagaattagttcaaatcttaaactattaggacagttacgtaaacattgttaaactaaagggaccaatatggaaacacaaatcactgtagttaatttttattattatcttgagtttatcgtctatcgtgttcgaattctctgtcgcttacttaaacacagtcaaattcattttctgccttagaaaagatttttatcgaaaatcgacgtttttgaaaaaactcaaattatcgtcgttttgttctcagatttcttctgctctcttcttcttctccttcttcttcgttccaccgcctctgttgctttatcttcttcttccttccttcgattgttgattacgtcggtggatctttgttctcctctgtgttgttttcattgctagatttcgtcaatgattggcttctcacgattcgatttttccggctcctgttcttaatttcctctgaggtagattagtaaaactctttgtctcgtaaacattgttcgatgatgaaattagaaagttctcactcttgtttgccaaatttgggatatttctggaattgaaaatgaatcgtcatttttttcaatttctgaggattttgttacaattgttttttatttatgttagaattgagattgtgtgatgaatatcagtaaccctagacaattgtgaaatcaaagctatgaaaatcttttgatgctatgtttcctatgatacagagaatgatg

SEQ ID NO: 7306 - DNA, 3000 bp, Unknown; identical to SEQ ID NO: 7299
  misc_feature (1)..( 3000): cDNA_ID_1817265_gDNA_ID_1621138_Annot_ID_56590 3000 nt of promoter + ATG

SEQ ID NO: 7307 - DNA, 3000 bp, Unknown
  misc_feature (1)..( 3000): cDNA_ID_1817261_gDNA_ID_1621138_Annot_ID_56591 3000 nt of promoter + ATG
atttgaccgtagaaaatatagagacttttgcagttaaaattgcagatgtgaaaattttgaaacaattggtaaaaattatgagtttagaaattaaaactttaaataatataaacgattagattagttgtgacatatgcgatacaattttttttcatctctactgaagagatcgtttttattgatattgacacaattgatgacggtttcatatcattaaaaatgataatttagagaatgttttttccgattttaaatgatgctttcaactttcaatataaaagttaaatgtatttaatattttttgaccaataatattctatagtatattttttattggttgacttagatatagttacttatgcaaaaaaaggtaaattaaactaaacttttgtaatatgtgtaaaaaaccttaaacattacttaaaatcagagagagaataattacggttgtttagaatcctcattaatcattctctgtttcatttattaactttctgtatatcattaaccccacaagcattaaattactcactaatctttttggattctattattcattggtttatcgcttaggcaataagtacggaatcaaaaacattccactttctgaccaaaaaaaaaaaatcgtatatctctcagcgcgagggaagaagaagaagatgaagctaaaatgggaatcaatctctaatcttcaacaaaacacatatctcataaaactcgtcgctgcaacacttataacttgtctcgcttttcgtttcttcgtcttccgcttcggccaattttccccagttcaagtgtcggtgaccggaaactccaattcccagatttctccgacgtctgttatcttatcggataacgaagatcaaattcccgtcggtaagatttcaattatatcaataacattaacgatttcgctgtgtagaattttgttaaccttgttttttacggaaacttctgagatctagggttcttaaagatagtttacaactttagaagagttttaaatggttcattagcttctgttagtttgtgatgataagaatctgttttgttgtattagatattgaggtggagaagtgtgatctatttactgggaaatggattaaagatcctttgggaccaatctacacgaatgagtcatgtggtatcgttgtagatgctcaccagaattgcatcactaatggtcgacctgattctggttttctcaattggaaatggaagcctaatgactgttccttgcctcggtttgattctctgagatttctgcagcttatgaggaataaatcttgggctataatcggtgactccattgctcgtaaccatgtcgagtctttgctttgtatgctatctacagtaaggtttttagctattgcttgctagctatttgcagacttgaggataatgagatttgtgattgtaagttttgtttgttttttccatgtttcaggttgaaaaacctgttgaagtgtatcacgatgagaactatagatcgaagcgttggcattttccttcgtataactttacggtatccaacatttggtcaccttttcttgttcaagctgatatctttgaagactcaaatggtgtctcatcagctgcagttcagcttcatctagataaactcgacaatacatggactgatctattcccgagccttgactatgcgatcatctcttcaggggaatggttcttgaaaactgcggtataccacgagaatgctaatcccgttggatgccatggctgcccggagagttcgaacatgacggatttaggattcgactatgcttacaatacgtcgttgcgccatgttatggacttcatagcgaaatctaaaactaaaggcatgatctttttccggacttcgatacctgatcattttgaagatggggaatggcataacggtgggacttgtaagaaaacagaaccggtgggtgaagaggcagtcgagatgaaagttctgaacaagatattgagagatgttgagattaatcaattcgagagagtggttacggagatgggtcaggagagtgagaatctaaagcttctggattttgctggcatgttgctgactcgacccgatggtcatccgggtccatatagagagtttaggccgtttgataaagataagaacgctacggtacagaacgattgtctgcattggtgcttgcctggtccgattgatcacttgaacgatgtcatattggagatcatagtgaatggtcgaaccggtaaataaccagtttgcttgtatgtagtcaatggcttaaaaactggatgaattgaaaacagaggtttggtatataggtcatgtaaattttggtaaacatgaagagatttggttaacagctagagtttctaatgaaccggatagatcaccttggatgaattgaaaaccggttcggttcacgtagccattcttatggatcaatttatgtaaaatctgatttttctggatttggttttgtttagtttaatggtcaataaaatggtgatccaatccggtttagtaagttggtttggtgggcgagttcaacatttgggaaacaataatcagaaattatccataaataagaagaatcaaactaagatgatatataccagaagacaggtaactctgtgaaaatagtaaaattaaacacagagctgttaaattctggccagtttaatatttgctccggaaacttgaacatctctcactttttttatatctaagagagttcaccattatgaagcaattccaattataaacccatcaatttctcaataataatcgaagtttctcatctacgaaggcgacaaaaaaaccaccgaatcttaggttttgttcattcgaacgaatccgaatttcgcagtcctaatgatcggatttaatatttgattatacgctttcggtgacacacccttctttaggatacgaaagagtgcaacgcctttccaaagcaatcttaatcacattctcaaaaacaaaacaaaaaacactaaacggaaagtagaaaaact

SEQ ID NO: 7308 - DNA, 3000 bp, Unknown
  misc_feature (1)..( 3000): cDNA_ID_1817305_gDNA_ID_1621139_Annot_ID_56595 3000 nt of promoter + ATG
aacgacataactagattttataatgacaacataatttaccaaaataacattattaagtaggatcgtaaacttgagttttataaaccaactgcaccttgagttttattaaccgactcaaccagttgaataatgtttggttaatgacataaaaacctgtctcagcaatgtgtttgtcggacgagtgatatatacaagattatttggggtaattagtatatatcatattatgtaaattgtaattaaaacactaaggacatctccattggttaagatactctgagtatcttagcaataaaataacaaatacttttaatagatttcagttatcaaatttttttgtagatatctttttttccaattttcccttaaattaatatttatttgaaaatcatcaatacaattaaactaaaacccatgtctctcaaacctgacacatcaatattttcgttcaactagaagacataaaaatgtcggaattgtaagatgtaatgaagccaaatttagtttgaaacatcgctacgtaatgttttatctcgctagagagaagaaatttcaatttattggtcatatttttaataattaaaaaataaatcatacataaataaataagttaacgttttaactaattaatatgactaatggttaaaatataattatataaaaaaagacaatggtaaaatttcataacaattcatagtctccaacataagtattaacgaaaaatgccactcaaaacaacttcgtatcaactctacaagaaaaaaactaatcctcttgtttcttttaaaagaagaataagttatagattatgactttacactaaataagattagtactttgattattagaaactcaaacacaatttcatcaaaatactctgcagcataacacggatctttatctaatatatatgaaaattggttaatcctctccatatgaatgtcgtcagcattctcgaaactgtcatgtgtcatcgccatgtcatgaaattttaaacatgcatgacacataatatatagatttgcaaatcataaacatataaaatcttttcctctgctaagaaaataaaaataaattcatcagccaatcaaaaataaaaataaaatcttttcctttcatgagtttttagagcatctctaatgaaatatctaatcaaaatagtttctctaaaataatgataaaatattaaaatgttggagatagaaggtgagagaggttcttaaagttcttatttttgagaacccatgaattctttattagacacactcatgataatgccaaccttgaatgattatagtttttgtttacatatttaatttaaatagataattgaattatattaaaatattaatatttgttagcttaaaattccaaattaagagtcttacccagggccggtccaaccaaatattaatacttgacaaaattttcaaatttatctctatttttaagtttattaattgatgatattaaataaaacaatacattaattagaggtaaaaaaatattgaatattttcttaatatttatgaaaaaattttaaccgacaactaatataaaatagaaataatattatttttatattatggttttagtggaattagctagttaagatacccacaataaaaaaaactcgaattataaataatatgttattgtataaaacatttatgcatagtcctgttttatcaaaaggcttttaccctttcgaaaatatttagtttttttttttgaatcatttgagttaaatgtttgagtcttttttttttttgagttaataacccatgcttatatgtttatatctttgcaaatctgaaccccccaccccacccccaaacaaaaaaaggtttgcacatcatgtcagaggtgtagtggaaattactaaaaagggtaaaagcataacttttttaacagttcccaaaatggataaaatgcttaagatgagatgtcacctagattccctacatcagctacttctgtatatttagtgaattttaatattttttcaaataaattttatttttaaaaaatctcagttaaaaaaaaaatgctcttatgctcttcgataactagagtttgaagaaaaaatgaatttagataaaatacgatcagatacttagaaataaacaagttttgttttgatttttataaaatagaattatttaaaatttcatctacatttgagtcaatcctgttaaaaaccaaagttttcaactttaaagcgtttttttttgtgtggcagtgttcaactttaaggcgattagaattactaatatgaaaacaatcaaattgatgacctcgccaactagagtgcattacataccacttaccactatggtaacaaaaattcaatgttatcactcttttgattaaattgtatgtattcttattcgattttgtctatgttgttttttgatagctagaaagtaaagtttattcatttcatttataaactgtagataacagaataagaataattaaacgtgagggatagcaaagttagaactcaacttaccattatagtttgttctgttcgtataaaaatagaatgtatacttgtttcatctttcttgaagatgtatagtttcactttagtaaagaattaacgcactgcatgaagcatatgaactagcggttaccagaagagataaatattcttttaaaaaaaatggtcatcatctacgtcaatgtcatgatctgtctaattcatcgagaaacttgtggcaatcaaaagagaaacagaagaagctttagttttataaattcgtactttattctaaaattaaataaaatttaaaaaatatatatatatgactagtgaacaaagtctctatatatacaagtttcttctgccttcaatcattcatatacacaaaccccttagagaaacaaaaagaatacaaaaagaagagagagattagttattaacttattcataataagtgtaattacttcgtatttacttttttttggttagcagtcgactagtaatcaataatg

SEQ ID NO: 7309 - DNA, 3000 bp, Unknown; identical to SEQ ID NO: 7308
  misc_feature (1)..( 3000): cDNA_ID_1396358_gDNA_ID_1621139_Annot_ID_172762 3000 nt of promoter + ATG

SEQ ID NO: 7310 - DNA, 3000 bp, Unknown
  misc_feature (1)..( 3000): cDNA_ID_3050221_gDNA_ID_1621139_Annot_ID_172775 3000 nt of promoter + ATG
acttctaatgtgtttattcatttattccatgttattattattttctatatagctagagatcaatgttattaactataaccacaaatacatctgatcacttgtttaaaattaaacagttgcatttagattatacgatactcgtgagactggattcattgaaccggaggaggtacgtatgtaaactttgtctcaaaaaaaagaaaaagtcatgattaattatatttgacggttttcctcgacttggagaaatctataggtgaaagagatgataatagacgttctagaggaatcagaacttatgctatccgagagtatcattgattctatcgtgtctaaggtgtgtataacgcttaagtttatgagcttgatttaacattatagtgattttacttactatttttgtttacttatatttggcaaagacatttgaagaggccgattggaaaaaagatgggataatagatttggaagaatgggagaattttgttgccacctatcctttgacactaaagaacatgactatccctttcttgaagtaattcgtttgtttgtttttcctaaccattttcttaatattcgctgataaattgcatgttttagatacatctttcgttttacaaaaaaagtaatatatatacatctttcaaaaacagcttttatatatgtgtgtttatgcatatattactattatcttcttttattttatttttcttgttttataaatcgagataattattctaaaattaacttttattgtacagggacattccgaggattttcccaacctttctccggtaaaatcagatgaggtgtttgctagaggtttttgtttaaaaatatttttatccgaaaatcacataggtaatttgttataagaaatatagaaggttaattattatataaacatattaactatcgaaagaaatctttaatatttaacgaggatagaaagtaattgtttttaaccacaaagctaaagctgtgatatgaaaacttaaaagcaaagatcggttcgtgaagacaaaatggggttttggaaaaggaaaagaggaaaaagaaaaagaacaaacgtgtgaaaattcgagaaaaatggtaacacaaaaagaaattggacatgatataagttgccaaaaccaaagagaaaaaattgacatgatataccaatcaaatttttgaatcaggtcaactaatcaaattcacaacaatcatccacaatattatttagatttgacgctttcactgtttcacatgaaaattttacatttgacgcgatgacttgtggagtcacgatcattttagtcactcgttttaaacggatgcttcattcaaaaaatgtaacttatattcagaagactcctaacgtccgattcagatttacaaaaaaacaatatcattgaatcggaaaacagaaaagcatagtaatattctaagtatttaattataatcgtgaggaaatagttccgtaataatgggggaaaaatatatatatgataaaaccaaaatgagatttgcctgaagatgccatatgtctgatcaaacactctgagctgttgtgtcgatgaactcaccatatgccaagatacgctattagcgacaacacatttgtattgtcaaatgtcattaattaacatccacaggtccaacaacagagaaacaaaataattatcacaagtaaaatataaaattagtaatatacttgtacttataatttttggcttatgccttttaatttattttaacactagactcgacgaaactcatcactaacatgaccacaaaaaaaaaagattacaattctaaaacacaaagattaaaaaagaaaacataacgaagtaaaattaagactagacatcaactttacaagttgaaggagcgagaagaggaacttgtccgttagaagatggattaaatctcaaccacacatcacatctggcgtaaaatccataccgtccagtcttaatcgcaccagctttccaacgtagcctcccaaaaatcaccactctcatcaaaacgacgccgtaagcttcatcattttttaaaccattagctacttccggcgagactggtataccgttgcctcccatcaccggagctatcacaaccgtagatttatgtcctaaacgaagcggtggtagtggaagcggcggtgttatgatctgatctttgtacgttacgtacatagagagcttgtcgtagtgaatggagactctccggttagggtttcttgctaaaacgctgaactgaacggaggttgagattaacggcggcgctgtgaaattcaggtcgtagatggcggctccgacgacggtgagacgtggtttatgtggacggtagacgagccaaaggattaaggctatgatacctagtatgacaaggatggtgaagatcgcgccgcagattgcgcggcgagcatctccaccgcctcctccgccttctttagagtaagattctggcgttgaagaagcggagggagcgttcttgtgatctgctttggctgcgtgctctgcttttgcttctccttctcccatggctatactctacagatataagtgttaaagtgtgtatgtataggtatgtgtgtgtctatacgagaatcagagggttcggtgaagagtgaagactctaaagaaggaggaggagaagaaagaagataagtagatgcaaggttttgtctcttttctagttaataagagtaaacagtcttctagagtacagttttattaattgtttattaacttagaaagcttgtagttgtaattatgtgttaaagctaatctttttataaagtagccgtaaattactactgtttttacattgtgattttattttgttataatacttaatgtaataatataagatagagaagtactttcgaaagactccaaatctcggtgcaaccgttcacgtgacggatctgatgagtgatgaattttttaaaaatgaaaaatccaatgtaacgtgtatacatatggctatacataatcaaatactttgttgtca

SEQ ID NO: 7311 - DNA, 3000 bp, Unknown
  misc_feature (1)..( 3000): cDNA_ID_1817301_gDNA_ID_1621139_Annot_ID_172768 3000 nt of promoter + ATG
ttacgatagcaaacaaatgttatatgataattcagattgtatctcagtctacaagtattttgtagcgagaatgcaaaatctgaattctgttttaaaagtgaaattcttaaggaacttttttaggaagaacacatcaaatcaccaactaacgatgtgagcatgccaattatcacgactgtgcattcaggatcttgattgattaacgtttcttgcctttatttttaacaagtttcccttgcagaccttgttaaatgttttgtattcatattttcttttattctcgaaagcattaatcacatacatataccacaaagaaaagctacatgaaaagtaactaaaattgaattcaagatacttagggaaatgtttgtgttagggattaagcgaaaatgtgtttattcgtctagtcattctaatttttgtacttgcaccgtgtatacatgttattgaacaaaaaagctggacaaggcccacaactttatttgttgggttaatatgtaaacttatatggtctttggtataagtcgataccttcgcattaatatgtaaacttatatggtctttggtataagtcgataccttcgcattttcatcacttgaaggtgtgatttagtcataaaagcttaaccttgatttgcagaaaagtgatcacatacacttgaatctagcgacaagtaaacgaacaacttttggtcacggtcgctgatttatgtcgctatcgacatgtaaacaaacaggaccaaagtcatgacatcaccatttgtcgttaattttgtttgttcctcttttttttattattttttttttgaatatctgacagttcaagttcgaatgtcctatattttttagagatgagatctacatgaagttaaattcatgtcatttagagaaaaaatcccttccaacaggcgtcgaacccatcagctctatctcaaagatttactactggaccaataccacgttggttttgcttcttcctcttctcgtgagattcttctacttcaatgcttctgattcttctatgttcttaatctttcaacaaatacagtagtacctttaggatctgcccagaaggctgcggtatctttgatctcccttaccaggccccaatcttctcaaatcccatagcagtaaaacaattaagaatcgttggacttaggcttatctcagagattttaatgtaatgggttatagattacgaccggctttagattccgaggcatggccgacagtttagattcgtaatgatttagatatagtgcagccattgtgcttgagctacgtacatacgtccatgtcaacgatccactagctagtcttctaattaaattatttgtttttctttagtattacttttattttgttggtcactgagtcattagactattttgtattagtcacagtaatgacacacttctctttgatctttgggcaaaaccctactaagaaaattactagggttaaaactagatatggtgtatgaaagcattttttactttcaccgatttctccaaattcaggtattgttaattttagtgtagtgttcatagaaatattttttctcataagaaatgaaaccgatttagagtaaaaagtaattaagcatatcaaacaacttctaacagacgcagaatttaaaatatagcatttttgcgattcctagttccgtttttttttcactttttctaacaggttagttggatcttcacgtttgcgtgttgcaaactaaaatttgactatcctgttcaggacaaaatttgtctcttatatctagtagaatgtcacttgtaaaacttcaatatcgtcgcgagcatattagctaatagatctttgtagagttgttattttttgcccttttttgtttcgctaaaatcaatgtatgagttgttgtgcgttgtatatatatgcatgtccttgtcaatacatgacaaataaattggacattcatcatttatacttttttttccaacagattcatacgtattatatttgtgtaacttttgtatagtttggtctagttgtagacacgtcggtatcaattaactcattaaaacaacatatgaatatgaaaaagaaaaaaaaatataaacttgtcgtagtagaattttcaacctttatagatatcttttgatcacatttttaatatctctttccatgtaaaataaaagttcgacttaaaccaaacaaagaaaaaatgaagcttgacaagcaatatataacatggtattttaagatggtttacaaaaaaaaaaaaaattaacatattttagagtaaattatttggtgttctaaaaaaagagagagtaaattcttatgtaataaaataactcgtgaatgggacatatatattataatgatatataacagaatttgtctgttaaattatggtttagtttcataaattaaggcatatgaaattatggtttagtttcacaaataattaagagacactatatattgtattaagtttttatataagtttctcttttttacaaggttcatttttttcataatggcatttggttcaattttcgctttaaaatgttattttatatatatatctatatctatatatatatatatacagaaaaactttgataaaccaacttttattcaaatttatctttttttttctgatggaaagtataacttactcacctttttagtttcttatttaaactactaaatttaaatccggatttaaagattcctttgaaaatgatctaccaccagtaaattaaaatatattcgacataattttaacactagtgataaaaatttactacatatgttgatattatacttaggttaaaaaaaagaaagatatcctatgtggcaaccacctacaaactttattataaatataagtagatggcaaggcgtgtggttgccaaacacaaagaaaaacattcgacattacagaaaagaaaaaactataagaaaatcttaattaataaaataatatattcaggagggcgagagagagagagagggatgatg

SEQ ID NO: 7312 - DNA, 3000 bp, Unknown; identical to SEQ ID NO: 7311
  misc_feature (1)..( 3000): cDNA_ID_1817301_gDNA_ID_1621139_Annot_ID_56596 3000 nt of promoter + ATG

SEQ ID NO: 7313 - DNA, 3000 bp, Unknown
  misc_feature (1)..( 3000): cDNA_ID_1842353_gDNA_ID_1621139_Annot_ID_56599 3000 nt of promoter + ATG
tgttttagatacatctttcgttttacaaaaaaagtaatatatatacatctttcaaaaacagcttttatatatgtgtgtttatgcatatattactattatcttcttttattttatttttcttgttttataaatcgagataattattctaaaattaacttttattgtacagggacattccgaggattttcccaacctttctccggtaaaatcagatgaggtgtttgctagaggtttttgtttaaaaatatttttatccgaaaatcacataggtaatttgttataagaaatatagaaggttaattattatataaacatattaactatcgaaagaaatctttaatatttaacgaggatagaaagtaattgtttttaaccacaaagctaaagctgtgatatgaaaacttaaaagcaaagatcggttcgtgaagacaaaatggggttttggaaaaggaaaagaggaaaaagaaaaagaacaaacgtgtgaaaattcgagaaaaatggtaacacaaaaagaaattggacatgatataagttgccaaaaccaaagagaaaaaattgacatgatataccaatcaaatttttgaatcaggtcaactaatcaaattcacaacaatcatccacaatattatttagatttgacgctttcactgtttcacatgaaaattttacatttgacgcgatgacttgtggagtcacgatcattttagtcactcgttttaaacggatgcttcattcaaaaaatgtaacttatattcagaagactcctaacgtccgattcagatttacaaaaaaacaatatcattgaatcggaaaacagaaaagcatagtaatattctaagtatttaattataatcgtgaggaaatagttccgtaataatgggggaaaaatatatatatgataaaaccaaaatgagatttgcctgaagatgccatatgtctgatcaaacactctgagctgttgtgtcgatgaactcaccatatgccaagatacgctattagcgacaacacatttgtattgtcaaatgtcattaattaacatccacaggtccaacaacagagaaacaaaataattatcacaagtaaaatataaaattagtaatatacttgtacttataatttttggcttatgccttttaatttattttaacactagactcgacgaaactcatcactaacatgaccacaaaaaaaaaagattacaattctaaaacacaaagattaaaaaagaaaacataacgaagtaaaattaagactagacatcaactttacaagttgaaggagcgagaagaggaacttgtccgttagaagatggattaaatctcaaccacacatcacatctggcgtaaaatccataccgtccagtcttaatcgcaccagctttccaacgtagcctcccaaaaatcaccactctcatcaaaacgacgccgtaagcttcatcattttttaaaccattagctacttccggcgagactggtataccgttgcctcccatcaccggagctatcacaaccgtagatttatgtcctaaacgaagcggtggtagtggaagcggcggtgttatgatctgatctttgtacgttacgtacatagagagcttgtcgtagtgaatggagactctccggttagggtttcttgctaaaacgctgaactgaacggaggttgagattaacggcggcgctgtgaaattcaggtcgtagatggcggctccgacgacggtgagacgtggtttatgtggacggtagacgagccaaaggattaaggctatgatacctagtatgacaaggatggtgaagatcgcgccgcagattgcgcggcgagcatctccaccgcctcctccgccttctttagagtaagattctggcgttgaagaagcggagggagcgttcttgtgatctgctttggctgcgtgctctgcttttgcttctccttctcccatggctatactctacagatataagtgttaaagtgtgtatgtataggtatgtgtgtgtctatacgagaatcagagggttcggtgaagagtgaagactctaaagaaggaggaggagaagaaagaagataagtagatgcaaggttttgtctcttttctagttaataagagtaaacagtcttctagagtacagttttattaattgtttattaacttagaaagcttgtagttgtaattatgtgttaaagctaatctttttataaagtagccgtaaattactactgtttttacattgtgattttattttgttataatacttaatgtaataatataagatagagaagtactttcgaaagactccaaatctcggtgcaaccgttcacgtgacggatctgatgagtgatgaattttttaaaaatgaaaaatccaatgtaacgtgtatacatatggctatacataatcaaatactttgttgtcaatgattgacttatttggtgacaactatggtttcgtgcaacgtgataactatcactttttggccgtgttaatttttaaaaaaattagaatgaaatttatcaggttacggcctgtcaaagttagcaataacctaatatctgtttgcatgccagaatacggttatgtagaaagaaaattaaattatcatatttcacaattctttatcaactgtataaagcaattaataataaattaattagataccacatgtgtcatatttgttctaatgtttagaaaataaaagtacaagtcttttatgtccacatctccaacaatacttctgaccaaattccatatattattagtaagcttccaaaataaataataatcacatttaagaagaatctgttatttaatcacactaactgagataccgcaccaccgacactgtagtcaccgacaatgctgtggatgctacctgggcctcaattataagcccattataaaattgggcctacactaaaactattgtgtacagagagatatttgataatttgctgactgatacaagtctcacttccaacggccgatttattaaaaaaaaactccgacaa

SEQ ID NO: 7314 - DNA, 3000 bp, Unknown
  misc_feature (1)..( 3000): cDNA_ID_2168780_gDNA_ID_1621140_Annot_ID_56601 3000 nt of promoter + ATG
atttaagttgtatcataatttataatcacatggtggaacttgttaagaagttacgtaactcttaaacagctttaagcctctaacatagtcgtaatagcaagaaataatatatatgatgagagatgagtaaaataggaaaattcctttgttcagcaatgttggtatcgacctattaaaagtgaatctgcagatgaaaaagtgatatccttacatttatttgtttgtagtctgaaaagtggactaacgttcgtacaaaaggcagtgtttgtctctgtcttctccaacttttcgtgctctcttcattctatcaccaaaggaaaagctgaactactaaataacaaaggtcaagaactttaatattgattgatgtcaaaaaaattagtaataagtactgattttttcacatgttgattaataagtactgaatttgcagaaataaactaaaatatatgctttgaccaaaaaaaaaaaactaaaatatatgctttttcaaaaaaactaaaactaaaatatatgcagaatgagtttaattcattgcgaatatatgatgaaatacaaaaaaaaaattgcgtttttttttgtatcaactgtacccactactcatgttcgcaattccgtatgtttcgtggttattgcgttgatgtaacatgtatatccgtcgatgaaattagtagtatacgaaaattgaaaaccacaaaaatggtaccaaagaaaatgaacacgtacgcacacactaatcatatgtttgtaatttaatctactgtctcatataagtagacaacttagatattcctgttggatgctaactttagaaatctcaacgaattaaagtgaaatcataataggggatacattattaacagggtgaatgtcaaattgtttcaagatgaaggctcaaggctaggggtttaggggtatttgtagtcttgtagaaacataaagttaatattcattaggcaattgtcaaaaccatattgttccttttctattttttgatatatataccttgtaaaaatattccacatcaaaaatccgattcgctcaaaaaaaactctgatcgtatgattctagttaaataaataaatggatgaaagcatctattgcattgtcaatttcaacacagcgaaagcacggaacttcaattgttgaactctattcgaactccaagcttagtaatagcaaaatttctctccatacagtagtagacatgggcgcaaaaagttaggcccagtttttaatcaggcccattatgagatttacatctgagaagtggaaagtttgtattcttggtttatgtacttcacttgaattgctcttttccacaactccacacattattatctacgtctgctaattgctgtgacataactttattatcatctatgatcctgaatatttagtggttgattactacagagtattgttgttaaactcgatgtatgaaagtgcagtgcatttcttaacaaaatttaagtttaccttgtatttcttctcttctttaatcttcccaaaatatacttttgtgaatggtgatttaaaagcttttgagaccactcaaatgataaagtggggcttgtgacgtttcagacattgaaaacctcataatatattagtgggagaccttaaaaaatcaagtcaacgccgactaatccaacacagcgtcacacgttaacgtatgcaatacaacattaggatatttttatcacgcatcgttgtttactttatgttatgtaaaaaatgttagaaatcaaatcgaattacaaaacgtgtagtttatcttttctcaaaaagcctccaagtcgtcgttttcatgtacacacacatactccactcgttctcataattccgatcaaaatattatcatcattcatccatacgtataacccaataatttattcttattgaaattgaaaaatcaaattttccttaccgggtgatatcttacatttaactatttaagcaatcataaacagagaaagaaactaacatactcaattcactatcaagagtggaaaaaatcgtacaagtagacaaacacttatcttatttgtccaagtaagagttttatatctcaatcataagtaaacggccttatagtcaatgtatctcgccgacctatccaacacaagtcacgatgatgatccactggcttttgtttaaaagatttacaatcattgaatcattttgtctcattaaaattaaataatttgataaggattgttgatacattgttacacatgaaatgatgctctgtatcctaaacattttaatcatagtaataattccctagaagaaagaagaatatgattctttccgttgaccttttaaggatgtctaaatgggccatgatgagtgttaaaagtaagcccaattacaaaggagatattttagatgaccacgtgtcacaagcttagtaatgaagtcatttacacgacacaaataaaacagaggcgttgagtcaggtccgagagactcgtggtggggcccgagtaaaccgttatgctgcttcttaaatgactatattatccctaaacgctgcttccttagagtggagtaagataagggtaaatacgtaaatttaagagaatgcagagaaattgatgattttattaagaatttgtgaaattggccctctcttttcttaatcgcgtagtgccacccatttccagagaggacacagccttttctttcttcctctttctctcttactcattcgtttttttttccttcttctgattcaaatttatttgtttcttctctctgaaaacgtttttttttttgtttgctcttctttttggtagtttctgtttttgttaagctgagtttgaggagtgtgagtgatttgaattttgtctgattttccgggataaaagagcgtcgtcggagataggcgacggatattttggacttatcgtcgccgaaaagaagcgagtttttgaatttgaaaaggtggttggcattttggtaatcggtggatctgagtttgggatgtggtggatg

SEQ ID NO: 7315 - DNA, 3000 bp, Unknown
  misc_feature (1)..( 3000): cDNA_ID_1817313_gDNA_ID_1621140_Annot_ID_172807 3000 nt of promoter + ATG
taaatgattttatccattttcctctcgattctgcttctcttcgatggtggatcagttgaattttgaatcacctgtttcaaaatgtcaccttcaacacttttgacacagggtacaaatgaaaaaaaaaacagatctttaaagtttatacctttgtgtcatgtccagtgaagacaacaactccataaatatactcagtgtttctaagcttagaatctcgaagaagaagctgtgtaatcgacaatggtaatctctgttcttcaaaatgtaaagttccaacaaaagtataaagatctgcatttggatcttcacatttcacaacagcttttaactctttgaaatctgaatcttcatgtaaagccgatgaagtcgcttctaagccttgtttcactttcagattcgtttctccgtcgagattcatagtctctacataacaaatcgaatcttcgtagctagatgataacagcaaaagatccgccggaaaaaactcgtctttttcaactcttactatatttccgactttaagatccctccacccttctcgccggaatattccatttccgtcgtgaaccttcactttcctattattcatttcgatgtcctaaatatagaagaagaaaaaaacgaaactttgatttaaaaattgaaactttataatttgagagaaattcgatttgagctggtacctgttttttgcgaccccaatcttcgatagcttctttaaccatacttgcggcgatgacgaaggtgagaggtaagagagcactaatggggctgtaaggagagagagcagtcagcgataagactccggtgacgaggaagtagaaattggcgacacgacggaactgttcgaagagtgattttggtatgaaagaagctagagtgtattttgttgaccggacatagtttccgacgtagttacgtcgttcagccgccggagaatttggttcgttacagtaaacaactcgtgagaaaccaggtcctcctatgtgtgaatgatcttcttgaaagtttgatttacgacctttgaatgcgtatatattgcttagatgtaatcttcttctccgacactttgtcattgtttgtctgaaaatcctctgtaaagttttgggcaatggctaaaatttaggaaaaagaatgaaagaatgaagattttttggagctaaagaatgaagaaatttgagagagaaatgttgaatttttatgtgtaattatatgagttgatttggcattttagcaactcagaaaagaagaggaacgagtgtttttttataatatgaagaaaaaaacccaactttgaacgacgactttcaacggattattattttattgacggagttttattgtttattttttcgtattttcatggtatggaagaagttgaataaataaatatcttggaaatttagaatcctagggagtactgtatatggtattttttcgattaaaattagttttgtgaacaatacatagttggcaaaaaaaaatggaaaggtcaatacgtaattaagaataattagaaacatttgaataagaagaaattttgaatggaatgtaacagtgagctagagtcttaaaatgtatagaaatctctttaaaatttttatctaagaataaacctctcattgtcttgttctagtaataatagaggaacgatttacgaatgtgaaagagccgtggacgaagacgaagaggaagacgaagtcgttgatggttacatatttatctcttttgacaacttcttggaacagagaagaatagtcaacagagtgggaactggcaactagcaagtaattactatttactgtaatgattagtgaatgaataattatattttttaattgattgtttggttctaaatttctaatgtaaggattagtactattactattattatattatcaaactaaaataattgatttccagtgatctccgccaggctctctggctcgatctcctgattaaattatcttctctgacacagacacgctttttaacaaacacatgtgaaaattaatttccacctcatcatgtattgccagttcgataatgcggattcatctacataaataatattcaagtttggcaaaagaagaatatgtcatctagctcctttgcccaacttgagctcaatgacaaataaaattaggttattttgcatattcttgttggtaattcttcaaacaaataaaatatgtttccattcataattttccttagatctacaaatagtcataatttaaagagctttaaccatagttataagcttgttcaactcatctttttccttgtatataagattgttgtacatttcagattcatttagttagtaacatgatttacatgcttatgatcagatatattatttttagttatatattatcacaatatgttcatgtcattattatagtcacacatcttcgcagcaaatacgtcttacctactctcattatcatggctgcgcgattgactattcaaacaccatttcatgtcatgtatgagcaaattgagtcttatgtaatttaataatagtcattatcgctttgacaataatgatgcatatgggacaacggttttattcctatgtttataaatttaaagttagctttactaacagataagatattttaagatggtgtaacaaaaagatcaacaagaaaaacaaatgttcactttcacatcagcggtcaagtgacgactaacatttaatattctagacatcttcttagccctcttcttaattatcttgtagctctaacgggccagatattacattgggcttttgcgcatatttaactgttttaggcccaaaacaaatgtaattacctttttacctcactcgtcggcgatttactttttttaatcggggacttcaaaattcttgaagccgttgtgttgtcagagagagaagaaagagatagatttctcattttgggaaattagggttccaattttttcgaactaatgttcacgccacagagaaaacaatggatgtcaccggca

SEQ ID NO: 7316 - DNA, 3000 bp, Unknown
  misc_feature (1)..( 3000): cDNA_ID_3437914_gDNA_ID_1621140_Annot_ID_172803 3000 nt of promoter + ATG
tcaatctttcatctagcattcgtgaaggccaccgattacaaattagtgtggttgtacaattgtgataagtacattgttgatgcgtcgagtccaaacgtgggagtcacaaagtgcgagatttttgactttaggaaaaatgcttggaggtacttggcttgcactccaagtcatcagatattctattaccaaaagccagcatctgcaaacgggtcggtttattggtttacagaaccatataatgaaagaatcgaagtagtggcttttgatattcagaccgaaacattccggttgctgcctaagattaatccggctattgctggttcagatcctcaccatattgacatgtgcactctggataatagtttgtgtatgtcgaaaagggagaaagatactatgatccaagatatttggaggttgaaaccatcagaagacacatgggaaaagatttttagcatagacttggtttcctgtccttcttctcggactgagaagcgtgatcaatttgattggagcaagaaggatagggttgagccagccacacccgtcgcggtttgtaagaataagaagatccttctctcacatcgctattcccgaggtttggtaaagtacgatcccctaacaaaatctatcgattttttttccggacatcctaccgcttacagaaaagttatttattttcaaagtttgatatctcatctataaaaaaaaaacctactactactactacacctttcaaagactttttatttgcttgcagcttgcactatatatatagagtgtgtaagtttcccttttttctccaaagaattggttgtattgtgttaagttaatatatataatctatccatgtaatacaagaaatttgtactgacatcttaatcataataaaaagggttgtacatttataataaggtcatatatagttaatctactaaacaaattatattatatttagatttacaaaaatatagtcctgcgcaaatcatatcctcaaggcaaataggagtcatataaaaatcataaataattaactaccagtcttcttcattcataaaccatacaaaccataaatgtacgagtattcaaatcaaccataaactcttcttagtctttcatacaaattaaccataatattctgagtctttttcaaaccataaaccagaaacgaaaaagcatatgcataataatcaaactttttttaaaagtttacttgttcttgaagcttccctttcccttcttgttgttgttgttcttcttcttcgggtatccaagcttgcttgcctccctctgaacttcgctctccggaactatcctctttctctctctgattacttaacttggatactgtgaatgatgcataaaatacaaatcagcaagaaaataaaattagtaatgataaatgggttttattttacattcgctcacacttcttcttctctttttgttactctaataaagttaccactacaaataatatcttttttttttctttttttcattctcttttttttttcttgttaactatttcattataaaattaaaaattagaataaaggaattcaatttgatcaaataagtaaaaaaaaagatagcaaaacatgagcaatatataagcaaaacataatcatttttttcattatatacataatatagacttgaatttgagacattaaaccacataatgttaattagttttaggaaaatgaatcaactaaaagaagtttacatgttcttcaagcttttccattgccattcccctctttacgttgatttcccctctttatgttgattcatctataaacgcatccttccctcttcacttctttacataatctcatttctatagtaaaataaaactgtttgcaagaaaaaataaagaaaaatgtcaacaataggtgggatgataaaatgatagataagtactttgccgctgctagaaatacgacgagaacatgatcaagcgaatagctgaggatctaaaagtagtggagagcgaggtccaaagagaagcaaataaaatcaacaattttggatattactaaaattgcattgaaaatgtaaaacgccatcctttttgaaagaaaaagactccaaaacgatattttttatgaaacggatgaatttgaatgtgtttctgttttttttttctttataacaaattgtatgattctcgagatgagtgaaaaagcaaattttttatttgggggatcatactctttcatagacatgagatatcaaactttggaaataagaagcaactctttcatagagaaaaattcgtgaaacgaaagattttgtttggggatcatactccattagaccctcggaataacgatgcgaaatgaggatcttgttggtcttgcatatcacactggccgaaccacacccaaaagctattaccttggttttgccgttatgttctcctgtgagccaatagagcgtcccgttcacggaaaatatctagcacgtctttttagataaccattttaatgattaacatgtcaccacaaattttcttgttttacatggatagaattaagattaacttatctcaattaatacaaccaatcatcttgagaaaaaaaggaaactcaaacacaactatatatggttgagccatccacacctgtggcggtttgcaagaattagaagatcctgctctcacatcgccgtttccgcggtctcgtaaaatatgatcacctaacaaagtctctcgaaatcttttacagacatccgtgtgcttacagaaagttacttattttcaaagtttgatatcttatctataaaaaaccctactactactactactccttttgaagactttttatttgcttgcatccatacttggaaaatgactagatctccacaataagaggtctcttagcactgtcgtacagacaaatttggttctcaagttcgatctttgaacactttttcatcttgtggctttttggttttgatagatttcatactctctatcggcttcgttcctaggatatg

SEQ ID NO: 7317 - DNA, 3000 bp, Unknown
  misc_feature (1)..( 3000): cDNA_ID_2168826_gDNA_ID_1621140_Annot_ID_172801 3000 nt of promoter + ATG
ccggtgaaggagatcgaagaaatgttgagtttgaactagaaaaaaaaagagaagcagagagagcagcaatggagggctcacagatccaatttaaggcagttgtcagtaaaatttttttgtgtttgtgcagtgtgcagagactctgcatagagaagagagagagatagagagagagggagcatctctctgaaatcgtttaaaattaaatcatgaaaatagaaataaaaaaggtaattatttttactaataatgctctgagtcaacataattggtgttttctatggaccaatcctactagagcatagattatatgtatcgaatttccatatttgttttgaaacataaaaatatttaccaaattgttactgtcttttttattttttgttggtctcaataaccaaaatattcggtaccaatactcaattccatattcaaaatatgttgtgtgtttttttgttttatggattaaaataaaaggaaccaagtgttttacaagagatgtttagttgtaaagcccatataagcccaataaggatcaaataagaagttccccaatgtcgagcccagtagatgaaatgatagtccacataatgggatgaaggcgaatgagttgatccaaactctcaccaaatcgagaaccaagtttgcatgcactcaccataggagtttattttgtgttttatgtttgacgttctcgggggttttggctatatagaaaataagaagatcaaactaattaactatattaagaattgaatcgctttcaaattgattttttttaattccgtgtttgatcagtttaatttatcctaatcaaatactcataacccatatatgtgatattagaacatgaggtgatggtatactcaactgcttacacctactaactcctaattcttaaaatttgattatcaattacaattaacggttttaattataatgttaaagtccatttcaaattccagtcacaatttttattccatctaaagtaatttgatacaaatttgattttgcttcgaatatggttgttttgtcaacggttttttatatcaaatatagttttttttctcttttcaatgcaatcggttaggtggtatttgatttttccttcaaattgaattttaaaaaattcattttgttcttgatgatacagttcaatttatctgaattaaacaatcttaaccatattgaatattaaaacatgagtattgtatatttcattatgattacacctcatttacccccaaatctctttaatcaataaacttgacatgatcatgaaaaaaaatcattgtttaaaaaaaaaaactaaaacaataaacaaatatttgttttgatagttcgaatataatactgctaatacattgatgagtatttataagtaaaaaaacttgtagaatcttaaaaatatatttagatcgtcctttatcaataaaatttgtacaaaatgcgctttgtaatattttttctttacggttacatctttatattttatttttattttttgctaaagtgaaaaaaatagtgcattctttagagctttgaagaacgttggtagatcaacaatgagtcgtctggaaaacatgtcggcaagagatgcttacagcaatgtgactgatctaaaaacgatagccaacaaattcgtaaacggcgaatattaaattgaaaaaactagtgaattgagtatcacatatctgcgttaacgaatttagtaatttgttggacgaatgtagtaattcgttagatgaatgagatcaatcaagccatttaaaaaaatatatattcattcgcattgtagttttacacataccacctaacattgactataaaaaatatatatgaaaaagaaatctgttgcaagggagactaacctagcccaacaatttttaaagctctagggcaaaataaaaattcaggaccttatattcatgttaaaaaaaaaaatttatatatttgggcatatttatactaaaaattattttgtttgggtcttttgaaattttattaccttgaaaacaggtcatactttacacttaaatgctaaaacattgggctacattttcattttgttatttaaacggaccggtatgagtgagacatgcatgatgatttaagcttatctactcaataggattaggctgagactgatatgattccatttttcgagaccgtgtgaacatagttcatgataactactgtgtagtaaagtagtaacaagacttcaatctcaagttttaatgggttttgttcggtggttcaagcgtccttatcataagtttgtttttctgtcttcactacacacatcttaatattgagttaatccaattaacagtaggcatatatcatatatcatatatcagaacattatttgtgttatgattaccttttatattatcaaagtccctagttaatttggtttgtttacaaagacgattacagtatattatatatccaaacaaaatttgtaatgatgataatcagcccagtatggttcaattcaatgttattgaaatttgtttggtttttaaatcagacttggttattgagtcgggttggaaaaccaaattaaccacagcgcataaggacgaagccaaaatttaaaacagtagttgtacataacttcatttgttttttatcggaaaaatctcacacgataaagtaccagtcgacgacggcgactttctctatgatctgaccgtttcgctgaatctcacgtgaatctctgattttccgggaaaatcaattttctctcattgtctctctccctacattgtttctcatagcctacgagaaattacgtggtagcttgtcggaaactcaacttccgttgacggaaggcgcgagaaagaagcaagcttaggttcgatcggaaaattctagggttctctagtgtttaaacggtagagataatcgatctctaatcggatactgttttggatctccattcacaccctctggtgagctgattttgctttagagatcgccggcttagtttctcta

SEQ ID NO: 7318 - DNA, 3000 bp, Unknown
  misc_feature (1)..( 3000): cDNA_ID_3050248_gDNA_ID_1621140_Annot_ID_172800 3000 nt of promoter + ATG
ccctagaattttccgatcgaacctaagcttgcttctttctcgcgccttccgtcaacggaagttgagtttccgacaagctaccacgtaatttctcgtaggctatgagaaacaatgtagggagagagacaatgagagaaaattgattttcccggaaaatcagagattcacgtgagattcagcgaaacggtcagatcatagagaaagtcgccgtcgtcgactggtactttatcgtgtgagatttttccgataaaaaacaaatgaagttatgtacaactactgttttaaattttggcttcgtccttatgcgctgtggttaatttggttttccaacccgactcaataaccaagtctgatttaaaaaccaaacaaatttcaataacattgaattgaaccatactgggctgattatcatcattacaaattttgtttggatatataatatactgtaatcgtctttgtaaacaaaccaaattaactagggactttgataatataaaaggtaatcataacacaaataatgttctgatatatgatatatgatatatgcctactgttaattggattaactcaatattaagatgtgtgtagtgaagacagaaaaacaaacttatgataaggacgcttgaaccaccgaacaaaacccattaaaacttgagattgaagtcttgttactactttactacacagtagttatcatgaactatgttcacacggtctcgaaaaatggaatcatatcagtctcagcctaatcctattgagtagataagcttaaatcatcatgcatgtctcactcataccggtccgtttaaataacaaaatgaaaatgtagcccaatgttttagcatttaagtgtaaagtatgacctgttttcaaggtaataaaatttcaaaagacccaaacaaaataatttttagtataaatatgcccaaatatataaatttttttttttaacatgaatataaggtcctgaatttttattttgccctagagctttaaaaattgttgggctaggttagtctcccttgcaacagatttctttttcatatatattttttatagtcaatgttaggtggtatgtgtaaaactacaatgcgaatgaatatatatttttttaaatggcttgattgatctcattcatctaacgaattactacattcgtccaacaaattactaaattcgttaacgcagatatgtgatactcaattcactagttttttcaatttaatattcgccgtttacgaatttgttggctatcgtttttagatcagtcacattgctgtaagcatctcttgccgacatgttttccagacgactcattgttgatctaccaacgttcttcaaagctctaaagaatgcactatttttttcactttagcaaaaaataaaaataaaatataaagatgtaaccgtaaagaaaaaatattacaaagcgcattttgtacaaattttattgataaaggacgatctaaatatatttttaagattctacaagtttttttacttataaatactcatcaatgtattagcagtattatattcgaactatcaaaacaaatatttgtttattgttttagtttttttttttaaacaatgattttttttcatgatcatgtcaagtttattgattaaagagatttgggggtaaatgaggtgtaatcataatgaaatatacaatactcatgttttaatattcaatatggttaagattgtttaattcagataaattgaactgtatcatcaagaacaaaatgaattttttaaaattcaatttgaaggaaaaatcaaataccacctaaccgattgcattgaaaagagaaaaaaaactatatttgatataaaaaaccgttgacaaaacaaccatattcgaagcaaaatcaaatttgtatcaaattactttagatggaataaaaattgtgactggaatttgaaatggactttaacattataattaaaaccgttaattgtaattgataatcaaattttaagaattaggagttagtaggtgtaagcagttgagtataccatcacctcatgttctaatatcacatatatgggttatgagtatttgattaggataaattaaactgatcaaacacggaattaaaaaaaatcaatttgaaagcgattcaattcttaatatagttaattagtttgatcttcttattttctatatagccaaaacccccgagaacgtcaaacataaaacacaaaataaactcctatggtgagtgcatgcaaacttggttctcgatttggtgagagtttggatcaactcattcgccttcatcccattatgtggactatcatttcatctactgggctcgacattggggaacttcttatttgatccttattgggcttatatgggctttacaactaaacatctcttgtaaaacacttggttccttttattttaatccataaaacaaaaaaacacacaacatattttgaatatggaattgagtattggtaccgaatattttggttattgagaccaacaaaaaataaaaaagacagtaacaatttggtaaatatttttatgtttcaaaacaaatatggaaattcgatacatataatctatgctctagtaggattggtccatagaaaacaccaattatgttgactcagagcattattagtaaaaataattaccttttttatttctattttcatgatttaattttaaacgatttcagagagatgctccctctctctctatctctctctcttctctatgcagagtctctgcacactgcacaaacacaaaaaaattttactgacaactgccttaaattggatctgtgagccctccattgctgctctctctgcttctctttttttttctagttcaaactcaacatttcttcgatctccttcaccggatctcagattcttcagctggacttagatcaccggttgttgttttaggatctagcttcaatgttcgattcttagtagctgttttttgtgatcaatgttgtttttgattcgattattatg

SEQ ID NO: 7319 - DNA, 3000 bp, Unknown
  misc_feature (1)..( 3000): cDNA_ID_1817337_gDNA_ID_1621140_Annot_ID_172799 3000 nt of promoter + ATG
tttgcagaagattacacagtgaaggattgctgaacaaccttagaactgattgatgttctaggcttgttattttcatcttacagattggcttttcttcagctctcatcacactcacaagccatggagtatctgtttgtgctgcaactgcgtatattggatgaaaacatttcttcagtcttgaaaacatatcaaagaagttacctgctcacacattgtacatgtattgagatgattactaattgctccaaaacaggtatatactttttcattgagatagttaaaggtcaaaaatgtttaattgtggttttagtattcaacagtaaaattgagttcctctaaggtattatagtttacaaatcttctacatggaacatgactcaagtttcttctcttccagcgaccttggtgtgatggttactttgaggccgtacttcatgtacaagttagttgtgactctcggggctatgacatgatcttggacaaccttgattgagtacctcaacaaaactgaagcagctatcatcttcatctgcaggtaagcaaatgtttttcctatgcacagccttggtccagcattgaatacaacgtatttgaactggtcgtcactgacaaacttccctgcttggatccatctctctggtctgaaaatttcacaatcttttccccagattgattccatccttcccatggcatagattgagaagtaaacccgtgaaccttttcttacgaatgtcccatctggtaacacatcatcttcaatggcttgtttcatttccattggaattggagggaacagtctcagagtttctgatagtgctgcttgtaggtataccatgttgtttagttctttgactgtgaagaggctctcgtttttgctggttggagaatcccctcgctgtctcaagatttctcttatctcgcagatgattttgttttcaacctctgggtgtttctgtatcacccagcagaaccatgaaagtgcaacagaacttgtatctcgtccagctaatataaaacttgtgcaaaattgtctgaaaaatctaatggtggaaggatcaatctcattttcccttttatgactctctatctgaataatccttgagagaacatcagatctattgtctaacgtttcttcttccttgagctcgcagatacgatccacaatcatcttgtcgacgaacccgtgcacgaccccaacagctatcctgagacctttttcatatcctgtgtcgaggaacctcatgggcttccatataaatggagggatcatgaatctaaacagtgtagactctgttgcttcttcaaaagctttagcaaatggaacttggggaagatcaacagctagagtttccgggtcagcacctagacccgcaaggcagatgatgtcaaacgtcaagcgcaggaacacgtcttggagatcgaaagcttcttgtgactttgcgaaactctccatcaccttcaacagcttcttccttaccaaatgttgtgttgtctgaaaggaatgctctacaaacccggttgaatgcatttcggttatgatgatccgtcgttgctccttccaagaatcatcatcagcattaaagataccttcctcgagcagatcattgaaccggcttttaaagaaggtaccttttgggaagttcttgaagttagtcttgagcatgtactcgacatttgcaggaacacaagtcacagctccataagacccatcaagccaaactccccgataaagaaaggtacctcgacattttttcaaactccttgtgacccatccatagacatcatttatatgaaagaaaaactctaaagtaattccgaaaactggccatagcattggtccacgcttgttggttaacttctcacgcaaacagcagaaaacaaagagccccaacaaggaaagaagtagatcgaagagagaaagatgattataaagtcgctctgttaaagacattgtagtctcttctcagtaaactctctgcagttttgtttgtggtgatgtcattgtttcaagagtatttgaagaaagatttgcgatgcatttcatattttggttttggaattacatttgttgtcttcgtgtagaattggtctatatgaagaagatgagggtttcttgttggcgacgaaacgtaattaggctattacaaattgtgtgtttattgagaaaaacccgtgaaagaaaaattccagaaaaaatgcaaatttgcctgtcatgtcttatgtgaatctatctgacataagctgatgacaaactgaaactcttagaatcaattaacaaacaaaagaaagagcaatcgttgttactagcaagtagattacaaggaataaatctgaaaaaagattatagaattttgactttagggggaagaggtccaaaacacagaggacgagatattttagttttagatatgttcagcctagttaagtattaatcaaagaatcctaatctatgatgcttcaatggcgatcccactgattcacactttcacagtctaaagactcgagaacaatcgaaagactcaagtaacaaacatcaagattgtaaaaaaactatcttgtagtgagtagtggtgacaaattcatgatttttgaggtttgatacgttatataatataaccaaaacttgtagcactctgcaaacacaattattattgatttacataacctgaccctttgtttcaagagtctttcactactgtgagtctctacttctctcctacatgaagcctaaaaacaaagctgttaataaattcgctgttgcattgagacagtaagtatgcaccaagtaaataaactcttcagtattcaacaatcaacacccatctttaagaaaaacataaattacttggtcttaataaccggacagaaccaaagactaatcaaatcctgaaccggtctggttcaatagatctaaacctaaagtataaatcaaacgtctcaattgttttttcctagggtttcaatctctctcccaaaaaccaaaacgcaaaacctccgata

SEQ ID NO: 7320 - DNA, 3000 bp, Unknown
  misc_feature (1)..( 3000): cDNA_ID_2168803_gDNA_ID_1621140_Annot_ID_172796 3000 nt of promoter + ATG
caaaaggtaccttctttaaaagccggttcaatgatctgctcgaggaaggtatctttaatgctgatgatgattcttggaaggagcaacgacggatcatcataaccgaaatgcattcaaccgggtttgtagagcattcctttcagacaacacaacatttggtaaggaagaagctgttgaaggtgatggagagtttcgcaaagtcacaagaagctttcgatctccaagacgtgttcctgcgcttgacgtttgacatcatctgccttgcgggtctaggtgctgacccggaaactctagctgttgatcttccccaagttccatttgctaaagcttttgaagaagcaacagagtctacactgtttagattcatgatccctccatttatatggaagcccatgaggttcctcgacacaggatatgaaaaaggtctcaggatagctgttggggtcgtgcacgggttcgtcgacaagatgattgtggatcgtatctgcgagctcaaggaagaagaaacgttagacaatagatctgatgttctctcaaggattattcagatagagagtcataaaagggaaaatgagattgatccttccaccattagatttttcagacaattttgcacaagttttatattagctggacgagatacaagttctgttgcactttcatggttctgctgggtgatacagaaacacccagaggttgaaaacaaaatcatctgcgagataagagaaatcttgagacagcgaggggattctccaaccagcaaaaacgagagcctcttcacagtcaaagaactaaacaacatggtatacctacaagcagcactatcagaaactctgagactgttccctccaattccaatggaaatgaaacaagccattgaagatgatgtgttaccagatgggacattcgtaagaaaaggttcacgggtttacttctcaatctatgccatgggaaggatggaatcaatctggggaaaagattgtgaaattttcagaccagagagatggatccaagcagggaagtttgtcagtgacgaccagttcaaatacgttgtattcaatgctggaccaaggctgtgcataggaaaaacatttgcttacctgcagatgaagatgatagctgcttcagttttgttgaggtactcaatcaaggttgtccaagatcatgtcatagccccgagagtcacaactaacttgtacatgaagtacggcctcaaagtaaccatcacaccaaggtcgctggaagagaagaaacttgagtcatgttccatgtagaagatttgtaaactataataccttagaggaactcaattttactgttgaatactaaaaccacaattaaacatttttgacctttaactatctcaatgaaaaagtatatacctgttttggagcaattagtaatcatctcaatacatgtacaatgtgtgagcaggtaacttctttgatatgttttcaagactgaagaaatgttttcatccaatatacgcagttgcagcacaaacagatactccatggcttgtgagtgtgatgagagctgaagaaaagccaatctgtaagatgaaaataacaagcctagaacatcaatcagttctaaggttgttcagcaatccttcactgtgtaatcttctgcaaatggtttgagattcttatgccacaccaattcctgcgggcgttcacatctcataccattacattgctattatgtataagacttctctaagatcattttgaaaactcatcccaaactcatataacacatgaacaaacattggaaccgatccaaagatcactcccagaagaaacattgttatcattttcactgcattaccaaccctattgactagtggaattgtctaagatcaccatccatctgttctccctaacacaagacaccacttccttaaagaacaactccaagattggaatccaattgataatcaaaatgtatcattccaagctaacaagacttacaaaccaacgaggaaaatattcaaaactggaactcacaatagtaaagtaagggataacaaaacaatagaaagctcataattctcacaagaaaaaacgttgagaaaagatgaattaacattagaactcaaagtttgaagactgaagatacagttacaaaaggagacagagctaagaaaagactcaaacttttccaggaaaattcgagagagaaaactttactcttcgaaagcttcatcgtctctccaattttaactcttgaaatcttttgaccagctcccgaagactgaaaccatctcttactccatcggagaccccatcggagacaattctcactgaagtactttaagtctcatctccggtttcgaagtttgacattcattgttccagttttggctctactgtatctgaaatctccgccactggaaatatcctccgtgagaaacagtcaaacagagtcgtatctcacttctccgatatggcagtccattggcagcgatgctcgagttcactcagtgagttctcttttttcattttttgtctttttagcattctgggcccaaaccgttgggcctattatatgaatttcattcttgctacggcccatcctctcttgaccattgaacatcccaacaaataaatatcgtacaaggtgattgtcaccaaagacatgatgaacgcaaattttgcattttttgaagcattctttgcgtttgtaacgctttctgcaacatacaatttgcattagcatgaagccatgaacattaacgtttcgtgtcccacaagaaacttcatcttttattgaaatagactactaattcctcagagctagctactaattcctcagagctagctgtcttctgcaagaatattgcaacaaaagtggagttcttatgccaaaacagaaaacacatgatgaagttgattattcaaatactcttttgaatcttcaatttactcattacattttcacatcaaaccatctgaccacaaacaacactagaaatttcactgagagaaacttaccatg

SEQ ID NO: 7321 - DNA, 3000 bp, Unknown
  misc_feature (1)..( 3000): cDNA_ID_1817357_gDNA_ID_1621140_Annot_ID_172793 3000 nt of promoter + ATG
ggactagaaagatctcttacaactttaaagacatcggattcgcgccttacggtgaggaatggaaggccatgcgaaagctctcggtggtcgaactcttcaccgccaaaaaacatcagtattttaggtctatcagagaggaagagaatgacttgttggtcaagaaactaacagaattggctctgacacgatccccggtgaatttgaagaagacccttttcactttagtcgggagtattgtgtgtcggatcggattcgggtttaatcttcatgagtgtgagttcatcgatgaaaatagcatctccgaccttgttgacaagtctgagatacttgagatgacttctatgttctctgatttctttccaggaggaatcggtagattcatcgattggatctccggtcaaaacaagcgattcgataatgttttctcggacctcgacactttctttcaaaacattcttgattatcatcttaagcctggaagaaaagtagcagatagctctgatataatcgacgtggtgatcaacatgataaagaagcaagagaaagatggagactctttcaagctcacaacggatcatcttaaagggatgatctcggtaatgtttttggacctttattagttgtgtagactaatcttcccttttttaattaaatattcacacaatttttgttctgtcaggacatatttctagctggagttagcacaagtgcctccacactgatatgggcgataacagagttagttaggaaccgtaaagtgatgaagaaagtgcaagaagagattaggacaacactcggagacaagaaggagagaatcacagagcaagatctcaccaatctccattacttcaagcttgtggtcaaagagatattcagattacacccagcagttccatttttgctaccaagagagacattatctcatgtcaagattcaaggctacgacattcccgccaaaacccagatcatgatcaacgtctatgcgattgctcgcgatccaaaactttggacaaacccagatgagtttaaccctgacaggttcctagacagttccatagattacaaaggactaaattttgaactgttaccgtttgggtctggtaggagaatctgtccaggaatgacgatgggaatcacacttgttgaatttgctttattgaatttgctttacttctttgattggggtttgccggagaaggaagaggcggacaagatcatcaccggcaatggagttgctgttggcctagttcaagttcttctccactgaaaatctgatagatgtttctttttttggtttgcaacatttttttagtattggttatattgaatgcttgtgttttaaccttgcttttttctttagagacattctattaattagtaaccctaattgacatgagtaaaggaccaaaaatgttgtcatagcttagaaactctataatccaaaccaaccgaaaattttgaaatataccctaattgacatgagtaaaggataatttgacaaatttaaaatagtaaacttgcagtttgcactattgaaattaaagataatgttgacaaattctttatgaagccaaatcacattattgtataaccacaagtataatgtatatatttatatatagttggtaaaaacattcaagttcacaaccacatggtcattaattacacttgataggtagagagtgaagactaattcattgtgtatgtatccactacaccaattattcattgacttttggattcttatcagaaaagcatccgtgagtttatatgaaaggtcaatcgatcattaatgcataattccataattgtcgatataactcgattttgcaaactatattcttcaatcttgttgcaaaaaatgtcaatcttgttacgtgaataatggcatatgcattattatcgggtatcatcatttacaatcagagccaaaccaaacaaagagaactaaactgaaataatgttctttctttttttgtcgacatctatattagattgattcaaataactttcgatgatacgtacttaataaagacaagtctacgtaaacagacaaagaccaaaaattcaaaatatataacgcaaccaaaccggtccgcaaaaacgaatacttaatgcggtaatatgcctagttaaaatcgacgtaataaaagcaaaaatacaaccattgacagccctatagtcaactatagaaaaagataaaagtcaactttaaaaattgtcaaacgtttgtgagaaaacttgtacgtttagcaaaaagagattttgatattagttgcgttgccaaaagaagagagtaaactgcctaataatggacgtaaacgaatcaatatataactattgacaacctaaattacgtagtcaactgtataaaaaacgatcaactctgtcaattcaaaccttgacattatttgccaaaagaagagaagaaactgcctattaatttcaatataactaaaattattggactaggtctaaatagggtaaccaataaatttgaaaggtacatcttataaattacaaaattttggaaatttcatggaggcaattaagatttatgggcccgtggcaccccatgtgtttggatactttgacgatatttcagtttcaataatacatcattactcatggatgaagatgaaaaatagttttgtgctttaaagacagaggttgatggcttttgtggcatatctctctatagatcaccagtgttgacaattcttgtgttctgtcatctacagaattattcataattgttcatgtagcacaagtttttaaaacgatgaattctttaaaataattgacaatgactgaatgaataaatttattaaaaatgattatcttaacaaaaatacaagttgcaaccaaagaaatatatgattcatccaagtagtatataaaaataaaatctcactgtctatatatgtctctcattaaacacccaaatcaaatcgaaccaactaacacaaaagaaaagaaaaaaaaaacagagtatcaaac

SEQ ID NO: 7322 - DNA, 3000 bp, Unknown
  misc_feature (1)..( 3000): cDNA_ID_1817361_gDNA_ID_1621140_Annot_ID_172792 3000 nt of promoter + ATG
tcattcaacaaaattctaaattttgtttttttaagtaaaaaatgttatagcataaatgttcagatttttatgtcgtattatattgaattaaatatagaacaaagaaaaataagatacagaacaaagagaaattttgatccaaaaaaaaaaagaaagagaaataagatctagaacaaaaacgatacattcagattgattattgaaatcaaataatcgaatttataattgaatttgatggaatttataatgtattttttgtcatggaaataataaagtttgttaatatagtaggcacgatcgaatctggagcttcaatttttttttaactaattgttatggaagatgctggaatgatctctttttacaagaaagctcctctcattcttgttccggttaaacaccattaatgacatcggcacacaaaaattcaaacaccgttgaagattgtttgctatactttatttttatcaataataagttgcggtacttggttaactgtatacgtacttctatttcttatagttgtgcgataattaccacaagtccaaaaaagtaaaatatgaatttgataaagcagtgtaaacctgagattttcaagatttgggcctaaacccattagagaatgctacgtagagaaccattgggcccataaacttattttattcccgcaaagcctgagtggattcgaaccactaccacaaaaagtaagagtttgggttatttgattttaatcattcactttgaattattatagacaccggacagtgacttatgataaagagatttttaacctttaaaactaaaacactaaaatacataatccaaagaagacggaacaaaaaacaaaaacagagccaggaataatgtcagtcttcctctgtttcctctgcctcttaccccttatcttaatcttcttgaaaaatctcaaaccatcgaaatggaagcttcctccaggcccaaagaagcttccgatcatcgggaacttacaccaacgccgggaattacatcccaggaacagtcggaatctttccgaaaagtacggaccaatcgtgtttctccgatacggattcgtccccgtggtcgtgatctcgtcaaaagaagcagcagaggaagttctcaagacccacgatcttgagtgttgtagccgaccagagacggttgggaccagagcaatctcttacaactttaaagacatcggattcgcaccgtacggtgaagattggagaacgatgcggaagctctcggtggtcgagctcttcagctcgaaaaagcttcaatctttcaggtatatcagagaggaagagaacgacttgtgtgtcaagaaactctctgatttagcttcgagacgatctttggtgaatcttgagaaaaccctttttactttagtcggaagtatagtgtgtaggatagggtttgggataaatctccgtgagtgtgagttcgttgatgaagatagcatcgatgatcttgtgcacaagtctgaagatgtcataaggaattctatcttctctgatttctttcccggattaatgggtaggctcatcgagtggatcttcagtgagaggaagagattgaatagactttactcggaagtagacactttctttcagaatattcttgatgatcatctcaagcctggaagagagagctctgatatcatcgatgtgatgattgatatgatgaagaagcaagagaaagagggagactctttcaagttcaccactgatcatctcaaagggatgatctcggtaaatctataatctttcaagataagtggttaaaaatcttgcatgcaacacagtttgtgacttttgttttgttttacgtcaggacatatttctagcaggagttggaacaagctccactacattgatatgggcgatgaccgagctgatcagaaacccgagagtgatgaagaaagttcaagacgagattcggacaacacttggggacaagaaggagagaatcacagaagaagatttaaaccagcttcactacttcaagctcatggtcaaagagatattcaggttacatccagcagctccacttttgctcccaagagagacattgtctcatgtcaagatccaaggctacgatattcctgctaaaacacagatcatgatcaacgcttacgcgattgcacgtgatccaaaactatggacaaaccctgatgagtttaaccctgataggttccttgacagctccatagattacagaggactgaactttgagctattaccgtttggatctggtaggaggatatgtccagggatgacaatggggatcgccattgttgaattgggactattgaatttgctttacttcttcgactgggggctaccagagaaggaagaagccaaggagatcatcaccgggaatgaagttgctcttgaccttgttcaagtttttctccactgaatgtgttttggttatggaatgtttgtactacactaagcttgattctaaattaataacatcttacaagtactgaaaatagtagacagtagacactatggtttatcttccattagaaacaattaaattataaaatcatttttgttaaaacagattaaattctctctttacacaagccataatactaattaattaagaatagggttacgctacgttgggagttgtttaaaagtacatattttcgtcctttttgcttctcccactaccatcaattagtggttgaaacagaaagcttatcagacagaaattggcattttcggatatgttggatgcacaaagtggtatataatacgtaagacttattcgtgtcaatcatgattcatgaagctatctaacctctacaagactacaaacacgtagaagtttggactactcatttaataatcgacaacaacccatgagctgaccataatgaatattattaaacaacccaagttgtttattttctcttaatcgttaagcacttcatctgaaatacaaaacccaaagaagaaagagattaaaaaaaactagagggcaacaaaa

SEQ ID NO: 7323 - DNA, 3000 bp, Unknown
  misc_feature (1)..( 3000): cDNA_ID_1817365_gDNA_ID_1621140_Annot_ID_172790 3000 nt of promoter + ATG
ttgatgctttttaccagcatgtgattgatgatcacttgaagccatcaactttggattcctccggagatattgttgccttgatgttagatatgataaagaaaaaaggacataaagatgatttcaagctcaatgtggataacatcaaagcagtcctcatggtaaagttcaaattttggttcatatatctttttatttttcaaaccattgaataaacacttagtttaaactactaagcttattatgtatatatgtctgtttatgtgatgctcagaatatatttctcgcggggatagacacaggcgccataacaatgatttgggcgatgaccgagctcgttaaaaaacccttagtgatgaagagagctcaagaaaatatccgaggcgtcctcgggctcaaaagagatagaatcactgaagaagacctatgcaaatttgattgcttgaaacatattgtcaaggaaacattaagattacacccaccagttccatttttggtcccaagggaaacaatatctcacatcaagattcaaggctacgatattccaccaaaaacgcaaatccaagttaacgtattacgtatggacgatcggacgtgaccccaagcgttggaccgaccctgaagaattccgccctgaacggtttgcaaatacttgtgtagattttagaggacaacactttgactttctaccgtttggttctggtcgaaggatctgtcccgcgatatcaatggcgattgctaccgtggagctaggactgatgaatttgcttgactttttcgattggagattgcctgatgggatgaaagttgaagacattgatatagaagaagctggtaatgtcacggtagtcaagaaactacttatttaccttgtgccccttcaacgtcattgatgagaagttaaagaaagctccatgacatggaaagaatacgagaagataacctataattctctagatattattgcgagatatataagaattaattcatgtttgatgatcaacattccaaaaacaataatttatataataataacaaatcttctatttaaaccattttgcaatgattggattgagattcggtggctggctgtcactttatcgcagttatcgatctttttgtctaccaaatgatatttcaaagagtcaattagtagtatggacaaatatagtaataaaaatcaattatgattctgtggctactatatatggagtttatcaggccacagactgagacggaagaatgaggattatgatgttccaagagtagtggaaattttttagtaccaccaaccaacatttcgtcttaggacgagaattaaacacttgtagactttataataacatttcgtccaaaatagtgggcactaaaacaaatttattattttctttaaaaaaaacacgcttttcattataatcgagttcaaattttcaaaaactctagaagtactctatttacgatataaacccatttgaagtcaaggctaagttcacattcataaaatcatgactcatgagcgacgagatcaataataaacaaattttcagcctacatttctgatttcttgcacgttatatatagcttgaattgttgtgccagttaggtgattttaattaggttaacttctctacttaatttggatatttgcatgtggtgtctaccacgttacgtggttttagggttattatttatattttactaaagtttatatataaagttcgggctttaggaatcaagcgatcaagtcaaaaaaattgttggataaattttttaacgtatgttttgttttaaccaacttagaaactttgtatttctcgtggcagtttttttcccttttcagttctcgtgccaagcttaagaatatgaaaatatactaattgtgatggtgattcaaacccttaacaaaaaaaaaaaaaggtgatggtgattcatcacaaccatatcatcgggatgtcacattcaatactaaaggacgagacctccaccgaaacaaacatctataaatccaattttagttaatgtttttttttgtttgtttctgaacagttcaatagcctataagtagttatatacaaaagtaataatgcaaggaaacttggatctatcttaactttgattgatacaacagaattgacatattcaaaaaaatatggatgtcatattcaatttttattatttttgggaaataaaatacaatatggatgtcacagtgataatatattaatatgccagcaaacatgtaaaccatcatctattcatctacgtttcctctaagaagaaataaattggattcgaacagatttagaactctcaacgtcatcagaaattagtatatcaaagagagtggatttccaacgacatcattattttccaccatataatttaaacctcattaataaggtttcatttgccgtttaaaggcataatcatttgccgttttcctctataattctcttaaagttataatttaaaaccccaataaattagtaaatttgacaatgacataaccaaaatcctaattaattataaattttgatcaaaaatctattaaattttcaaattcgaagtctactcacctatttttaatcttactctaataaataaacttatctatctctatatatccatactatgtaatcgttgacttaaaaaggtataatattatacaatcgttgacattaaaaaccatataatatacaatgattgagaaactgcttatccactcaaccaatcaaaacaaagtgtaatcggaacacgtggattttgaaccacaagacttggtttatgcttgtgtcacatttatgatttcaacgaagataatatccacaaatctagtaacttctgtatgcgactctacaaccacttgatttgaagagttaacgtctcaatcacgtcgtcaatccctgtcactctatctctatcttataaagaagaagactcttcgaagttctaaactcatagaaacagagccaacaaaacaaaaacagaggaagaaaaacaaaa

SEQ ID NO: 7324 - DNA, 3000 bp, Unknown
  misc_feature (1)..( 3000): cDNA_ID_1817367_gDNA_ID_1621140_Annot_ID_172789 3000 nt of promoter + ATG
tctgatttgaagttatgagagaaaaactctttgattgacatctgattttggtttatctccttctggatcagcttatttttattgtagcttctctgattttcgatgggtacttatattttttttttcaatttgggatttttcatgattctgtagggtttgcaaagatgaagcttgatactagtgggttcgagacttccatgcctatgattggatttggctcgagcagtgatatgcttgatgagctttcttctgtaccctcgtttgatctaccccgtactaaagaggtgactttttttgtttttgtttgtgattcgaagcagtgtgagtgaattttcaatgttgtttgattacgaaactggttttatttgttggtttcagtttgatggatttcagaaaaaagctaaagacatgttgaagcatgcaaaaggaacaaccactctcgcttttatcttcaaaggtggtgttatggtcgctgctgattctcgggctagcatgggaggatatatctgtatgttctcttttatcactttacttttagttttgtttgcagactttgacgatgtttagctgtgagctctcttaagaattcctccaaaaatatgcatcctttcgatatagttgactttggtagaaacactagtacaatgaagattaagttagcttgttgttggttttggttttgtgctggagtgtcaaacaaatttctagttttcattctgttggccattaattgtgaaccagtagaggaaagaaaacgttgtgtgatttttgttaatgttttaaatctgtttaccacattcagcctcacaatctgtgaagaagattattgaaatcaatccttatatgctcggtacaatggctggaggagctgctgattgccaattctggcacagaaatcttggaattaaggtacctaactagaaatctttttggccgtgtctgaactgataacttggatctttgattaatctttctctctgtggttatcgggaatcttgctgccttgttatatagtgatttttttatatatttctaaaagcagcagattcatttaccttatcaaatgctttaagttttagttctgtctatattaaagaatgacaaagattttgcttgtttgatgttgaccctaagatcatacaagcctctttgaatgctaagcatgcaatttcagttgagcatgtggtggctttagatcccctttttttctaatcaaacattctgtagcaagaaagttcagctttttttcctctgtacttagatagcaaataaataaagaacttagtttgttgaatgcgatgtgaaattttggcatgttaataccattgtagacttcttcattttatcaccaacatcttgtttgttgattttatggctgatctcttaatttatttgtctatccaagtgccgtctacatgagctggcaaacaagaggagaatctctgtttccggagcttcgaaacttcttgccaacatgctctattcataccgtggaatgggactttctgttggtacaatgattgctggatgggacgaaactgtcagtaaaaccaacttcatatcttcaacactgttattttcttcccacgcaaaaggaaattttgaaatgctaaatccgtttacttcttgtataatagggtcccggactatactatgtcgacaacgaaggaggacggctcaagggagacaggttttcagtcggttctggttcaccatatgcttacggtgtgctggacagcgggtaagtcatttcccaaacaacatcttcatcgcttttgtcccaatctcaaaggctaaaaaccaaaatctaatgatgttagttaagcaaccgtttcatatttatgattttacttgcatcatcaggtacaaatatgatatgtcagttgaagaagcttccgagttagcaaggagatcaatctaccatgcgacattccgtgatggagccagtggtggagttgctagcggttagtaatctgaatgcatctgtggttcaaatgtaatatttaactttcaagattctgatttagctcataagtttgttctcttctcatatgaccagtgtaccacgttggtcccgaaggatggacgaaactatcaggagatgatgttggggagctacactaccattactaccccgtggcaccagctaccgcagaacaagtcatggaggaagcaacagccgaataaaaatcctgtttagttttctaatcgttcactccctttcttgttgttgcattttgtggtagtatatactgagttgtctctagctgaagctttggtattctattttactgatctgaaatgttgctcgcggattattctctataagattctctttttctgcaatcacattcttctcttactcggtgttttaaattccaatatagggaattgtgattgttttgcaccattttgttagttaaccagtctctccctatccaactctatcggcaatcctcacagatttgctcgtgatagctggtggctggcgttgtagagactagagagcaaagcttagtttggaccacatgaattgcttcggctctgtcccatcttttttatcaacctaaattcccaatgatgataacatccaccaactagaagagaagagttcatggttttgctttcgtctctcgtttcatcaatcttttttaaacacccctcaggaaacttgcacatcagtcaacatggaagtgtctcagtggtcgacaagggcatagttctgtcttaaatgatgcgatttttaccaaacggcgttcctattagcaacataaaaagccatgaggtccataactcgtcttcgttcaatgatccaatcaatcaatcaatgatttttgaaccacacgacatgattatgttttttttttgtcgcattcatgacttgaaaatttaacgtatcgatcacatcatcaaccccttataaacaagactctttgagattctaagctcatctatccaagaaacagaaaccaaggaaaccaaaaacagaggaaggcaaaa

SEQ ID NO: 7325 - DNA, 3000 bp, Unknown
  misc_feature (1)..( 3000): cDNA_ID_2168780_gDNA_ID_1621140_Annot_ID_172782 3000 nt of promoter + ATG
ctctcgtaaaacgactccgtataataactctttcaacggctcatcatcttcttactcagcatcgaaaacggcatgcgtttcttattccgaaaacgaaaacaacgagtcgtttttcccggaagaatcttctgatactggtctattacaagaggtcgttcaagagttcttgaagaaaaatcgcggcgttcctccttctccaccaacaccaccgccggtgactagccatcatgacaactctggttatttctctaatctcactatatactctgaaaatatggttcaagagactaaggagactttgtcgtcgaaactagatcgctacgggaattttcaagctaatgacgacggcgtaagagccgtcgcagacggtggtttatcgttgggatcaaacgagtgggggtatcaagaaatgttgatgtacggaactcagttaggctgtacttgccgaagatcgtggggatagctagatattcatcatgattatgttttgagttttggtactatcgacttagtttaaagttgctacctttcccaatgttggatattaactaaattatgttttaagttgaatttgctaataggatttcataattataatcaagtttataatatattttcgtagctaattaaagtttatatccacgtattctgacacattacgcgcttaatgatttaagttgtatcataatttataatcacatggtggaacttgttaagaagttacgtaactcttaaacagctttaagcctctaacatagtcgtaatagcaagaaataatatatatgatgagagatgagtaaaataggaaaattcctttgttcagcaatgttggtatcgacctattaaaagtgaatctgcagatgaaaaagtgatatccttacatttatttgtttgtagtctgaaaagtggactaacgttcgtacaaaaggcagtgtttgtctctgtcttctccaacttttcgtgctctcttcattctatcaccaaaggaaaagctgaactactaaataacaaaggtcaagaactttaatattgattgatgtcaaaaaaattagtaataagtactgattttttcacatgttgattaataagtactgaatttgcagaaataaactaaaatatatgctttgaccaaaaaaaaaaaactaaaatatatgctttttcaaaaaaactaaaactaaaatatatgcagaatgagtttaattcattgcgaatatatgatgaaatacaaaaaaaaaattgcgtttttttttgtatcaactgtacccactactcatgttcgcaattccgtatgtttcgtggttattgcgttgatgtaacatgtatatccgtcgatgaaattagtagtatacgaaaattgaaaaccacaaaaatggtaccaaagaaaatgaacacgtacgcacacactaatcatatgtttgtaatttaatctactgtctcatataagtagacaacttagatattcctgttggatgctaactttagaaatctcaacgaattaaagtgaaatcataataggggatacattattaacagggtgaatgtcaaattgtttcaagatgaaggctcaaggctaggggtttaggggtatttgtagtcttgtagaaacataaagttaatattcattaggcaattgtcaaaaccatattgttccttttctattttttgatatatataccttgtaaaaatattccacatcaaaaatccgattcgctcaaaaaaaactctgatcgtatgattctagttaaataaataaatggatgaaagcatctattgcattgtcaatttcaacacagcgaaagcacggaacttcaattgttgaactctattcgaactccaagcttagtaatagcaaaatttctctccatacagtagtagacatgggcgcaaaaagttaggcccagtttttaatcaggcccattatgagatttacatctgagaagtggaaagtttgtattcttggtttatgtacttcacttgaattgctcttttccacaactccacacattattatctacgtctgctaattgctgtgacataactttattatcatctatgatcctgaatatttagtggttgattactacagagtattgttgttaaactcgatgtatgaaagtgcagtgcatttcttaacaaaatttaagtttaccttgtatttcttctcttctttaatcttcccaaaatatacttttgtgaatggtgatttaaaagcttttgagaccactcaaatgataaagtggggcttgtgacgtttcagacattgaaaacctcataatatattagtgggagaccttaaaaaatcaagtcaacgccgactaatccaacacagcgtcacacgttaacgtatgcaatacaacattaggatatttttatcacgcatcgttgtttactttatgttatgtaaaaaatgttagaaatcaaatcgaattacaaaacgtgtagtttatcttttctcaaaaagcctccaagtcgtcgttttcatgtacacacacatactccactcgttctcataattccgatcaaaatattatcatcattcatccatacgtataacccaataatttattcttattgaaattgaaaaatcaaattttccttaccgggtgatatcttacatttaactatttaagcaatcataaacagagaaagaaactaacatactcaattcactatcaagagtggaaaaaatcgtacaagtagacaaacacttatcttatttgtccaagtaagagttttatatctcaatcataagtaaacggccttatagtcaatgtatctcgccgacctatccaacacaagtcacgatgatgatccactggcttttgtttaaaagatttacaatcattgaatcattttgtctcattaaaattaaataatttgataaggattgttgatacattgttacacatgaaatgatgctctgtatcctaaacattttaatcatagtaataattccctagaagaaagaagaatatgattctttccgttgaccttttaagg

SEQ ID NO: 7326 - DNA, 3000 bp, Unknown; identical to SEQ ID NO: 7324
  misc_feature (1)..( 3000): cDNA_ID_1817367_gDNA_ID_1621140_Annot_ID_56608 3000 nt of promoter + ATG

SEQ ID NO: 7327 - DNA, 3000 bp, Unknown; identical to SEQ ID NO: 7323
  misc_feature (1)..( 3000): cDNA_ID_1817365_gDNA_ID_1621140_Annot_ID_56609 3000 nt of promoter + ATG

SEQ ID NO: 7328 - DNA, 3000 bp, Unknown; identical to SEQ ID NO: 7322
  misc_feature (1)..( 3000): cDNA_ID_1817361_gDNA_ID_1621140_Annot_ID_56611 3000 nt of promoter + ATG

SEQ ID NO: 7329 - DNA, 3000 bp, Unknown; identical to SEQ ID NO: 7321
  misc_feature (1)..( 3000): cDNA_ID_1817357_gDNA_ID_1621140_Annot_ID_56612 3000 nt of promoter + ATG

SEQ ID NO: 7330 - DNA, 3000 bp, Unknown; identical to SEQ ID NO: 7320
  misc_feature (1)..( 3000): cDNA_ID_1817345_gDNA_ID_1621140_Annot_ID_56615 3000 nt of promoter + ATG

SEQ ID NO: 7331 - DNA, 3000 bp, Unknown; identical to SEQ ID NO: 7319
  misc_feature (1)..( 3000): cDNA_ID_1817337_gDNA_ID_1621140_Annot_ID_56617 3000 nt of promoter + ATG

SEQ ID NO: 7332 - DNA, 3000 bp, Unknown; identical to SEQ ID NO: 7318
  misc_feature (1)..( 3000): cDNA_ID_1817333_gDNA_ID_1621140_Annot_ID_56618 3000 nt of promoter + ATG

SEQ ID NO: 7333 - DNA, 3000 bp, Unknown; identical to SEQ ID NO: 7317
  misc_feature (1)..( 3000): cDNA_ID_1817329_gDNA_ID_1621140_Annot_ID_56619 3000 nt of promoter + ATG

SEQ ID NO: 7334 - DNA, 3000 bp, Unknown
  misc_feature (1)..( 3000): cDNA_ID_1817317_gDNA_ID_1621140_Annot_ID_56623 3000 nt of promoter + ATG
ctttctagttgcctctgcgagcttgctttcggcagagtaaatcttgttttccacgtctgaagatctcccgtttacactagcaaccagagcatttgcttcaactaatttagcttcagaactcagccttatcttgctattctcctcttgaatttcacgaagagccttctcaagctgcagacaaaaataaaatgaaagaacatatatcaaagaaaattcagaatacaaacgaagtaaaacatctaactaatacagaaaactgaatctcctgtctaaggaagctcaacagaaaagaagaacacctcaaaatcaatgcatcacataagtagataaagcttatattcacaagagcaaacacgtagaaaaccaaacataatttgaagatatccataatgttaaagctaaagaatgctacctcttgcacacattgcttttccagacccaaggctttcctcaagttttcttcacgttgttcaaccgtcgtcaatgcatacagatgtgatgactgttcccttttaaggatttcttgagcttcttggaatgcctgatttagttgttcgtgctttgaaaccaactctttgttctccataagaagaagccccatattgtgctgatagccatataactgcacagaagaaccaattctaagaggttaaagcctgtatatttgtacttatcaaaagccataacaaagagtcaaaacactcatttcaactttcagacagctaaaggttaccaattgcatcataaacccatgagagcagaatattcaaattgttgataaaggttacctctttttcaagtgtagagatcttttcaagaagagcttcttgatctttcttctccattgaagcctcattcaacaaacccacttccctaaaccttctccaatcacccatatccatatcatcagtgtgacctcgagaaacgccttgtccggtcagtgttccaatcggaggcggaggaagagtcggtattactaggtcatcactgaaagcaaccgcctttccttttctatcagcgtttctagggttagtaacaccgccgattttatgcgtctcgcttctcggcgtcattgccggtgacatccattgttttctctgtggcgtgaacattagttcgaaaaaattggaaccctaatttcccaaaatgagaaatctatctctttcttctctctctgacaacacaacggcttcaagaattttgaagtccccgattaaaaaaagtaaatcgccgacgagtgaggtaaaaaggtaattacatttgttttgggcctaaaacagttaaatatgcgcaaaagcccaatgtaatatctggcccgttagagctacaagataattaagaagagggctaagaagatgtctagaatattaaatgttagtcgtcacttgaccgctgatgtgaaagtgaacatttgtttttcttgttgatctttttgttacaccatcttaaaatatcttatctgttagtaaagctaactttaaatttataaacataggaataaaaccgttgtcccatatgcatcattattgtcaaagcgataatgactattattaaattacataagactcaatttgctcatacatgacatgaaatggtgtttgaatagtcaatcgcgcagccatgataatgagagtaggtaagacgtatttgctgcgaagatgtgtgactataataatgacatgaacatattgtgataatatataactaaaaataatatatctgatcataagcatgtaaatcatgttactaactaaatgaatctgaaatgtacaacaatcttatatacaaggaaaaagatgagttgaacaagcttataactatggttaaagctctttaaattatgactatttgtagatctaaggaaaattatgaatggaaacatattttatttgtttgaagaattaccaacaagaatatgcaaaataacctaattttatttgtcattgagctcaagttgggcaaaggagctagatgacatattcttcttttgccaaacttgaatattatttatgtagatgaatccgcattatcgaactggcaatacatgatgaggtggaaattaattttcacatgtgtttgttaaaaagcgtgtctgtgtcagagaagataatttaatcaggagatcgagccagagagcctggcggagatcactggaaatcaattattttagtttgataatataataatagtaatagtactaatccttacattagaaatttagaaccaaacaatcaattaaaaaatataattattcattcactaatcattacagtaaatagtaattacttgctagttgccagttcccactctgttgactattcttctctgttccaagaagttgtcaaaagagataaatatgtaaccatcaacgacttcgtcttcctcttcgtcttcgtccacggctctttcacattcgtaaatcgttcctctattattactagaacaagacaatgagaggtttattcttagataaaaattttaaagagatttctatacattttaagactctagctcactgttacattccattcaaaatttcttcttattcaaatgtttctaattattcttaattacgtattgacctttccatttttttttgccaactatgtattgttcacaaaactaattttaatcgaaaaaataccatatacagtactccctaggattctaaatttccaagatatttatttattcaacttcttccataccatgaaaatacgaaaaaataaacaataaaactccgtcaataaaataataatccgttgaaagtcgtcgttcaaagttgggtttttttcttcatattataaaaaaacactcgttcctcttcttttctgagttgctaaaatgccaaatcaactcatataattacacataaaaattcaacatttctctctcaaatttcttcattctttagctccaaaaaatcttcattctttcattctttttcctaaattttagccattgcccaaaactttacagaggattttcagacaaacaatg

SEQ ID NO: 7335 - DNA, 3000 bp, Unknown; identical to SEQ ID NO: 7315
  misc_feature (1)..( 3000): cDNA_ID_1817313_gDNA_ID_1621140_Annot_ID_56624 3000 nt of promoter + ATG

SEQ ID NO: 7336 - DNA, 3000 bp, Unknown
  misc_feature (1)..( 3000): cDNA_ID_1817429_gDNA_ID_1621141_Annot_ID_56629 3000 nt of promoter + ATG
cttgttgctcaagccactgtttgtgctatttggaagcagagaaacaaccttttgcataacttacaagacattctaccgtctatcatcttcaagaatatagaccgtgagatcatcaattccatcaacgcaaggtgtcatcggagaaagtttagatcgcttatgagattgtggatcagatagttctgtcttttggttattataattgtttgcttccttgttttttctttctttttgccaaggaaccaaagctttaggtaatcaaaaatataaatccaactctatttcattttatatgatatttactcacttagcaaaaaaaaaaaaaaaaaagttatattacaatttgctggtactaattaatgacttttatttgtatgtttaactagagcccaacccaaatttatcaaacgcacatttttttttgacaacttcttttgaattttctatttaattatatggctttaaacaaaagaaattatgatattgtgaaattgttttaataggtcaaatatattcaaatcaagatatttaacggtttgagtaaaaataagcttatagcaaaacttctgaaaatatatatggtcacgtacatattttgcagctaggaagtggacttatattactagctaaccaaaaacttataggtgcaattacagttttagggagatttttttagttctttttatttttatattagataccgttatgtttcttttcccgcaaaatctaggtacttttgatccgaggaatgatttttccattattagttaaatagcgatactattaaataaaagaataacttctactatctatgttcattttaattgattttctagaaaactacatatattaaaaaatatatattaaaactgattagaaatgtattaatttttttaaattatattttttttataattttaaaccagtgatatttaattatttgttttaaagtttaaaattcatcaataataactaataaatagtgaataaaaaatctaaaaaattaacttttttgaaacaattgtttttcctaaaagatcaagtaataagtaacagaaatagtaataaactattttcttatctcaatcattgtaaatagttttaaaatgaaagtggaatacaagtttcagttataaattataattcacactcaataacatattttgaagcaaggaagtgtacctatattaaatttcaatttcatggagcttgaacatattttgcatcaaatgagatcatgcagttttggatgttattcaactcattcaacatcgattgctataattcatgattctccatcttttcaacctgcttttcaaagatggctactaccgaatatgttgcctcatacttcattagattctacatttttttatataataaccaggatgacctttgtatatttttggccaagacatatctttataacttattaaaatgtccataaaaagcctttgaaaaatctcatgagaaagtcacaagcccatgtaaacagtgagtaaggtagtagctacacatatagtataagccagagtcgtagatcaggatcaagtgtgccatgagaaaactttggcttgtatgcactaaataacaaagtgaactagcatgttagagaaaagaagattacggtggcaaaaatattgtacttagagcatggtgcggtgcgagaaagttttgacaaacttttcttagagagagttttacatcaagatcaaaattacgtcaataactaaaagattatggcaaatgagcaccgcaaaaaataaatctcagtataaacctcaccattatcggaacactcgccggaaatctaagaaatgaggactctatcaagttagcctctatcaagcttctccgatctttagtcgatctatggatcttgcagatttaagagttttaatatcagcagtttttcgtaatcggtctccagcttcatattgcaattctattaaagaaaagttcaaatttggggttcataagagttatagtccgaatgtacgttttacaaagatttctcaagacgttgaaaaaaaattgccaatagagaaatcaacctcaacacagctcaaatctaaacaatgccagctcaaatcgaccgactataacaacaagattgttttgatggttcatcaactactcatatgtgtcatgacataccatttttcggaaaaaaatgagagcaaaaaatgacaaaaagaaaatgtggttgtgaaacacatctcatgtctcgttggtgcataactcataaggggaaatcctagactcgaaattaaacttgcatatcaccatagcacattatgattagtggagtaattgccaccagcaaaatataaatagttgtatgttttatatgaagacatagtatgtaaggtggtagaatggtaaagaatgcccccattaaaaacaagaggtagtagctttgaacccttttagcaatattttgcctccattaaatgttttggttggatctgcccttgacaatagctaaggtaatgtctatgtgttctccttctaacacagataaagaagtaacatgaagaatgacttagatagataggcttgagatcgtactgtttgtggtttgtttagtgattcggtagatggtggaagatttaattgaactctatccaattttcacgacattatagattgtagaaaatttgcattaacagattttaaattgattttttttttcactaaacatataattgaagaaatttattacaagtcatctttacttgaaagattttattactaaaaatcccgtttagtttatagttttaagatttcccaaatttaatattttccccaacaatttgtttaatactcctaatttagatttgttaatgcaaccaaacaatatgagtacttatttacaaaacctaaatactacaggtaccttttcgcaatttcccaaaactaaacacactcttcttcttcctcccatagaaacacaaaagccctaaatctcattttcttattacccgtcggagtgaaatg

SEQ ID NO: 7337 - DNA, 3000 bp, Unknown
  misc_feature (1)..( 3000): cDNA_ID_1024400_gDNA_ID_1621141_Annot_ID_56630 3000 nt of promoter + ATG
cattttaaactaaaagaataatctaaaaccactattttcagctttgattccaaaaacacaataattcttttaagaagatgtacaaaaattcgaaaaaactaggtagatttgctaaatttatccccaataattacaaaaccagataccaaatcaaaacacatgtatattatttccgaactggttcggattaattgattttcaactcatagaaacagcataaaacataggggtaattagaagaagaaaaattatggtaatgtaaatttaaaataatgtagacaaaatcaattaagatgttgtatttgtttaattcttgaccgccactatatgtaaagcctattcttgttcgacgagcagtttgctatttttgaaggctttaaagatttgtttgtcggtcttcaaaaattatatatgattcttttttgtgttttgttctcattcaaacactaccgaaaatcactttccggtagatcatctatcatgaaattgctccagcacaaacatgcttaactgtaaagttttttcgatatgtttaatcgaaaagataagtgcatttcgtggatatagatgatctaattaatttttaaaactcttttcattcactactatatatcctgaaatcgggatgttacaatttatttctgaatttttttaagtgtctcctacataactagatatgttacaaccactatggatcttatttctaaaaagtattgaatacatcatgtctaaattgattaattctcaaatatactacattttatgctattttctgtaacttccatcagaatccaaaatttttttttaacataccataaattttaattttatgatttatgaaatatttatagattttattattttaatatttttaaaaaaatccaaaataatagtatctttttagctaaaatttcttttactgtattttaggatatttctctatctaattgtacaccatacatataaccataatttggtgtaattcagatttaaattaggatgacatcaaaattagtcaaaatcaaaatagcatctctattttattcttatacttccaaggaaaaaaaataaaagagctttaaacgtgtcgttatagctgtaaagctggtgatggaactggtaagttggtaactgcttcgaccaccgtacgaatatggtggttactggttaggctacacggtaatttcttttatttacctgcagtgagaaaggtaaataataatgagtgagagagtaatggataattctgaatttgtaatgtcattgtcattgttttgtcagtaagtgatgctttagttaactcatgtttatccatatgggccattctatgtttcatatatatatatatatatatatatatatatatataatatgttattttactttttataattttgattcttagtctttatcagaaaagaaaaagaattgattcttagttcttggatttatgaaaagtaaataattatgtgcaaagagattctttgataatttttcaatataataaaatattaagaatattatttaaaaaaaaaaaattgagggaagagattcatttgattttacgaaaacgctaaaacgagatggattaaatgttagcctttttcatgacaaatatgttgtaaagcataatcatgtacaaggtaaaataattttgggtttttagtgtttatgtcgtaattctataatttttctcaactacttttttctttgtataatttagcatttttaatatcaaacacttttgattccaaatacagtttatttttattttcttaagactacttaccaaacacacataaacggtttttaatatctaaagttaccaaatgtatgtatttcaaaaaacaatcatcagcaaatttagatgttttgaatttttattagaagaaatgcattgcatggttataattagaaaattaaaataaaatataaatcaggattatatgaccaaaaattgttttaacttttacttagcatttacacataaattaacagaaatataatattttttaaaaaataattttcttataataaaaattgttatattgaaattcgaatattaagatttggcaagtcgccaaaatataatcacactcaacaaatttatattgtctcactaattatctgttcataatacatatatcaaatgtataaatcttaatataataaattttaaactaatttcaactgtcatactaaacaagagtttatacaagtctttacctagtgttatactccctctggaaatgttaaagcttattgtttaagaaaacatattatacacctaaagaaaactatgcattcgttttgtgccatgtgttgttttactagtcgtgactcgtgattctccatatcattacgttaatcccaactctcaactattattatgttattttttactatagaatggaaacttgtagattacttatatgaaggttgattaaaatgtaattaaaatctgtatcttttttataaaaaaagtctcttcatatatgttttagttgatgagtgatggacaagtaaaaataaataaaataagtacatacgttttgttttagtgatataaatatatgatgccaaaaatgtacatatattttctggataaatattagagttgtagatccaggtttgctatgatctagctctgtccgaaaattgcagagcgtgatcttttctctgtagtacgaccgatttgttttactttatccaatcgttttaactttttcaccacggttaaaaaagttaaaatcagatctctaaccattttctcaacgaacctcgctaatatttctcatttaatcaaaatttaatcaccattaatcctttggttgattactcttttgtcctcttcttcttctctcttctctttcttggtggctctcttcttatagccactgttccctttttcattgtattcctcaaatctctttacttgatcgttggttctctcaaaaatcagatttttatttctgggttttgttcgattttgtgatcatg

SEQ ID NO: 7338 - DNA, 3000 bp, Unknown
  misc_feature (1)..( 3000): cDNA_ID_1839328_gDNA_ID_1621141_Annot_ID_56632 3000 nt of promoter + ATG
tgtttgtttatgggtaagtagaggcctagaacaccatgtttggttcatttgtcttctttgttgtaaattcccgataactcctgttactagtaaatataaaacaaattatcagttcttgtaatgaaaaaaaaaattttattttgtttagtaaaacatagttgtgctacagatttttctgaatattaataacatatttacagtaacaatttttttcaattgtcattagttttgacgaatacataacattcttactaaaaaaattatataaattaaattttaaatgtcatataattttactttaaacaaactataacgtaaatattatgaaagcagaaaaatgtagctagacatattatcaaatagtttatctctaactaaaaaataaattatatagaggtactttcaaaatattctataaatttaccctttttaaaacaaaatattaatatttcttatacaaaacagatctagcttaatacattttctatagggcacaaaaaagaaactattgttaatgaaaatgaagcaaagaaaacatgtcgagaaaatgtatagcaaatataaattttcgtaatataataagaccattaatataagaaattaaccaaaaataggtgaagaaatttaaactatacgttttgggtatcggttttcttggtctagcacaaaatgttttactcaatttttatgttttatataaagttttcatcaaagagctttactcaatagtcaatataatgtagttagatagtgaaatttttaactttgaaacaaattttatataacataattgaacaaacaaaattattatatgatatttgtatttatttgttttaaaaagactatatgttacgtataaaataattacaaaccttgcacaaaaatgacgaagagagttagaacggtaaacgagaatataatgtttttattcatcttagctgatataaatgattatatatatatatatatatatatatatattttaatctgaaaattgattgtgtttaaaaagaaaaaaagaaaaaaagaaaaaaagaaaaaaagaacgaagaaagcatacatatatataagaagttaggtatatcccacattataacttatctatattaagccatctatctccttaaattccgattgagctttttactcatttgatatgttaaaagctttttaccagctagtcctatacaaaatatttttccaaattaagtaaaagtgataaattagtaaaattcatatataatttagagaatagatatactaaaatggaaaaggttataaaaatagcattttggttttcataaaaaggaaaaattaatttagaatgtaactattgaaatagacttttgtttttcagtttttttgtgcaaatacttgatttcattcattcaatcaaaacaaaccaaatcaaagtacaatgataggaatgattccaagatcccaatgtttataacatgaaaagatagagtgttccctaatgcaacataacaatagattaggtagtccgacttgtgattcataagcgcttggagacaaatgttagaaaggaaattggcacaagcaaatccatggtgagtcgatagtgacggttgattgatttcgtgatgttgaaaaaaattccaagactttgattcttgcttgcatgagacgttttacacagtttatcataaaggtaaggaagatcggtagcttacacagtttagaagccaaaagctgaggatgaaaacttgtaaatagagttctcttcgtataagagaaggagatggttagtttctccataaagaaaccaattgaattcatggtttctcattgagcgagggataaggattcggaagactctcatagtcggatagccttagctttgtagctctaagaaataggtcgggatctctcatggaagatgcaataattttttgtgggagcttgatctgatccgtaaagatgttggtgattgtgagatacttgagatcattttaaaatattgtcgacctaaagtgaacgtacatagaggatccattatcaaagtcgcaccaccgatcaaggatcatcaagtttatgctttcataaaacgtggccagagttgagtttagcgataaggttcctagatgataagcgcaagaccaattcatcaaaatcgattcacatctcatgtcatgtcctcggccacataggtaagagaatcgatgcatctatgtaatggacttgacaaaagaaaaaaaacaaaatttggcaaatcattctaaagaaccaaaattacttcgtaactagtgaaagtccttttaagaattcataacttagaaatttgtaagttatatgcgagcaacggaaacattcggatatttttctagtaaaattaaataattagagttttttttaaagaattaacggctagaggagaaattaaattactatgggtatttttttcagcaaaaaaatagttggatttttttttgttgagaaatttcccttttaacaagttccaaaataaaaactgattatagtagaaaaaaagattggaaattgataatactacttgaattttttatatgccttaaatagtatataattgttttcaaactttagaaacattaaatattaattagattttagacattatatagagtttaaatattatgaaaattataaacttttataaattttaatattattctattttaaaactcttataaagttaatatttataaatttgaatattttaaaatgaatatactaattcatagtagaaaattgatactttggaaattggccgttgttaattggaaaacatcacagaccataaattgggatcttgcgtgaatccatcaaagacctttctctgactcttattctttctcctccaatctagggttactccgaattcttcttcgtgtccctctccgattctctgcacgttgtcgctgttgtttcctctgaaatcgtctcgaattgaaggatcttggatcttttttttgctgccattgatcggttcatctttcaaat

SEQ ID NO: 7339 - DNA, 3000 bp, Unknown
  misc_feature (1)..( 3000): cDNA_ID_1817421_gDNA_ID_1621141_Annot_ID_56633 3000 nt of promoter + ATG
atggtgaggcatagaggtgtcttacgcgaatccatgagagagtctggagatatgctcggaagcgtttagtattgttgctcgaaggaaatgagggtcccaacgactcgtgaggagcggggtatgctcctaaggtaccggtaactcgagggacatggtgtctttagagtacgaggggtacggtggcttcgggtgacgatccgagagcacgctttagggtgacgatccgagagcgagttttgtggtattattttctccaagtgtcgtaactcgatgactttgtggctgagagtgagccgacacaactcagggtttgactttgagtggggaagataatatgtgtgatatccgagataccgtaggccgaggcctgagagtgacggtttatgctcgaagattgcggtctgagagtggagagtaagttgtgagcaacaatgactagtaaatcgtgagtatatcgactggatagagagacctagagggggtctggttggagggaatgcagactgtagtgatggttgcacggagttcctcggagtggaagggtgaagctagattcgaagacgaatctatgttagtgggggagaattgtaacgcccgtgaaccagaaaatcggttaggatttgtttttaaatcatccggtttaattggttgggttaattggaaaccctagagtgtgcctataaaagaaggaaactcgaaattagggctttagttagccacttttcgttttataaaggagaaaaagagagaaaaggagaatgagcagaatcgttagggtttgggagaaatcagtttcgtcatatcaaatcgtggtaaaaggtaacaaaatttggtagagttattcccaaatcctttatcgttattctccagtttacagaattgaatttggattaaaattggttgagttattcgcagtttcgtgagacacgttttctcagacgcgaattaggaccagcggagattgaaactgagatcgtggtctcgtctgttttccgatcggcacgagattttgtgggcagctttgtgacgtctgcagctaggattttaccggagcgattgaatagttaacggttagcttgtattttagggtttcgtctttgagactgtttgtttctggtgttttcctgtccagtttgcttcaaggttgcttttggttgtggacttgttgtaggacgtttctggactgtttccgacgcaaggagagtctctcctgggtttaattgctattagaatcaatttgttaaggtgagtgcgtgaccatgagcttatctaagcgattgggttgtgtgatttgttttgtgtgatgatatgtaagtgttgtgaatgtgttttgggtgaattgttcaatgactggtttgtttgtattgtattcgtgattatacctttgtatttgcttgtgtgtatagttcgtagatgggagtatcgcctcactaagtatttatgataatacttacgcatctcattgtgttgttgatgcatgtaaagataaagtgtgatcgtggaatcataacaaggaagagaggatgatctaggaactcgtttgttttatttttggtgtttttggttattggaacccggttaggattgtcagttattcttggttttgttggtcgatttatttatttattcataaaatagtatttttgacttgcagtttaattattatgttattagttggtttaattaaatatttatgagaatatttaattatatttaaaaaaaaaaaatgggtcaagttgtttcacaaacatttaaatatttctagatgtacctttgctctttttctcttttcattcattttagaaaatgatgaaattattataaaaaattcaaaaactgtattaattatttcaagttacaattctacgtattagtatacaaaaaagatcattataaaaaagttgtcagccaaaatttaatattaaacatcccgtaagtttaacgaatccaatgtatttcaagcagaagtccacatcagttgtctccgtgtaaaatggtatatgtctttgaaaagcatcacgtttgtaaatggaaacacaatgaacacgattacacgaataataagttaataacaacaaaggaaacatgatgtgtttgatgaactttgtggttgtggccatatttttgagaagaaacaaatctatttggtattttctatttaatatgtttgaaacattttatttatactgatatccgaaagcttaatataacaataataagtaatgtaattgtaaaataaaattttaattcatcactttaataaagaatatatttaattaatcatttttaatttatctatttttacattatattaactaataattaattataaaatagtaatatttatcaaaatgatcaaataaaataaaaatattaaataaatagtttagtaatagaaaattgtatttttattatgcttctgttcctttttgtttgatcttttaggaaaaatacaaatattaagaaaacgtattaaatgttgttttaaatgtattattttttgtgatttacaatttttaagaactctaaaccaataatatttaataatttgtattgaagtttacaagttatcaattataactaataattattgcattgaaaacctaaaaactcaatttttttgaaataatttgtttttcttaaaaaaaaaaaaggacaaagggagtattaggtaaaagtttgatgctaaaactatactcaaatggtgtatactgtattggcaatggttcatggttgcctggttggtagcaaaaaaacacagatataattacgttaaggctatcattaaacaaagagggtctcgcaattaaaactacactaattcattgtttacaagaaaagaaattgttacttctttggaaattggccattgttaattggaaatcgtgaatccaaccaacaagacatttctctgactctcttcttccttcttctcctccaatttagggttccttcaaattctctctgatttcgtttgaaattgggggctcctcttcgaag

SEQ ID NO: 7340 - DNA, 3000 bp, Unknown
  misc_feature (1)..( 3000): cDNA_ID_1817409_gDNA_ID_1621141_Annot_ID_56637 3000 nt of promoter + ATG
gaaaactatttagagttgccttattatatagaactagatgattacccgcgctacgccgaggttttttcggattttttgtattatttaatttaaatttaatttttatttatctaatcattcactcatgcaataaacaattacttttagtattaaaaatatttttttctaacaacattctcaacaatgcatcatacatataattcataaacaacgtttgtcttaaaccaatttaagagagggtagtgttggattctagaaacctaagaatttgatgatagagctccttacgtatgcttcagcctcagtgatttattatataaatgtcataagagaatataaatatcaatttaagagaataacttattcaaatcattaagtaattcacgactattatacattcatactttgagtttggattacaaaaaaaaaatcttcgagtatgagaaaactattaaaataattttattgaaaaatcatataaataaaaataaatttagtaatagtataattaaatatgtaaaataaaattaaataagaaatatatcattaacctataaattagaagttgaagagcttacattaattatttaatagacacatgtcaaatgctaaagtgatgatgtgtcaatcatacggagagagttgaccaactttcatatatatgattcagtattacaagaaattaaaccaagaaactactttaatgttaacaattcagaattaatacttaaaattcaatgtatgcagtaatttggccaataaactattctagtgttccgaatttgatcatttttaatctcaatattgaactatatagctttaatgtatttttgttaaaaattaaaaaaaaacttttaaatttgataaacccaatcagaaacagaaacaaaaacagaaaatattgatgatgataattgagtcaaaagtagctggtaaatttatcacatctttcccaaaagggaaatctatataacttcaatatacaaactataaagtaatttagcaaagaaactagtttaatgtcataatctgaccaattattatttaggtagttacgtttatagtcatttcttcaagatacttctctagttttcttatgtcttatcacgaattgtaatctctgatagagaattattcagagttgcttaacatttaccatcgaatattaattagaagaattttaggcaagactactcatagttaatatttaaattcaatatagcacacctattgtttctactatgttgagtaattttttcaaataaataacagaacattttttttgagaaaatttcatagaaaatctaaaatattaccacacaatacataaacaatatttttaaataaaagtttataaatttgacgtttcttatataaaaaaatgaatttgaagaacatatagacatggtacttgtagtaacgaaagtgtggtttgattaaatcagatttaatctatttttatttatatcatgtattgtgaaatgattctcccatgaattaatgttgtattttataagctagggatcagtttttaatataattattttagtaggttgtgataaaaaaaaattgtgtatattattttaattatattatatgtggtagatttgttacttgttagtattgctgaggcggatggaatctcggttagatgggttcgatttcgatttccaacctaaacattgctaaacatttttcttttatttaggtaaatgaaggtcaaatatggcatttctaaaccaagcaataaccacagtctaagttgaccaaaaataataaaaagttaaatgtctctagcgatgtcgtttggttgagaattgtattcttctcctctctctcgtcgtgacgcttagggatttggttcttctgcttcttagcattataaattaatttagcaagaaaaactacttatgtgttcttaatctgaccaattctaatctattgtaggtatgaagtcattttcccatgatatttctctattctttcttaacattcgtatttatctatgaactatttaaagttgccttattatatagaactcagtattacaagaaatttagccaagaaactaatttaatattaattattcaaaattaatacttaaaattcagtgtatggagtaagttagctaataaactattctagtgttctgaatttgatcattttttatctcaatatcgaactatatagctttaatgtatttttggtgaaaattaaaaaacaaacttttaaacttgataaacccaatcagaaacagaaacaaaaacaaaaactattaatgatgatgattgagtcaaaagtagctggtaaataatcacatctttcccaaaagggaaatcaatataacttcaatgtaaacattatttgagctctaattaattcggatgacaaaaaaaaaaaaattagcaaagaaactagtttattagtgttcataatctaaccaattctagcctaggtaggttatgtttatagtcatttctccaagatacttctctagtcttcttgtaatctctgatagagaattattcagagttgcttaatatttaccattcaatattaattagaagaattattaagactactcaaagttaataattaaattcaatgtttgaagtaatttagccaaacaaatattatagtgttcttaacctaatcagttttattctcggtagagaattattcaaagttgcttactatttttaaattagtgcttgaattaatttaacttacatacaactatagtgttcttattttgatcagttctaatcttattagagaacaactcaaagctgcttaatattgaaaatccaatgtttgaaataattatagattttttaatttgaattatgtcaagattgaaacattgactctcaaaaacaaagcaacccacatggttgtagaaagagtcctcgaacgttagaccttatataaagcctttgcttcattgacaatcttaaacatcgaaacatttatctctttatcatttcaagagggaaaatg

SEQ ID NO: 7341 - DNA, 3000 bp, Unknown
  misc_feature (1)..( 3000): cDNA_ID_4254981_gDNA_ID_1621141_Annot_ID_172848 3000 nt of promoter + ATG
catcgaatgcatgcattgacgtttcagatgactgtgtcttttcgataacttaatgaaattgattttttcacaagataatttctaaacctaaacaaatctatcatttttgaattttcgtttaacattaaactcacatctaattacttcacaatacttaatggggttgaccgatatcaagtgttgtttcgaatttctaacttgtgtttatgttttttttttctgtttttaaagtttcagtcattggccaattgtgtttcttccgttgatcagtttgttttcatctcaaataatcaagcctatggcaaggtaatattcaaatctttcatttctacaaagaaaatcagagtattatcaatacatatatccgtttctcaataaatatcatttcacataattaataaagtatataaaaaatatctcgtaaaaagcaattattcttggtattgtatttattatttttatatttgtttagaattggattggaattatgtattttctatggaaattcatattgaaatctaaacaatactagtcattttaaaacagaaaaataatttgaaaggagtagtagcaattaagattgccagtgcactggttattggtattagttaaatattttagaccaccgaccgcatttaaagaagtagttaatatgtataagacaaaataagaaacaattattgaaaacaaaaacaaaaaagaaaagaccattaactctagattcacattgtgacatggtatttaatgaaaagaccattaactctagaccgcgttattgaagatataaggtaaaactacaaaaaatataacaaattgaaggagcctttaaataattaggcaaatgttatatcttgcgttcctgcctccgggcatgatgtgctaaacatttgtctaccaactcttgctttcacttgcattgataaaccaaatacgaccaatttaaacacatgaacctcaaccttaatgttggcctaagagtctcctaattgaatgatccaagattgaagtaatcaaaaaaggcagtacacctatttcaatgacaaggcatttgtatgaaattggttagtatattttttttctagacgagaatatttaaaaacgtaacgtacgcaatatgacgtcaaaagaaacaacgcagcatttatgaaacgatattgtattgttgtgcttggttaaccaagtgacattaatacattaattcgtttttatgtacgtttataagatttcgtttttaaacgcaccaaaaatatataaaaccatctttgcaatgaaggaactgcttactacactgctcgcttgtccaacaaaggttttttaattgatctttcgggaaacttatgattccaatggcggttttatcgaatggtcaccggattttgttgaattcatcatattttgtcaaaacaaaattcagatcttagaaaaatttataacattgatttgtaaaaagtgtataagatagtcctttgggattaccttatcgttcaatggaccataaaaatagctcgtttaggttccattactttccatcggagtaaatacattagtccaaataattcgttttcgtaaatatataagcctaaataattgtgtccaccaatttgtatgttggtgtgttttcacttgcacactggtaaactaaagacaaccaattctaacgcatggatattggggtcgtttagctaagggacaaaatttgataaataatgaacttagagacaattagtttttctatctttgtaaaaagacaaataaagtaaataaatagatatgaagttgaaaaagttcaaaaaaaaaacagcctcagcttttgccttgcgtgatagaacgagttcacggacatgcaacgagcaagagcgagttgacatgcatttaataacggctagactaacttaatcgcacacagatattaacaaattgtctgcttgtataatattgaccttttagtgctttatatatgtgttttcacgtgtacacattctagaatcgtataatatctgtttgtatgttaaaacttctccaatctgaaaaaaaaaacaataattaatagtctagccgttactaatatgcatgttaactcgttcttttttgttgtatgtgtattatttcacatgacaagctttaacctttaaaatgcactcaactcgttccttgcacaaaaagtcaattgaatatacgtattgtcccatacgcaaggcaaaaaagcagagataattattatttttttaaatattttccaacgtcaaatctattttttttgtcaatataccttaaaaagaaaaaaaactaattgtctctaagttaattatttattaaattttgtctcttaacttaacgacccagaaagcctccttggttcaatggttgatcaagggttcattaatacttatatactaagaggtttggagtttgaatcccagctactgcaatttattaatagatttgcagattaattgaggcaagtgtgcaggagatctacaacgatgtacaattatagccgttcgccaggattatacgcagagaagatatttttggtatccatcaagcgcatggagaagaagaatgaggtgtcgtatatcgtggatctaataagggaaagaaattatgcataataaaattgtctatgtaacaactctcgtaatctgtaatagaaaaaaaaaaactaaacgacctagatattcatgcgttaaaattggttgtttttttagttatcaatggaaaacacaccacatcagaattggtggacttgggctaatatatttatgaaaacaaatagtttggggctaatgtattatctaatgggctaattaataaaacttaaacgaactatttctaaggcccattaaacgatagggtaagcccaaatcactatcttacgcccctctttatattcatcgccactgaaactgagaaaagggttagtttcgctgcgctgtttcaagggttttcgtttttatcttttcctccgaagaagaagataagaggttgaagaagaagaag

SEQ ID NO: 7342 - DNA, 3000 bp, Unknown
  misc_feature (1)..( 3000): cDNA_ID_1817398_gDNA_ID_1621141_Annot_ID_172843 3000 nt of promoter + ATG
tcatactccacgtaaaagagatatgttcgaggcatacatcaaatattataatcaatcatcgtgctaacttatactacaacaaaatattaatataaatttactatccaatcttacgaattcgtgcaaaaatcatctaatttttttgccacaatggcaagaaactattaaattttgatgacgtggacacgcacatgtaaaaaacgtggatgtcaagtcataatgttaacaaactgttttttttttcatttccttcaattctggtttttgttttttaaaagttgtgtataaacataaataaatatatatatttatttatatatttccaatggattctccaaaactcttatactcactttcagcatattcttccatcgtgaaaccttaccaaaaaactaatattaaatttctatggtcgtgagtatgcttaaaatgtacctactatttatgtgtagtggtttataaaatctaatattattggaaacattttaaccattgaatttttgatgacttaaatttttttttagataatttaattcgttaaaaatgtaaagatccaaataacatggtgttaagtgtccctactaaaaaattaaaagtggtgttaagtgagacttaacaacaaatcatacaaatttcagaattcacctaaaatcattaaagtcatccaaaaactcattaaaactcaaactgatttaaaatataagattaaatgttttattctatatcacttagaaaactgaaaataaaataaaattgtttgttaacactatgatgtatcattcacgtcgtttcacacatggtctacattatctattatagtttcttgccaccatgacaagaaatgtataattttgcacaaaatcataaatttagatggtaaattttaattaacgatttgttcacgtatgaattagtattcatacttatattttaattgaacttgtcgctttagttgaggtaagaaaatactataatagtaatgaaatctcaccaaataacaatcaaaaatttatttcaatcacataagatcttgtcaaaatccaccaaatcatcatgcgtgtttttcaacatctctccaaatcttctaaaaattactaatccaatacaccgcctaactaatgtatttggtaataactcttgatatgtacaactaatttacgtgttctccaccataggttatatctgttaactagttacgtacgtcgaccaaaaacatattactttatcgtggttttatcgttgaattattcactttcatgttgggatatcaagatttgaatctttcaatcatgattttaattatagttgtcaaatgtcatatcaaaaatatctattttcttatagtttttaactgattagtatgagtttcgatttggaatatttcagatatgaacatacaactaaggaacaaaatattgatattagtttcctatatctttttatttattttaaatacaatagcagatcacatgtatatattttaactcaatagttacgtcgaccaaaaacatataactttaaatatcgtggtttcattgttgatttattcactttcaggttgggacatcggaatttgaatttttcaatacgaattttaaacatagttaaatattttcttatagttcttacttcttaacgattagtatgagtttagatttggaatattttaaatatgaacatatagttaaggaacgaaaggcgatcacatgtttgtagttcacctaagtattgtagttataatctcatccagtacctggagcagttgagctaatctttagattaagcttgggcaaaaaatccggactaaaatacttgaaccgaaaccgatccaaaaaatcggtttgggacgagtacggatattacctatttactttattgagtcttgaattgtcgtacccgtgagtatagggtaaaatccaacccgaacctgatactcgaacatgtatccgcttacccgaaattacatatacttattcatagatttatatatataaaatcttattttatatttaatatttgaactaaatacatttatatccaaatatctaaaaataattaccaaaaactaaatacatttgtaaatacttaagactaaatatttttatacgcaagatacttataagttttttggatattgggacaaaatttcggttatgtgggtaaaattcagatatttgggtaaaatattcaggtatttagataaaattttagatatttggctataaaatacctgaatctcaaagatacccatttttttggtatttagcggttctaaaattatatatccgaaccgacccgaaccccattggatccaaaccgaaacaaaacagaaattttagatttatcttattgggtcctaaacttttctacccaaaaaattcttatccgatcgaattttacccgaatattccgacccacatacctgaatgcccaaccgtactttagggaattacatccgatgcacaaaagaactaacaattttgtactatcattaacaccacccatttgcaactccgaaagacgatcacatattgtagatttaaaatgcaatcttaatcacattttcactaaaagttttccttaacgtatttggtgggcatgatttaacagctcaatttggcaggtcaacgaatcaaccgtgctttaaacgttgtaatgtttttcaacttaagataagactcgaaatcaattaaaaaaacaaacaaaaatcatagtcattgtttttctttgttaattcatatacactcatacaaaacattgacaacttatctattgtttaatctaaataatacaattatgtacaagtgttactttagtaatactgccgtccatataacggcacaaaacggagaatgacgtcaccattgttgatgtcacacctccatgtaacttctgttataaacgcattaaacgttacacttgtgtatattatatagatctctgtccctttatatttcatcttttgacattacaaaattacattaccaaacacattaaatg

SEQ ID NO: 7343 - DNA, 3000 bp, Unknown
  misc_feature (1)..( 3000): cDNA_ID_2151397_gDNA_ID_1621141_Annot_ID_172832 3000 nt of promoter + ATG
aaattgttttgatttgcgaattttataggtgagggggtaatatttttgaacagctttagaagtgtagaaatatagattgatcctttgttgtgatgttcaacaccaagaagatgtgtatccttttggaacccattgatattaatacataatatcatattattgagcagacatgcaaaaaaaaaaagcttattaataattcccttttttttatatagaaataacttttgtagcttcagctatgaggaaacattgatgtttgaatttatcattaggacacgagtatggttgtgtcacaaaaattccctagacatcctcatacatgaagcctgatacaccttggttagttggttctattctataacgagaaaacggtacatgttcggcctaacaatcatcatatgaacttgcgtttactattatcaataaaactaagaatttaacccgcggtgctattatgctttaaaaaatataaatttattttttaaaagattaactgaagatatatcatattaatttgtattttaaaatatagatatctatccttgtattatttagtatatgattactattatttaggtttcaaattttgaagtatagatatgaaaacctatatttttttaagtaacaatgtgtggtagattttaaaattttgaatattttgtctgcagtataccgcgggtcaattttttatagcttgtattttgagttatatttgttttgttaatattgtatgtttttgtgtttaaggttgtatgattgtattttgattgttaattttatgatttcatccgtaatatacctttctttattaatattgatcaaaacccgtcatcccatataaatccgtatatattatctcgttagctaaattattagtgttataaaatccaagaaaataaattattattgttctaattccaataatttaggatctcacccgtggtataccgttccttgaatgatttaaaatatatattactaatatagattttaaatttatcatataaagtatatgatttcaagttttgtgcttttaatttaaataaaagaacggtttaagtgatgataaatatagttttttttcctgtatgtgtatatgattttttatgtgaatattttaattattataaattagtatttttattgctatgcaaaatgttaatataaatatttgctataaattggatttatgcatattttgtgaagtaaaattcacgattttttttcaaaaagatatatgaaaagattgtgtagagatttttagaaacaaattaggcaagatatagtttggttaatatcttttttaatttttttaactaaataataaatgccagtggcaagcattgtaaataagtcccaactccaggatttattccacaaaatggttacaaaaatgtatatgtagatattaaaataaattttaacttaataagataaaaaaatttctaattattcaaaaaatcagcaatgttccatttagttaatattttatttttcacaagagattgctttccttttttcatcttatatatttacccaattttattagagatactttcttttatttctattaaatatttctgttccaaactgtaacgcccgtgaaccggaaaatcggttagggtttgttcttaaatcatccggtttaattggttgggttaattggaaaccctagagtgtgcctataaaagaaggaaattcgaaattagggctttagttagccacttttcgttttataaaggagaaaaagagagaaaaagagaatgagcagaatcgttagggtttgggagaaatcagtttcgtcatatcaaatcgtggtaaaaggcaacgaaatttggtagagttatttccaagtcctttattgttattctccagtttacagaattgaatttggattaaaattggttgagttattcgcagtttcgtgagacacgttttctcagacgcgaattaggaccagcggagattgaaactgagatcgtggtctcgtctgttttccgatcggcacgagattttgtgggcagctttgtgacgtctgcagctaggatttcaccggagcgattgaattgttaacggttagcttgtattttagggtttcgtttttgagactgcttgtttctggtgttttcctgtccagtttgcttcaaggttgcttttggttgtggacttgttgtaggacgtttctggactgtttcagacgcaaggagagtctctcctgggttcaattgctattagaatcttgttaaggtgagtgcgtgaccatgagcttatctaagcgattgggttgtgtgatttgttttgtgtgatgatatgtaagtgtggtgaatgtgttttgggtgaattgttcaatgactggtttgtttgtattgtattcgtgattatacctttgtatttgcttgtgtgtatagctcgtagatgggagtatcgcctcactaagtatttatgataatacttacgcatctcattgtgttgttgatgcatgtaaagataaagtgtgatcgtggaatcatggcaaggaagagaggatgatctaggaactcgtttgttttatttttggtgtttttggttattggaacccggttaggattgtcagttattcttggttttgttggtcgaattatttatttattcataaaatagtatttttgacttgcgctttaattattatgttattggttggtttaattagatattttgtgggaatatttgattatattttttaaaaaaaaaatgggtcgggttgtttcaatttggtatcagagcgattacggttctaggatgtgtagaaaaattaattgatgaattattttcctgttgattgatgtgggatgagctagggtgttagcatattgaggattgattatggagtgtttagtcaattgtgtgttgttggagtcctagcatcatcttctccgagccttaaatgagattccacggtaagttgtttgtgatatattcgtttgttttagtttcttagccatttgttcttgagtagcgcag

SEQ ID NO: 7344 - DNA, 3000 bp, Unknown; identical to SEQ ID NO: 7338
  misc_feature (1)..( 3000): cDNA_ID_2992375_gDNA_ID_1621141_Annot_ID_172830 3000 nt of promoter + ATG

SEQ ID NO: 7345 - DNA, 3000 bp, Unknown
  misc_feature (1)..( 3000): cDNA_ID_2151380_gDNA_ID_1621141_Annot_ID_172824 3000 nt of promoter + ATG
ttttcaactcatagaaacagcataaaacataggggtaattagaagaagaaaaattatggtaatgtaaatttaaaataatgtagacaaaatcaattaagatgttgtatttgtttaattcttgaccgccactatatgtaaagcctattcttgttcgacgagcagtttgctatttttgaaggctttaaagatttgtttgtcggtcttcaaaaattatatatgattcttttttgtgttttgttctcattcaaacactaccgaaaatcactttccggtagatcatctatcatgaaattgctccagcacaaacatgcttaactgtaaagttttttcgatatgtttaatcgaaaagataagtgcatttcgtggatatagatgatctaattaatttttaaaactcttttcattcactactatatatcctgaaatcgggatgttacaatttatttctgaatttttttaagtgtctcctacataactagatatgttacaaccactatggatcttatttctaaaaagtattgaatacatcatgtctaaattgattaattctcaaatatactacattttatgctattttctgtaacttccatcagaatccaaaatttttttttaacataccataaattttaattttatgatttatgaaatatttatagattttattattttaatatttttaaaaaaatccaaaataatagtatctttttagctaaaatttcttttactgtattttaggatatttctctatctaattgtacaccatacatataaccataatttggtgtaattcagatttaaattaggatgacatcaaaattagtcaaaatcaaaatagcatctctattttattcttatacttccaaggaaaaaaaataaaagagctttaaacgtgtcgttatagctgtaaagctggtgatggaactggtaagttggtaactgcttcgaccaccgtacgaatatggtggttactggttaggctacacggtaatttcttttatttacctgcagtgagaaaggtaaataataatgagtgagagagtaatggataattctgaatttgtaatgtcattgtcattgttttgtcagtaagtgatgctttagttaactcatgtttatccatatgggccattctatgtttcatatatatatatatatatatatatatatatatataatatgttattttactttttataattttgattcttagtctttatcagaaaagaaaaagaattgattcttagttcttggatttatgaaaagtaaataattatgtgcaaagagattctttgataatttttcaatataataaaatattaagaatattatttaaaaaaaaaaaattgagggaagagattcatttgattttacgaaaacgctaaaacgagatggattaaatgttagcctttttcatgacaaatatgttgtaaagcataatcatgtacaaggtaaaataattttgggtttttagtgtttatgtcgtaattctataatttttctcaactacttttttctttgtataatttagcatttttaatatcaaacacttttgattccaaatacagtttatttttattttcttaagactacttaccaaacacacataaacggtttttaatatctaaagttaccaaatgtatgtatttcaaaaaacaatcatcagcaaatttagatgttttgaatttttattagaagaaatgcattgcatggttataattagaaaattaaaataaaatataaatcaggattatatgaccaaaaattgttttaacttttacttagcatttacacataaattaacagaaatataatattttttaaaaaataattttcttataataaaaattgttatattgaaattcgaatattaagatttggcaagtcgccaaaatataatcacactcaacaaatttatattgtctcactaattatctgttcataatacatatatcaaatgtataaatcttaatataataaattttaaactaatttcaactgtcatactaaacaagagtttatacaagtctttacctagtgttatactccctctggaaatgttaaagcttattgtttaagaaaacatattatacacctaaagaaaactatgcattcgttttgtgccatgtgttgttttactagtcgtgactcgtgattctccatatcattacgttaatcccaactctcaactattattatgttattttttactatagaatggaaacttgtagattacttatatgaaggttgattaaaatgtaattaaaatctgtatcttttttataaaaaaagtctcttcatatatgttttagttgatgagtgatggacaagtaaaaataaataaaataagtacatacgttttgttttagtgatataaatatatgatgccaaaaatgtacatatattttctggataaatattagagttgtagatccaggtttgctatgatctagctctgtccgaaaattgcagagcgtgatcttttctctgtagtacgaccgatttgttttactttatccaatcgttttaactttttcaccacggttaaaaaagttaaaatcagatctctaaccattttctcaacgaacctcgctaatatttctcatttaatcaaaatttaatcaccattaatcctttggttgattactcttttgtcctcttcttcttctctcttctctttcttggtggctctcttcttatagccactgttccctttttcattgtattcctcaaatctctttacttgatcgttggttctctcaaaaatcagatttttatttctgggttttgttcgattttgtgatcatggcggtcattgagagcgtcggagctaatactactgtggaagctggtggtttgatctcgccgtcgccgccgtcttccgtcaccagtcaagaatcaggagcttcttctaacaacgatcacggtggaaatggaatccatgatgagatcggagtccacgtggcgagatccgacggtggtgagagttttaagcgtgatatg

SEQ ID NO: 7346 - DNA, 3000 bp, Unknown; identical to SEQ ID NO: 7336
  misc_feature (1)..( 3000): cDNA_ID_1817429_gDNA_ID_1621141_Annot_ID_172823 3000 nt of promoter + ATG

SEQ ID NO: 7347 - DNA, 3000 bp, Unknown
  misc_feature (1)..( 3000): cDNA_ID_2151370_gDNA_ID_1621141_Annot_ID_172819 3000 nt of promoter + ATG
tccactttatgaaattatagtccactaactcacatgggcatggtctcatcatgcacttctagtctctctattctctaatttagattactaactctaaatccaacctaccaattcctcctaataatagtgacaaaaaatgttcctctttaagagaataaactttaaactgattgatattagagatcccttgatattatccatattaattgtcttaaattcgatgttcatcttgattaattctatgtatgaactactcatatatataccaaatgttaactgcatgatttataccattgttaactttttctatcttataactgaaattaaatatttgatattaaagaataaagaaatggggttcatgcattacaaaagaattagaatcttatcggtaaattaaatatagaattcttaggagctttatcaaaaactaccaaataaaatgtgcctaaacattcactgccaataactttttgacatggagattttgactagtccaagcaaaactcattcatatatgagaccttttctcgatgctacataagttaataaatattaaaagaatctcagtttcaaagttgtatttttggctaaaaccattattttgtagtcttcgaggtcttgtcgtccttcatttgcacgcctcgtttttattatcgttcgtatttcgtatctatcatgtatgcattaggatcttatgtttgtatgagtattaaattctgaaataagtttttgattgtgtccgtgacatttcaattaagcataaacccttattactagccaaattggaagttggttggaaattagaaaattaattttctgataagagtaatgtaaactgaaaaatacttttgagcattttcctcctactttttatgaaaaatgtataaaagtattccgtgtattatcattttttctctaaagaactcccaaatattggttaatgtatagtgtgatcattagagtttgaacaccttgttggagagtgatctaaactgatctaccaagatcgaacaaaacaaccttagatcatattaaactgattgagactaaccaaaattacaaacttatactgcaaagccatagtaaaaaatcttagataattgtgaatatatattatttatattattatagtttaggaatttagctttatagtatgtatattatttattctgtagtgatcttgaacttcaatttattttcatctttgtataataacagttaatactaattattttgtaacatacacaccttttttgttttgtttttattctcatcaaatttattgtttttttttttttttacagcaaatttatttgttttgttcaacatagcaggatagagaaacactgacccactaaaatacatcacctatgatttctgattactactataattctgatccaagaaaaaagcaattactctaaattcatatatatatatatatatatatatatatatatatatatttttttatcaatagagttgaaaacttttaaaaatagcttctgctagttttagcaaaaaggtgaaaaccagagtaaaagcattcttccaaataaaatagggtaaaagtattactctaaattacactttttctaatcacaaatatattaaaaattgaattttgtagattattattataaaaataattaataattattctcacacatttttattaaactctcatcatattaattaatttggtttaacatatcataaaaagagacaaactacgatttctaaccactataagattacttatccccaacataacagttcttgaagactacattctctagccacccaacttctatagattatcacaattttaactattacaggctctcttttcattttgcaatttcctaagaaacgttctatattgtgtaaacacgtgacaacaccaatgagctaaatcacaatttacaaaagaactaattcttttttcaaagaaaacaataaaaatcatgttgggaactttggattcttggtacaacgaggcattaaagtctgtggctctctccttcttgaaaatatttacaatgtcatcttggaccgtcaaaatcttcatttactatattacattaatggtggtatatatttaataatcccatgtaacatctgtgcaagtgcacttgcttattaatatagaacataaccagaaagctgcaacaattctgatgcacccttgtttgttatataatcatcatcacaaatatttttagtctattcttagttcagttatttttgttttatcataagcatcattttcatcaacagctgttatattttctactctgttcagtggagatagtgaaactgttgcttttttttggacgtttgcgaaactgttttaaatgtaaaataatcaagcacgagagagattatccctccttaattttcttgattaaacttaagctaatcgacaaagaaaaataaaataaacctttaagacgatattccttattttagcacataatttatctaagttataatttcaaaacaaaattcaaattacagtatttagtctctacgaaaattaaaactaggaaaattaagaaagttacaataagtttttttccaagtataaatatattttatgagagatgaggtttattcttttatcaaaaaaaaaatgagaggatgagaattatttatgtaatttatagttttttttttgttatacgagcttaccgtatatgtatttacaaaaggattgtaaaacacaatcgttttttaatttactaatatcagctagttaacatattgttaattactattatttgtttgtttaagttatataaatttttatttaccaaattaactcatttatttatgatgtttgtcgtgtatactatatatatacacattcatgctatcttccttcgtctcgtggtatagttacttacatgagcatcaacttcacttatagctaacttttttcttctctttctttctctctggctcgtcgcttttagaaaacgttaattcaatatg

SEQ ID NO: 7348 - DNA, 3000 bp, Unknown
  misc_feature (1)..( 3000): cDNA_ID_1817405_gDNA_ID_1621141_Annot_ID_56638 3000 nt of promoter + ATG
gctgtgaatcaggagaggattttaactcctctcactgcaacaaaaagctcataggagccaagtacttcatcaatgcttttcttgcgacacacgaaagcttcaactccagtgagtcacttgacttcatttctccgagaggctacaatggtcatggaacacacgtggcaaccatagcgggcggttcatacgtgcctaatacaagctacaagggcttagctggagggactgtgagaggtggggcaccacgtgctcgcatagcagtgtacaagacttgttggtatcttgatttagacatagcggcttgctcatccgctgacatcttgaaagcaatggacgaggcaatccatgatggtgttgatgttctctctctttctctaggctttgaacctctgtatccagaaaccgatgttcgagatgggatagctactggtgcattccatgcagtcttaaagggtattacagttgtttgtgccgctggtaatgcgggtcctgcggctcagactgttggtaacacggctccttggattttgacagtggctgcaactactttagaccggtcctttgttacacctatgacacttgggaacaataaagtgatattggtaacaacaagatatatacaccataatgttttcacaacataatgtttaatgatctgtgtcttattgtgagtttggtaactgtattacagggtcaagcaatatacacaggtacagaagttggctttactagcttggtttatccagagaatccagggaacagcaatgaaagtttttctgggtaatatcgaatcttgaactataagaagaagattgatacactatattcacccttgttcttgtaatgcagtacatgtgagcgtcttctcatcaactctaaccgtacaatggcagggaaagtcgtgttatgtttcacagaatcaccttacagtatttctgtaacaagggctgcacattatgtgaagagagcgggtggtctcggtgttatcatcgcaggacaaccaggaaacgttctcagaccatgtctagatgatttcccttgtgttgctgttgactacgagctagggacctatatacttttttacatacgttccaatgggtatgaaaacatagactaacatcttcaccacttagacaagtaagaaaataagaaacatgttgttttatggtagatcacctgttgtgaagatacaaccttctaggacacttattggacaaccagttggtacaaaggtagcaagtttttcatcaagagggcctaatccaatttcagcagcgatcctcaaagttagtcaaaatctttacatgttctgttttgatcagactcaagaaattatcttgccttagaagttatcaatcatatgaatgcagccggatatagcagcaccgggagtgagcatattagcggctacaaccactaatacaactttcaacgaccgagggttcattttcttgtcagggacatcaatggcgactcctactatttcaggaattgttgcacttctcaaagctctgcatcctgattggtctcctgctgccattagatcagctattgtcactacaggtgcttatcttcttcattcaatatagattagacaaatcaagaacatactgatcttgataatcgtttttactctgtgtagcttggagaacagatccatttggagagcagatatttgcagaagggtcacctaggaagccagctgatccattcgactatggtggaggccttgtgaatccagagaaagctacaaaaccaggtcttgtatatgacttgggactcgaagactatgttctctacatgtgttctgttggttacaacgagacttcaatctctcagcttgtcggtaaaggaactgtctgttcgtatcccaaaccatctgttcttgatttcaacttgccttctatcacaattccaaatctcaaagaagaagtcactcttcccagaaccctcactaacgttggaccacttgagtcggtctatagagtagcggtggagccaccgttgggcacccaagtgaccgtgacgccggaaacgctagtgttcaactcaacgaccaaaagggtctcttttaaagtcagtgtctcgaccacacacaaaatcaacacaggttactactttggaagcttgacttggagtgactctctgcataatgtcaccattcctctctctgtgagaactcaacttctgccctactactacgatgagaattgaacaaacaaataaacaaacactaaccatttgtgacttatgatgagtttgtactgatgaaagcatatacattgataaacccaatcataaacaaatacaaaagtatgtgatgatgatgattgagtgaaaagtagctagctcgtaaataatcacatctttccgaaaaggaatatcaatatttttccatgtatcaacaataaagaaattagtttagtgttcataatctgaccatttctaatccagacaggttcacttctctaagatacttctttagtcttcttatttcataacacaacttttaatctctggtagagaactattcagagtagcttgatatttaccatccaatattaattagtagaagaactattcagagttaatatttaaaattcgagattaagagtaatttagccaagaaaatattctagtgttcttaacctaattagttttattctcagtagagaattattcaaagtttcttaatatttttaaattcaatatttgaattacttttaacttagatacaactctagtgttgttatgttgatcacttctaatctcattagagaactattcacagctgcttaatattgaaaatccaatgtttaaaataatatagattttcaatttgaactatgtcaaggatgaaacattgaatctcaaaaacaaagcaaccgacatggttgtagaaagagtcctcgaacgttagaccttatataaagcctttgcttcattgacaatcttaaacatcgaaacatttatctctttcttctttcaaacgagaaaatg

SEQ ID NO: 7349 - DNA, 3000 bp, Unknown
  misc_feature (1)..( 3000): cDNA_ID_1817401_gDNA_ID_1621141_Annot_ID_56639 3000 nt of promoter + ATG
cttggcatgtacaaatttctataatgtttggtagaaatgagtttttaataataagaatagagtttgttaattcgtaccaaaaagatatataatctaaagtttcatttcaaagattatacttttaaaaaatatttattttgtgaccaaaacgacttgtgataccacgtcattgccacgttctcagtcgagtcagcacaataaaccgtcgttgactatttccgtcaatattagctttgatttagccatttttagtgaagttcatgcatgttatttgaatattttagtttttcaggttgtaataaccattgtgactttgttagttatatgaaaagtacagtacgatgaaaaatttcagtgtgaaataaacctttttccgacaaaactataccactagacatctcttttcaaaactaaactgtttttacacaaatggtccgtttaagtccacggtctttggacccaccaaaacaaccttatttataattggattggccataatcttagagggtcacaagtcgcaatcattgggatggagagagttgtgtttataaagagttaaatgaatgtttaagatttgccaaatatggtaacgtaagcttgggaccaaagtgggaagctgggaacatagttgtgtggatgattggttcggcttatcgttggatgagttcgtatccggagtaacattgcatgacctcatgaaaattggagcattaaccttttgcacaagcctttttttcagttacttgggaaacaagaattagcaagaaattttcatttttcttgtctcatctaggttataatttttcatgttcgaatatatttcatttttcgtgggaagtaggaattataattaaaaacagtgtagtttacaaaaaggcgacgataatcaatagcagtgatggcgttagagagattcggtattgcctagtgtttattcatcatatatactaaattttctataacattaattaataaatttagttttcttataatttttatcctaaaccgaacaaaaaaccaaaataaaatttgtatctatttggtataaaaaacggaagaataatatataaaaaaagaaacctaaccgtttaaatcgataactgaatttccatgtctaaactaaatctatctttgcataattatattttaattctttttgcataattccaagttggttccaacaacgaaaatacacaaatctctagtatagttggtgtttacaagttatgtccttttaattatttttaactgttattttttcttattgatggtagaaaaacaaaatagtaactgttatatgattctgatgattttagagaagctgatgtgatttattgtaaaatattttccaattccatctaaaatcatgagatttggatttctgtatttttaactaaagaagtcttatcaaatcttctcaaatcctttaaaattaataagaataaaatccacaaactatttttaataacaatgaagtttaaggtagatttttaaattttaataacattggattttattagagtttttaaaatccatgataaaatttaaatacccttaaaatacacaaatcacttaaaatactagattgaatatatacccttctaggattacaaaataataaacttttccaaaaaaaaaaaaggaaaacgttgtaagaaaaaagaggaaaaaaagttggaatttagattccttgtatgatacggcaaagtttgttctctatataaacaaacttatttgcttcttttcttcattacaaaaatacacaaagctttttcgagttcataaggatatctcttttcaagtcgagtttgattatagaatcatgaattcattgttcactatgtttgattccttttgtgcagagattatgaggaacaaatttacatctaagtcaccttctcatggatcatctgcttcttcctctggtgttcaagccgtgtcgattgagaagacaccaaagaaggtcctggtggagaaagtactgaggtttgcgccggagtttgacgggcttcattgcttcgaaaccatagttccttcttgattattccactacgattttcctttttttttttttttttgatagattttgtcatgaaatagttacgaaagtgttgcttaaatacaaacatgaataattatatggattggattatgtcacaagtttctttatttgctcctagtcttcgttgtttttttaaaatttcatattggtgatgatgttcttccgaattataattttattctctttttatgcaacaatgaacaatcgattcacggtcatctaaatgcgaaactagtttaaccaaactttgcaagagattataattttttttacagctgactagggtttaggcatttaaacctaacttaatttggtttaaccaaaccaaatcaaacctaagtttggccaattcagtttagatttggtttagttggtgaccttattggcaataggaatcatgaaattcagtaaccaattcggctcggaaaccaccaaaccgaaaattccaaatatttttttaacaaatatagccaaaataccaaaaattgtcgaaattttgtcctaaacgaaatccaaatttaatcacaatcttttacacgagattcttttgtagtttctaattccttcggagctaaggaatgacgaatgagcatgaaacatacttaggtttgctctgatgatgtgttcaatacattgcaataaactagattttagttgacttagaacaggatgtttgatatattctttacacattgtttattggattaaagtaaaactctgtgactctgactatatgacgaaagataacaaattcaaacaagaaaaacttagaacaattccaagaaatagaaacattttggtcaaaaaactcatctaaaggccacatcgatataaatgtttaaggttccccattattagtccccaaatacattctcttgtaatgagaaatcatagaacatcaatctttgtggtactaagtttggttataattctcaatg

SEQ ID NO: 7350 - DNA, 3000 bp, Unknown; identical to SEQ ID NO: 7342
  misc_feature (1)..( 3000): cDNA_ID_1817398_gDNA_ID_1621141_Annot_ID_56640 3000 nt of promoter + ATG

SEQ ID NO: 7351 - DNA, 3000 bp, Unknown; identical to SEQ ID NO: 7341
  misc_feature (1)..( 3000): cDNA_ID_1843167_gDNA_ID_1621141_Annot_ID_56642 3000 nt of promoter + ATG

SEQ ID NO: 7352 - DNA, 248 bp, Unknown
  misc_feature (1)..( 248): cDNA_ID_2918439_gDNA_ID_1621142_Annot_ID_56644 3000 nt of promoter + ATG
gaattcctcagaggcaatgatcaggttgtcattatatccgtaccctcttttcattagtgagtcgagtagaatgattaaggatttgaaacttggttgctagatttgttagaagcctgtttcatcaccttcatggaggtgtattttagcctacttctatgtgatattgctttgaacattcgatgcttcttcttcatacacttatcttgttacatttccatttgttatagttccaacaattacgctccatg

SEQ ID NO: 7353 - DNA, 3000 bp, Unknown
  misc_feature (1)..( 3000): cDNA_ID_1444414_gDNA_ID_1621142_Annot_ID_56645 3000 nt of promoter + ATG
gatatacactctgcgagtgttgtcttcttggactcaatcctgcaactctcaggcgtcttttcttcttttatctcccaaaccggtacagtctcatttgtttctgttgaagcctcttccttcttgtcggcatctttgcttgatgttatggtgacactctctgtagactcttcatgagaatgattaacggtttccgaaacttccacggttcctcctgctgaagtgtcttcaagaaagagacatactacagcacaatcatcattcttggaagtaggatacttaagcctccatgctcgaaccgccgtgtcgactacagcacgagctgcagtatctcgactaggagctgaagccacaatatcaacagcttctttgttcgacaaaacatcccatacctagcattagagacactttagctccaaagatttcgatagtaaccagtgagaagaataagaagagtaatgtgtaccccgtcagtagctagaataatatactgatctctttcagtgagtctatggtagttgatatccgggacagagattagaccataatctttaaggcagaagtccccaaaagctcgagccattgctaaaccaggtgaatcgctgttcggtaaccacacacgcgcaacctcaggctcgtcttgtaaggcaaacactctacctttacatctatggattcttgctgattcacctaaagcaagtacatagagaagaaaatcagattatgtttccaaagatgatcaatagtgacaacataaagaagagactagatatacttggcaaatcaggttttaagtctatggtcaattgtacagccaccaaagcattgtcttggtctcttgtggctagaacggctctcgagtcaccaatatttcccaccaccagatccttaccctataaaggaatatataccaaacagtcattgaacagagccaatgatagagtaaataaccggtgatcggactttcacctgtttgattacagtgacagaagttgttccgctgcagaaacaattgatggttggatgcatttttaactccttatccatctgttgacaagtcttgagcaaagcccttttaagagggagatacatctcggggaatagcttttcgtccttctcacatagctgtaactcacaccattgctcttcatctacacaagtaggcgcagagttgaggccattcttggagctgctttgttctgttcctgaggtcgttttcagttgagttgataatgtgaaaggtaacatatctcggactctctttgaaaccatatgaccaaatggaccatgtccatcaaatacaccacataacactgtatcgcttctcgaacagaaattctgtaacaagttaaacaagaagaagatataaaaaagctaaaatacatcacaagaagaacatcaatagcaacaagaagagcattgtaactgtagcagcaacagcataacaaaaaggcttctaaacatcaaacaatccaacatttcatcacagtgaactaaaaccctaataaaaaaaaagtgaaacacgaacctcccagacaagcatggcgtcttggttagttccttttttgccttgttgtgtgtaaagacaagcaatttcactagaaccattgccaacaagccgacccacgacttgttgaatctcactgatttcgccgccgctgtataagtctctaggcctccgcagcctcccggagctctgtctctctacagtagtagtggcggtgcttgtagctccggtttccttcctcgtggtcttatcaattttcgaatgacacaaacccatttgcaaatccccaatctttcaaaacaagttaaagcctttttcttaaaatcgatagttagaaatagaatctaccagagacctgtttttttgtctggggtttggtcggcaataaattcccgtttaaagactcacagcttccatttcaacatcaacaagaaaaaagactaagatagagagaagcaaaaatcacatctttacaaaacattagtgagtagagacaatcaagaatctcgtaaactgtttaggattctctgtttgagaagagacaaaacttgaacacagaccagagcacaaaagtgtttactaactccactcccgttaagactgactattcaaaaaagtacttatttttagtcaaaaagaattagagaaagagagagagatattggaaagaggtcgcagcttggtactgcacgtgagccactttatcactctttaaatgttttctgccccttcaaattttaaaaatctgattttactgaaacatttagtattagcaagaattgttcacgtaattgacatagaacctgaaacgtgtctcttgcctctggtcggatgtttcaatcaaatgacaatcactgtatatatgttttatagtgattagtctaagactccaaatttatcaggttctatgtctaacattgcatgtaaaaaatcaatatttccgaagtccaaactcttcctaagaatatgcatcaagtgtatataattgttacatacgttgtttcttgtgaaaaaaaaaaaaatacactagattctcctcctatcaaaacctaatgtctaagagaagtaaaagtctatagtgtgtgatcaattactttacaaagcaaactaaattatggttattgccaatttaaaatagttcaaatttcccaaactccatcaaaacttgggcttttctcggattaagttggttgaaccgttaagcggccctctaaactttggacaagggattgtagtggatttttgaaaaaaagaatcccggttaacgaccttaacaaatgaaatgatcgatcggttgttgacccagcttttgagccaccgccttaaccaaacaaagctgttaagatcgaaccagtcaattctcagctctgagcggtacggttaattcatttcttatctatcacacaaagttgaatcgtaaccctaagcgaattcaacaatcgagagagcgagagagatcaattaaccccagcgaatcgaatatgccgaagaagatg

SEQ ID NO: 7354 - DNA, 3000 bp, Unknown
  misc_feature (1)..( 3000): cDNA_ID_1817494_gDNA_ID_1621142_Annot_ID_56646 3000 nt of promoter + ATG
tacccctgaagagcaagaatcaattgaacgggtacctacacttacattcctcaccaccattatctcaacatgtaatgccatttctcatcccttctaacacttgcgttaaacctttctgatcagcttgaggcaatggggtttgatagagcaatagtcatagaagccttcctttcctgtgaccgtaacgaggaattggctgcaaactatctactagagcactcagcagattttgaagactgagttccgagccttttaacctgaacaaagcacaagattttgttttgtttctccaccccttttatctgaactgttactatgctcagagaatcaaatgattatatcttacacctccatatttaccttgaagaataatctgcgttttccacactgtaaacacaattcattgtgtttctctctactgaaatgattattaacaatatgatatggttttaaataaattgtggtcatactcgcatgttgtgtgattgtgattattccagctcacaggtatccttattaaatcgatattgtctggctatatcatagtgtttatacacaaagcacaagaaacaataagcaatgttacacagtatctctcactaaacatattttctgggaaacaaaagattttcatcatgctctctgccatgcatctccttcttcatcacaccttccattgttctgactccaggttgcatttcactcattagcagcagcagccgcagcctgttttaacaataatccatccctattaatcaacacctctgcctactacttccagagacctttaggtgtgttaactgcaaacttatttgctacaaacgcaagatggattatcacttacctggttaagaggattatctggtgatttcttccacatcttccatatcaagtccttgtactgtgtgtgagttagacctggtttctcagacttgagccttggaagttccacttcttcatatgcctaaatcacaatcatagaaacaactcagtatatagatccaccagaatttggctttgcgtatcatgatcaatctatcaaacaattatcatttcaacaacagaactctcctaatatataacttcaaaaattcatacaagaacaatccggattgtctgctaatatgatccactacaaggagcaactactaatttcctctataatgacggaatctgaacatcaaacacaagtgctatgaatcaagaagcattatagcaaaaggcacacgaggtataccttaaaagaagccttgagcctcttctccgggtgtcgatcaacgggcaggttatctgacacagtaatccgtgcaagagcctcgtcaacggtatgtgcctcgatgagagaatcatcgcgattggtattggtcaccagaaccatcttttcatactcatcttcccctgccatgcgagtctgtttcttcttagagtcttctgctttcttagccagagccacttgatcttcctcgcgtcttcggatgagctcagcctctgtgaccttaggaaccggcacagtgacgcgattcgccttcttgtctggctttttcaaagccttctccaactctttctcctcctgctcagccagacgcttcgcctccaatttcttagcggcggtctctgccttcttctccgcttcctcttctcgcttcttcaccgctttggatttgggaccttccgcctcgcgccagtattgttcctctttctcccgagtctgacgatccttctgctcagcctccgcggcgttcttacgagatttggcgacctccgccttgctgttcagacccatcttcttcggcatattcgattcgctggggttaattgatctctctcgctctctcgattgttgaattcgcttagggttacgattcaactttgtgtgatagataagaaatgaattaaccgtaccgctcagagctgagaattgactggttcgatcttaacagctttgtttggttaaggcggtggctcaaaagctgggtcaacaaccgatcgatcatttcatttgttaaggtcgttaaccgggattctttttttcaaaaatccactacaatcccttgtccaaagtttagagggccgcttaacggttcaaccaacttaatccgagaaaagcccaagttttgatggagtttgggaaatttgaactattttaaattggcaataaccataatttagtttgctttgtaaagtaattgatcacacactatagacttttacttctcttagacattaggttttgataggaggagaatctagtgtatttttttttttttcacaagaaacaacgtatgtaacaattatatacacttgatgcatattcttaggaagagtttggacttcggaaatattgattttttacatgcaatgttagacatagaacctgataaatttggagtcttagactaatcactataaaacatatatacagtgattgtcatttgattgaaacatccgaccagaggcaagagacacgtttcaggttctatgtcaattacgtgaacaattcttgctaatactaaatgtttcagtaaaatcagatttttaaaatttgaaggggcagaaaacatttaaagagtgataaagtggctcacgtgcagtaccaagctgcgacctctttccaatatctctctctctttctctaattctttttgactaaaaataagtacttttttgaatagtcagtcttaacgggagtggagttagtaaacacttttgtgctctggtctgtgttcaagttttgtctcttctcaaacagagaatcctaaacagtttacgagattcttgattgtctctactcactaatgttttgtaaagatgtgatttttgcttctctctatcttagtcttttttcttgttgatgttgaaatggaagctgtgagtctttaaacgggaatttattgccgaccaaaccccagacaaaaaaacaggtctctggtagattctatttctaactatcgattttaagaaaaaggctttaacttgttttgaaagattggggatttgcaa

SEQ ID NO: 7355 - DNA, 3000 bp, Unknown
  misc_feature (1)..( 3000): cDNA_ID_3050355_gDNA_ID_1621142_Annot_ID_56647 3000 nt of promoter + ATG
cacggccggtaaccttcttgcagtaatcatatcataggatgacaaactgaactcattcacataaaagtggaagcctttacctggaagataaatgcattataggttgacttcttcggtaactacttccctttaaaacaactgttttcaccctcacggtttccagttagcctcaagtgtccagatgtctgtgcagtgagtattacagcaaaagcttccactttcacagtgggaccaaggtcttactcagagaaggaacacactgattccatgaatattattggaaaataatttaaagagtgtcagaaacccttattggaaaatacgcaaccataatcaactgcaaactaacacacagctaagtttatggctataattggagtttccatgcaagcatgaaaaaaaaaagatatgctaaatttcagtctatcttatttttgtacataagccaaacgacacttctgtaaaagaaatgatcatataacaacgtgaacttacttgtttgtaaaaagacaacagaagatatcaatgacaaccaagtgctttccatggttccttttaactacttttacatctcacgatgcaacaatcaaagaattgaacataccaattttatacatcaagaaagattctatcaccttggttaagggggagaagattcttccaaggatacacaaccaatgatcgacccaccggctggaatgcacattggtttggtctctctccaattcagaggtctatccaaagggttacataccctcacaacaggcaatctcacaatgtcaaatctccctgcccctgattcttcccatttaaggaccttacctcctataacatagagttcattccttagagctgcaaacccataaccgaaggcttctaactctctcggatgattaggaagaacaacagaaggaactgaaccaacattgtaccattccccttcatctgtatccctagtcttgatcaagctttctccccaatctacaatagtatacacccgatcatttttcatcacctgaacagcaaactgcatggctctagagaaaggccagacatcctccacagtggaccaagtcatgtctcgtggattaaaaacttcagatgaattttgctctgcaaatcccacctggtcacttaaaacatgaaagcagcctctgtacgataaccccgagcagtccatctgtggtctaggcattgctggtaattcctcccacctgcaatactactatgtcatactccagtttgatagcttttcaggtgaaacatgagaaaacttttaaaactatatcttgacccatcatagaaaaaaacaaaaagagtacattgtggggttaaatatgccagttctatcctacacgagaatataaaccacattagtgtgggaaaaaatacctatcagcgacaggatcataaacctcagcagatgggattcccctggaatgagttaaattacgacctccagcaacataaaccttgccagagacagaagtacaagcaaagtgagtccgtggtgttcgcatactagcaaccattttccattgtttcttaaacggatcaaaccgcatgacatctttagtgacaacaggcttctgatgaggaaacgatgacaccgaaggcgcataacaacccccaatcacaagaagacaattggaaacacaaacacacgcaaaaccagaatgatgccaaccatcttgaacagctctagttctaggcaatggatgccatcgatcagcttcaggatcataagcaacccactgattcttagaacgttccgtcaacacaaacaaccagctccctgaccatccatttctagctttatagcacgagtaatcagcaccacgaactaaatctctccagcctctggaaacacattcgagcactccatgatacccatgagaaagcttcgctatgcatctcaaagccaaatcatcaggcaaacctgggattatagactgctcgattgattccctgaaaacaagtttcagccactaacgatcagacttattcaatcaataatcaacattcaatgttttaagacaaaacatgattttgaagagaaaaggtaaaggattgagatttagattcaactttgtgaaggaagaacaagagagctaacacttacatgaaccgaatcgtactcgagagattgtaaatgtatcttctgatccccttctcgaacttgctttagaacaccaaaatcgcgcttcaaagtttatcactttcccggaaacaaaaacaccattaacgataatcgaaacggaaactgcaatcagaacgatatagttatgatggaactaagcacagtcagagagaaactcaggattctggcaaggaagagaggagacggaagaaacaggcatgagatggatagatccattataatgggtcgaaaatttaaatattctttattgatcccttcatttatatgttctttctgcttcttaacgcatactttcttaaataactaatttaacccataacttttccaagataacaagttaaaaccgcgtcgttttatttcagcttcgtctttatctcatctttcttgcgacgggccctgctacccggtgcgtgacaggttgaatcattctcctccgattcacggtgattccggcgactacagactcaacatttaataagccgatctcttacatggtacgagctcggacaaattgaagaatacaaaggtccgagaaataatttggtaagcaattcgatcctttaaacgatgttatttttgtcaatccgagtcattgatgagggattatatctgttactgaatctctctgatcttcccctgataatggacttcatgatcctgtaaatttcagattttgagccttgtgcctcaaaattgtagtcaaaggccgcgtttttgtctcaatttgtagatctttgttgttgtttctgttggatcttacgtatatatccttgatcattttaaaatttcaatggaagtgatccaggctttgattagcttttaattatataggaataatg

SEQ ID NO: 7356 - DNA, 3000 bp, Unknown
  misc_feature (1)..( 3000): cDNA_ID_1817490_gDNA_ID_1621142_Annot_ID_56648 3000 nt of promoter + ATG
cgtacccttgcgccggctcatctctttccctgaactgtgtcagtaagcaaatgttaagattgataatagaaaaaaggaagaaaaagatacattcacatatcaaacattaaacttaaaaattatcaagtttacatagattttccttgactttcagcaagaagatactttagagtctgaactcgggttgccaaaatggtgatctttcttctcatcgatgaagcatgacgtagagcataagatgatgtttcggccagtgaacttctttctaatatcattccatcaatctcctctgagagttttaaagtctcattctgttctctgatccatgaatcacacaaagaagccattgactttgattaatcctacataatcaaaaatccaatacagatcactttcagacaacttttaactttaccaaggatgtatataaatgcaacaataagaacaacaaaaatccaactagcttacaagaagcaacaacttcgataatggtattggcacatgtattaaaggaagatcggagcaattcagcaacatatatatctctaaaagagaatcaaattgctcaccaaggacctttaaataatacatcattgtcattgagaaagagatcaacttgctgagtgctgactttgtagccacgcagccagacggcagtttccttcgaaagaagacatcttctaaatacgagaccattacttatatgatcgtagaaaggtaggcctacgttgacaattcttggcgaaataaaaaaaggaacatgcattacactatctcttgttttgcctcttacaaatgtagagattaagaaacagtacacatgtataaaatgaaggatcagatacgtattttgcgaattttgtttccagtgatgatgatatgaatattggtgttttacaaaatttccacaatgttcttcttataacaaactcagacaagtttcttcgtggaagattctacagataatttttgtttttttgtctctgtgtttgacttgctaccacttcttaaatctttatgaagacagcaaagagcaaactgtgataactgcacacattatatattacttaaagggttttggtaacagaagagaaatgaaaagctcagccacaaatgtggaatgaggaaatacattgcaaccattcacatagagagtagaggccagtggacctacagaggaacttataagttgtctgatgttggtattacatatacttaaccaacatccatattacaacagcaagaccgacgatccccagcactgacaagagcattgacatgcaagagcaaccacttctcatattcttgttcatgacagcaaggctcttctgcactctctgtaataagataacagatcaatgtctttaattagccattagcttaagcataatgtggttcttggttgagcaaaccgaaaacagatcaccattacatcagtgttactcctaatgaaagtatggatcaactaaagcttgggattcaccaaagtaattagtttgttgaaatatttaagagttgaagcatatattacccttaagcgagagtcagtaacatccacatggtaatctaagtcatcctgcataaaggaaaatccaaatgtgttagtatccgaaaattcaaatcaaaggcgaaaaaatgaaaagctagtgacatacaataagcctagtctgcaagtcaagctcttcactaacagccagagcaatgtgttttgtgctcatgactgttccctccaattgctcaagtccttcgtcttgttctactcacaggaaaataaaacattcaataggaaaaaacaaatacagaaatcaacatctgtattacgtttactaggataagagaggttttacctctcataacttgtcgttgatatccaacaattccttggttatccatgccagtaactctgctcatggaatcatccggcttgatatctggcccgagcaagctgtctctattggcaaagtttgacatgttcaaagcattcgccatctggtttgcttttgacctcagattccctaccatatcctttcgccgattcatctctttctctgaactgtgtcagtaagtaataattcagattaacactaaccttaaaggtgtctaatttacagatttaagcaattaggattggactagtaaatggcttacataggttttccatgaatttcagcaagaagagactgcagactatctaatttgttaccgaaaatggtgatcttccttcgtatagctgaagcacgacgctgagcatcaggccctgtgacagccgatgaacttctttctgatatcattccattaatctcctcagagagttttaaagcctcgttgtatgctctcatccatgaatccgatgaagacgccattattcctatataattaaaagctaatcaaagcctggatcacttccattgaaattttaaaatgatcaaggatatatacgtaagatccaacagaaacaacaacaaagatctacaaattgagacaaaaacgcggcctttgactacaattttgaggcacaaggctcaaaatctgaaatttacaggatcatgaagtccattatcaggggaagatcagagagattcagtaacagatataatccctcatcaatgactcggattgacaaaaataacatcgtttaaaggatcgaattgcttaccaaattatttctcggacctttgtattcttcaatttgtccgagctcgtaccatgtaagagatcggcttattaaatgttgagtctgtagtcgccggaatcaccgtgaatcggaggagaatgattcaacctgtcacgcaccgggtagcagggcccgtcgcaagaaagatgagataaagacgaagctgaaataaaacgacgcggttttaacttgttatcttggaaaagttatgggttaaattagttatttaagaaagtatgcgttaagaagcagaaagaacatataaatgaagggatcaataaagaatatttaaattttcgacccattataatggatctatccatctc

SEQ ID NO: 7357 - DNA, 3000 bp, Unknown
  misc_feature (1)..( 3000): cDNA_ID_1817486_gDNA_ID_1621142_Annot_ID_56649 3000 nt of promoter + ATG
ggggaacagcttgctgaaactgaaatgcaccattgtgtgggatagattgaggatactgagcaaaggaggttggtggagcagactcagaatactgcatagaggattgttgaaaatctatccctgttaactgcgaagggccaacaccattgattccctcggtgttcctgacatccagctcagctaaattgtttgcagaagagctgtccagtccattaagggttgagttgcttcttgatccaaggtccatgtcatttacagctacaacatactggaactcagagtcaacatcacttttgttaacccccaaaagagcaccatccaaatcactcacagagaacagaaacattctaagcttttgcgaacccccacggttttccatctcattatactcctccatcatattcagtagatcttcgtcacatgatacagacaccaaggcatcaagatcttcaccaggaagttgatacttgacaacatgagtccgatagtagatttcaagaactttttgcctgagctcctgccaagaaatgtcctttcttatggaaataatgtgtgtttcacctccaacatatctaagctttgaatcacctggacgtggaagtattttcccaccaaagctacaaaggactttaacctttgctgttaaactacctgaggctgaagaagatgcatatccatggaaatttcctaaacttctatcttgacataatgaagcttctggtgctgaatggatatgcccgagtttatttccaaactcgtgaaccggggggtttgttctctcatactgcctgatgccatttcccaccatgctcatcctggaaacatctgaaccaaattcagaccctgcgtgcccgttataacctgtgggataattgatatctccagctgcaatgggatttgcagacctttgagaaatgacacgatcacgcagaaactcaagagaaaattcctctcctgtttgtatggagtaatgaagccccggcttaacatctgcaggattaggtcggacatttgcattcgagagacccgtttgatcaggcgtaaatccttgtgggacagagtcattcacatatccaggttccatagcatgttgctggaacggatgtggtggtctgtttctatccatcacaacaacaacaacaacaacaacaacaacagtccttcaaattattctaactgacaagacctgtaacaagaatctgacatactgaactataaagaatcactgctaaaactttaaagatgccaaattgcttcagagattgtaggctacaaatttcccctcccaaatatttaagctgcaaaaaaaaacaattgggagaaataattaagttttggcagaagttgaatcctccagaaactatcaattaaacacagactactcatcaaagttcttcccatttgcaattgtagatgaataatccgaccagaaaactccaaaaacatgctttttgttccaaaaatggaaactttctctacaacaaccttaaatcaattaatccaaaaacctcaatagaagtaatttaagaaaaacaaaaccttcgctcgatttgaaagatttcaccataccaaatcgctaaaattagcttcagacaccaaaaaaataaagaatcagaaaatggcaaagaatccaaaactgatagaacaataccacaaagaaaaaatgtagagcttgacaggtggaatagattcaagaaggattgtgagagctagtaacaatcaaaaactatcttcttctctttgttcaaatctaagaatatgcatcaaaaccctaactttttatttttatctttatttttgttgattttctctcaccttctctaggtttcctcgttgcttactcaaaaaatggtaaaatctgcttaaagaaatgataaaaatgaccaaattgcttctttttttttgtattgtaatggaaagaaaaatacaaaatggttcgtgtccgtgcgactcggttgctttataaccagaagaaacgagaaccgtacatctatcgatgttgatgaaaaatagacggcggagatgaaagaagaataagattttgggggtgaaggagtaagtgagaagcatggaatcaacaagtctctctccgtagcttatgttatacggtttgcattaaatgggactctcaatatcatcagatcctaaatgaaatttaatggaaattagaagaacgtgcgtatggatactttcaatctcattttcgttataaagtttctctctttatatttccttacgtaatgttttttttttcccccacacgaattgtcattttctgaattccattaatctgattccatttcaatttgcattgaattcagtttcggaaatttcatttcaatatgctgtgggatttttggccgctacaagtaaatgttttttttttttttttgtcgaccgctacaagtaaatgtaaccatcccaatgtttattttggttcgatatcgaattttaggcccatttttaaattaaaggataaaaggaccatgactaattttgggcccattttgaaattaaaggaccatgactatgggctcctttgtttcattaattgtcacccaaatagtgatctatattttaatgaaaaaaatctcaagtaccggcatatccattttaaaacgttctgcttaatgaaaaacttcgtctcacagtaaaaactaaaaactcttgtgtttcgtttgaagaggctcaacatgaatatctttggcatttttcgttttgttttgataaagaatatcttaaaacatttaattacaaacattatcctcttttttcgtggtttctgctgtatctacggagcccactactgaaatatgttatggcctcaattcatatgggtcaaggtcttcgttgatgtatcatgcaaaattaatataaaagtgaaaaggttgactcttgacttatctgtgttagagaaagagagagagagagagaggtgtgcctgagcctgaacagaacttctggctcctgaaagaaagagagagagagagagagcaaatg

SEQ ID NO: 7358 - DNA, 3000 bp, Unknown
  misc_feature (1)..( 3000): cDNA_ID_1817482_gDNA_ID_1621142_Annot_ID_56650 3000 nt of promoter + ATG
caacaatccagagcttagagttccacctgcattgtaagttgatcttttcactttcaatctaaaaaggcttatgcagaaacattatataacttacttaaaatggctggccaagttttctcacatctatatgatccgagaacattcacacactttctctttccacatttatttagatgtggatctctgcattcatcaatgtctacggacacaaaaattccaaacttcacataaggttatatagtacactcaagccctctattcaaagaagttaataggtaccttggcatccgccaggtatgtagggatttccttcgtaaccattgtgacacgaacattgatagctatcttcgaaaaatgtattgcctttgcatagtacacgctttgaagtcatgtaggaaagatcaagacgccattctagctctattgttgtatattcactgtactccattaattcgggaggagtaaacaaggaccctgacaatgtgaattgagtcaagaaggcaacctgacatccttgtttatttggttccagtttctctacggttgcatcaaacacttgaagttgaagaagaggtggtatagtcatctggcagcatttgtaaccaacacaactcgtgttagctcctttgtaagaccgtatctcatttccacatgtcgtctcacatcccacgatttgtaaccctgtgacattcatgaacgccttgttgttgcatccaacagctgtgaacttattgttttctgatatgaagaatgggctgcccttcaaattcaaagacgatgatgaataaccatctctgttgggacaacctgaatgtttcaatggactctggatgtagaatttgttgtacaccgatatggagaaagggtctccaaggttgaaggaagtaactgctcgtcggatccttggcaacaaaagtatcggttgttggtctgatgagcttttgcagacaatctcgaaccatttgttcttgtaacaacctttgcctatcccaaaagggtaaggaacactaacatttccgcaatggtcactgcaattacgaagtgcaagaggaaaagtagaagcagctgcgtattcacagattcgcaacagaagcataacaacaaggaaacgtttcacatcaacacccatttgctctctctctctctctctttctttcaggagccagaagttctgttcaggctcaggcacacctctctctctctctctctttctctaacacagataagtcaagagtcaaccttttcacttttatattaattttgcatgatacatcaacgaagaccttgacccatatgaattgaggccataacatatttcagtagtgggctccgtagatacagcagaaaccacgaaaaaagaggataatgtttgtaattaaatgttttaagatattctttatcaaaacaaaacgaaaaatgccaaagatattcatgttgagcctcttcaaacgaaacacaagagtttttagtttttactgtgagacgaagtttttcattaagcagaacgttttaaaatggatatgccggtacttgagatttttttcattaaaatatagatcactatttgggtgacaattaatgaaacaaaggagcccatagtcatggtcctttaatttcaaaatgggcccaaaattagtcatggtccttttatcctttaatttaaaaatgggcctaaaattcgatatcgaaccaaaataaacattgggatggttacatttacttgtagcggtcgacaaaaaaaaaaaaaaaacatttacttgtagcggccaaaaatcccacagcatattgaaatgaaatttccgaaactgaattcaatgcaaattgaaatggaatcagattaatggaattcagaaaatgacaattcgtgtgggggaaaaaaaaaacattacgtaaggaaatataaagagagaaactttataacgaaaatgagattgaaagtatccatacgcacgttcttctaatttccattaaatttcatttaggatctgatgatattgagagtcccatttaatgcaaaccgtataacataagctacggagagagacttgttgattccatgcttctcacttactccttcacccccaaaatcttattcttctttcatctccgccgtctatttttcatcaacatcgatagatgtacggttctcgtttcttctggttataaagcaaccgagtcgcacggacacgaaccattttgtatttttctttccattacaatacaaaaaaaaagaagcaatttggtcatttttatcatttctttaagcagattttaccattttttgagtaagcaacgaggaaacctagagaaggtgagagaaaatcaacaaaaataaagataaaaataaaaagttagggttttgatgcatattcttagatttgaacaaagagaagaagatagtttttgattgttactagctctcacaatccttcttgaatctattccacctgtcaagctctacattttttctttgtggtattgttctatcagttttggattctttgccattttctgattctttatttttttggtgtctgaagctaattttagcgatttggtatggtgaaatctttcaaatcgagcgaaggttttgtttttcttaaattacttctattgaggtttttggattaattgatttaaggttgttgtagagaaagtttccatttttggaacaaaaagcatgtttttggagttttctggtcggattattcatctacaattgcaaatgggaagaactttgatgagtagtctgtgtttaattgatagtttctggaggattcaacttctgccaaaacttaattatttctcccaattgtttttttttgcagcttaaatatttgggaggggaaatttgtagcctacaatctctgaagcaatttggcatctttaaagttttagcagtgattctttatagttcagtatgtcagattcttgttacaggtcttgtcagttagaataatttgaaggactgttgttgttgttgttgttgttgttgttgtg

SEQ ID NO: 7359 - DNA, 3000 bp, Unknown
  misc_feature (1)..( 3000): cDNA_ID_1817478_gDNA_ID_1621142_Annot_ID_56651 3000 nt of promoter + ATG
gaaatgtggatggatcctgcggtcagtgctgaatggattgatgttggagagactaaaggccagaaggttcacctctcaagggatcctgatggtcagccttatcttacacagaccgagatgagggtaatctataagaaatttcaaacattccaatacaagattgatgtggatttctagttagacctttctttctttctgcctctacttattgagatcaaccccttacattttcaggctgtttctgatataactgtccggaggcattttgattccatcttggattcggtatgcttcattagaaaactagtagttttgagcttggttttagctactgtttaggttattgaaattatctatgcccctttatgatcttgaagttttgcaccttcctattcctctgcaggaaatgatatgtgcaattgctgagcttgaaagtgaccgaaagcctctcattatgcggtacagcaaaaagaccaaagaaactggccttggaattttacaagttttcgaaaagacagcagcatggttggctgggtacaaaacgatttctagtttctctccttttcaagaagatcttaagtttataaaaaaatcttatgttccggttttggtcaatctttattgcaggggccaaggctatcaggcatataatgtagatgacaatcctgatcttcttcacaagccctttataaatgtgtactttggggcagcttacctgaaatggttaacagactatcagaataagtatgatatatattgtccctaagcttacattgctagctttacaatttcagtgacaacaagtctaagttcctcttggaattactttaaatatattttactttccatgtgcagccagagaagtgaagagtttgttgtcagagcatacaatggtgggacaaaaaaggcgactcacaagtcgacattgccatattggaaacgataccttgcagtgaaagaaagtctcccttcaaggttgttgcttcttatctctgcttgctctatgtacctagtttctgctgtcatattttatgcatggttgcacggataaggttttgtgttgccgtgggctttcatattgttaattttgttcatactactaataaggtagttgcaccaagaagttgagggaagcgaagctaaaacttcagtctctttggtaattgttgttgcagaaaacatggcgatgctggcccttcaagctttcgtcctacgaatcccgcttccccaggctcaagtaatctctccctctttttgtatcgttctgtatcatataacaatgtctccacgtgtataaacatgcacctatgtcaaacatataaagatctctaggagcatcgtgcagtgtggcaatgctttagctctatgctcatatttggagaacctctatcattctcttataagttctgatatgaactgaaatataccctccggttgaacagacaccgatttcacatactgggactctcgagcttcccccgaagatatggaagatatgtggaatcagtctgaaatatgtaaagagtggacaaaatctaaagaagaaaggggaaaggttcgtttttcacaagatggtgaaaagaggccttacctttctcgaggggaacttaaggtactgtgtgtcttttaattgagcttgcagtttgacagatatttcccgtagaacaataaccaaaattgttctcaccatgttgccttccaagtaatgctatattttctattttaggctgttgcagaaataattgtttcaaagtacttcagcacgaaaggaattagagttgtaagtgtgcatatccgctaattatcacctgctgaggaaacttatattgggcatcttttagggtttattcatttgctattctgataaaatatgttccatatcactggtgcagcctcttgtttgtgcgattgctgatactgtgtgcatgcggtttgtgaacggtattaagaaacatgtaggaatactcggagtggactactcaaccgcttcatggttatactcgtaagtttgtgaccaaacttcgtttctttatggtttgcattaaagccttaaccaaatattaaatccaaatggggctgttttttctgaataaagggagctaggataccgagcatacagagtcgattcagcagacgatctaaccaaaccatttatctctatgtactttggtgtagcctatttggtttggttatcggaatatgaaggaaggtacgcttccaactccaactctctacttaaaaatcctgatcttgcaaacatatcttactcaaaacatattcaaactatgtgatacgcagtcaaagaagtaatcaattcattgtccaagcatatatgaaaggtcctgaccacgtcgatcttgaggaatcatgtccactctggctcaagttcgagcaagctctgagttactatgaagagtccaagaggtatcattgttcataaccgcaactattttattctacactctgaaagaacacaaatctgatttatgattggttttgatggttcttttcctcatcagggattcaggaagctgcgttatcctatgagacaacgtttattaagacacatatgatgaagattaacggatttagctttggtttcgtgtgtttgttatcacaagatttcctttctggtttctgtttttgactttaaatatctttgtcattttatttgtacgatgaatgattaactgtgtagaaaatttaacaaatgacaaactggttctttcaaagagtaaaaacaatcttcaaatatgcaaaacattcaaatcttcgaaattagctcaataaataaaccgcgaaattaaatgggatggtaaaagcttaaccggcgattccgatattaagtttaggtttggataaaccgggtttgaactccccctatcatagtttacgcatatatctccagaacaatctaagaacggcggctaacgaacgtatttttccggcgatacttcgaaaccaatttcttcatttttttcttctgattcataaagaatg

SEQ ID NO: 7360 - DNA, 3000 bp, Unknown
  misc_feature (1)..( 3000): cDNA_ID_1817474_gDNA_ID_1621142_Annot_ID_56652 3000 nt of promoter + ATG
acatagttgagtctcgaaaattcagtaatatacagtgacatataacaagagggcacaaggatcaaatacctgtggtcgcgtggactgttgtcatcaagccttcaagaataccaaattcctcatgcaccacctgccagatacaagtgcttaagggccatagacaactttatttgactttaatgaagctcttcataatgagctatatacaggacaaaaatgcaatgctacaaaccttggcaagaggtgcaagacaattggtggtacaacttgcattggagactatatccatgttaggcaggtatgtcttttcatttactccaacaacaaacatgggcgcgtccgctgaaggtgcagaaatgatgaccttcttagcaccaccctgcacagacaatgaaaggtcaagaaaatcatagaccattttaggagttgaatgtttggaattattaataatataaggcttggtattaaatgttagcatcaatgaaactagtagatcaacaagcgtgttcaaatgaaagtgcataccttcaaatgtgatgaagcttgtccaacggtggtgaatacccctgaagactcaacaacatactcagctccaagatcagcccacgggatttcagctgggtctctgaggaagaacaattaagatgttagactctaaaaaaggataagcataaaaccctaccaataggatattagtggaaattgattcataatttgaccatactagacagatacacatgagtcaacattttgaggcaatacctcttgctgacaactttgacttgttttccattgatctccaaagttgaatcatcaattacattgatagttcctttgtaatttccatgagtagaatcatacttgaacatgtaagcctgcataagaggaggagagaagatttggtttaagtttgatatattatcccatgcctttaagtatgattaatattacgtgttcaagcacgtggatcagttactatgagtaaggaaaactaaatgggaaaagagtatgagcaacagttataagatattcctggcgaaaaatacattagaaactagtaagagcaaaaacggcattgtaagttgcatctactacttaccatgtacttggcatctatgaatggatcgttgactgctacaacctcgatatcatccctaaaggttgcgatgcggaggaccaatcttccaattcgaccaaaacctgtctcgcacatataaaatacagtcatcaataagaaatgaaaaggtagaggactagaagcaagtcagacggaataaactatctgatgatgttgaatttcaaaatgaatccagcaatggaaacaaaaaataccgttgatcccaacctttgtctttccactgctccttgaccctatacaagtcaatcaaatcgaagttactgtcagaatgcagcaacaaacacaagtaagaacatcaattaaatttgtcttcttactatgaacagcaggaggtgcttccgtagctgtggccttgatgggttgaaccctcttcgcattgtattttctgtacatttgaacattaaaacattgttgagaaccaaaagaaagcatcgtaaaagatttacatgtactacagagtttgtcacataactgtaaagttgaagattacccggttgaaactgcagcaccagaaaatctagacgaggtcaggctatgactgaatccaagacttgacgtgacctgatcatttgagacaaaacatataataaactcactgaaactttaatgctgcctatcatcgattcagatgctcatcagttaactcaggccaaacgactaggaattcaatatttcaactacatgtgaggactcaagtagagaagatagcgatactatagaaacaccaagttgactttacactgagaaattgaaaccagaaccaaagacaaaacatcacctcctactatctagtatctaccaaaactccaagcgagctaaaacatattaaatggaacacaaacgcaagagtgagaaacgaaaacgtttaatacctgagaatgattgtacgatgacgatggataaagctcgacacgaggagctgcggcggaagtggcggcagatctgaggagagaagataaggccattgctaagctaccagaaacagagagatctcgccgccaaaaatcctaaccccttccgctgaatggcttttgagtgtagctctggagccacgaaaatgttcgtttgagtaaaaaaatgagacaaatgcaaattgcaattgcaatttctcatgtaaaatatgcttacgattctgcaaagacgatgactgtgttctgatgcgtcgcggcccatcgtaactacttttgcgatgagatctaagggttgagatttcacggaggaaaactacaaagccgcgtgtaccggatcggcgtcaaggcccatgatttggtgggcctttggtcatatttgaataacgttgacgtatcttttgttgtttattgagttttgccacgcgaaaataaaatgggcctgatttagtttgacacgtgtcaagtccagctggctctccctctaaaaatggcttctgtactgttaaaacttaaacgacgacgaggctgagccagctccgatatgccaggtggcattttcttcgaaagaatcgtgctgtttctgcagttggctcgtctcacagtcccctctgtgtgattaatttgcttttttggctctcccgtcaaaaatggcgaaccgtcgaattctctgtatctcttgaatttcccagagattaatttgaatcttcatcatcttcttctctctggattcgccgagaaaccttcttcctctgcttctctcgtcgatattctcttccttcccgcttaagccttcggctaggtctgatatttcgattttcttctttacatttggcaaacatgttacttatggatgttgttaacgatgtgttctaaataagcttctgtttcctcttgtttttcgtttgtttctgatagatatcaatggaaaggtcgtatagcaatgcaagaatg

SEQ ID NO: 7361 - DNA, 3000 bp, Unknown
  misc_feature (1)..( 3000): cDNA_ID_1817470_gDNA_ID_1621142_Annot_ID_56653 3000 nt of promoter + ATG
taaggctttaatgcaaaccataaagaaacgaagtttggtcacaaacttacgagtataaccatgaagcggttgagtagtccactccgagtattcctacatgtttcttaataccgttcacaaaccgcatgcacacagtatcagcaatcgcacaaacaagaggctgcaccagtgatatggaacatattttatcagaatagcaaatgaataaaccctaaaagatgcccaatataagtttcctcagcaggtgataattagcggatatgcacacttacaactctaattcctttcgtgctgaagtactttgaaacaattatttctgcaacagcctaaaatagaaaatatagcattacttggaaggcaacatggtgagaacaattttggttattgttctacgggaaatatctgtcaaactgcaagctcaattaaaagacacacagtaccttaagttcccctcgagaaaggtaaggcctcttttcaccatcttgtgaaaaacgaacctttcccctttcttctttagattttgtccactctttacatatttcagactgattccacatatcttccatatcttcgggggaagctcgagagtcccagtatgtgaaatcggtgtctgttcaaccggagggtatatttcagttcatatcagaacttataagagaatgatagaggttctccaaatatgagcatagagctaaagcattgccacactgcacgatgctcctagagatctttatatgtttgacataggtgcatgtttatacacgtggagacattgttatatgatacagaacgatacaaaaagagggagagattacttgagcctggggaagcgggattcgtaggacgaaagcttgaagggccagcatcgccatgttttctgcaacaacaattaccaaagagactgaagttttagcttcgcttccctcaacttcttggtgcaactaccttattagtagtatgaacaaaattaacaatatgaaagcccacggcaacacaaaaccttatccgtgcaaccatgcataaaatatgacagcagaaactaggtacatagagcaagcagagataagaagcaacaaccttgaagggagactttctttcactgcaaggtatcgtttccaatatggcaatgtcgacttgtgagtcgccttttttgtcccaccattgtatgctctgacaacaaactcttcacttctctggctgcacatggaaagtaaaatatatttaaagtaattccaagaggaacttagacttgttgtcactgaaattgtaaagctagcaatgtaagcttagggacaatatatatcatacttattctgatagtctgttaaccatttcaggtaagctgccccaaagtacacatttataaagggcttgtgaagaagatcaggattgtcatctacattatatgcctgatagccttggcccctgcaataaagattgaccaaaaccggaacataagatttttttataaacttaagatcttcttgaaaaggagagaaactagaaatcgttttgtacccagccaaccatgctgctgtcttttcgaaaacttgtaaaattccaaggccagtttctttggtctttttgctgtaccgcataatgagaggctttcggtcactttcaagctcagcaattgcacatatcatttcctgcagaggaataggaaggtgcaaaacttcaagatcataaaggggcatagataatttcaataacctaaacagtagctaaaaccaagctcaaaactactagttttctaatgaagcataccgaatccaagatggaatcaaaatgcctccggacagttatatcagaaacagcctgaaaatgtaaggggttgatctcaataagtagaggcagaaagaaagaaaggtctaactagaaatccacatcaatcttgtattggaatgtttgaaatttcttatagattaccctcatctcggtctgtgtaagataaggctgaccatcaggatcccttgagaggtgaaccttctggcctttagtctctccaacatcaatccattcagcactgaccgcaggatccatccacatttcttctaaatcctctggctcaacacaatcattccagaacgtgaaactgttggccattcttgcattgctatacgacctttccattgatatctatcagaaacaaacgaaaaacaagaggaaacagaagcttatttagaacacatcgttaacaacatccataagtaacatgtttgccaaatgtaaagaagaaaatcgaaatatcagacctagccgaaggcttaagcgggaaggaagagaatatcgacgagagaagcagaggaagaaggtttctcggcgaatccagagagaagaagatgatgaagattcaaattaatctctgggaaattcaagagatacagagaattcgacggttcgccatttttgacgggagagccaaaaaagcaaattaatcacacagaggggactgtgagacgagccaactgcagaaacagcacgattctttcgaagaaaatgccacctggcatatcggagctggctcagcctcgtcgtcgtttaagttttaacagtacagaagccatttttagagggagagccagctggacttgacacgtgtcaaactaaatcaggcccattttattttcgcgtggcaaaactcaataaacaacaaaagatacgtcaacgttattcaaatatgaccaaaggcccaccaaatcatgggccttgacgccgatccggtacacgcggctttgtagttttcctccgtgaaatctcaacccttagatctcatcgcaaaagtagttacgatgggccgcgacgcatcagaacacagtcatcgtctttgcagaatcgtaagcatattttacatgagaaattgcaattgcaatttgcatttgtctcatttttttactcaaacgaacattttcgtggctccagagctacactcaaaagccattcagcggaaggggttaggatttttggcggcgagatctctctgtttctggtagcttagca

SEQ ID NO: 7362 - DNA, 3000 bp, Unknown
  misc_feature (1)..( 3000): cDNA_ID_1817466_gDNA_ID_1621142_Annot_ID_56654 3000 nt of promoter + ATG
catactcttttcccatttagttttccttactcatagtaactgatccacgtgcttgaacacgtaatattaatcatacttaaaggcatgggataatatatcaaacttaaaccaaatcttctctcctcctcttatgcaggcttacatgttcaagtatgattctactcatggaaattacaaaggaactatcaatgtaattgatgattcaactttggagatcaatggaaaacaagtcaaagttgtcagcaagaggtattgcctcaaaatgttgactcatgtgtatctgtctagtatggtcaaattatgaatcaatttccactaatatcctattggtagggttttatgcttatccttttttagagtctaacatcttaattgttcttcctcagagacccagctgaaatcccgtgggctgatcttggagctgagtatgttgttgagtcttcaggggtattcaccaccgttggacaagcttcatcacatttgaaggtatgcactttcatttgaacacgcttgttgatctactagtttcattgatgctaacatttaataccaagccttatattattaataattccaaacattcaactcctaaaatggtctatgattttcttgacctttcattgtctgtgcagggtggtgctaagaaggtcatcatttctgcaccttcagcggacgcgcccatgtttgttgttggagtaaatgaaaagacatacctgcctaacatggatatagtctccaatgcaagttgtaccaccaattgtcttgcacctcttgccaaggtttgtagcattgcatttttgtcctgtatatagctcattatgaagagcttcattaaagtcaaataaagttgtctatggcccttaagcacttgtatctggcaggtggtgcatgaggaatttggtattcttgaaggcttgatgacaacagtccacgcgaccacaggtatttgatccttgtgccctcttgttatatgtcactgtatattactgaattttcgagactcaactatgtgttttttttaatcttattctttgcttttgaatattcagctactcagaaaactgtggacggcccatcaatgaaggactggagaggaggccgaggcgcaagtcaaaacatcattcctagctcaacaggcgctgcaaaggtacccaaatttgtacagttatatataaacatagcatctggaatcatatttaagccatgacttttttacttgtctcaataggctgttggtaaggtccttccggaactcaatggaaaactaacaggaatggccttccgtgtcccaacaccaaatgtctctgttgtggatttaacttgtcgacttgagaaggatgcatcgtatgaagacgtcaaggcagccataaagtattactctcaaaacctgttcaactaatttgcgtaccattctctatacatgaataaaacatggaacttgtaataacatctcatgattttgatttgaaatctctaacaggtttgcatcagaaggaccacttaggggcattcttggatatacagaagaagatgtcgtctctaatgattttcttggagattcaaggtatgtcactcttaaatattgtagcggatcatttaaaatcttggtactcaaaggttgtggccattgtcaaaaaaattcaggtcaagtatctttgatgctaatgctgggattggattaagcaagtccttcatgaaacttgtctcctggtatgacaacgaatggggttacaggtaacagttagtctctctcatttctttaccatcacatttaccatttgacaatacccaaagactaaaatatgcgtgggtcttgtaatgttacagcaaccgagtccttgacctgatagaacacatggcgttagttgcagccagccgctaaaaccatatcccgccaacgttcgttaggtagtttttgttacattgggggttcgattactgaaccttccggttttggctccaagttttatgtaaaaccatacgatatctaataatatggggaagattttttttgttgtacgaagaaatattgttagcagctagtcgaaaccttttctatatataaaaattggtttccaaagattggaattttctggttatatggttttttgttagcttcaatatctcatctctaagttatgaatattcgaaattgtgacagtgaaccatcgatgagtacacgaagatgtaacgttgagaatgagattatgactttgtacagcgtagtatatgatgaaatattgacgtgacatccacttataggcaaaatgatgtgatagcaaataatatctgcaaagtaaaaacataaacgatctataggactttgttaataatacgatgcaacataaaaacccactcagagaaaatgctggtaaaaagaggaaaagtgtgagttaacaaaaggcagaaggggacaaaaagctttatgcaatcgtgggaaaccactttgatctaaaaaactgtggacgtagtatttaatcattccttatcataatccaaaatgtataataaaaagatatctctacttaacgtggccatatagaaaaccttttaagatgaaggaaagagtaatgtaaaagaattggtaatggtatacatacatactcgtgattttatgaccatggctttttgcatcactagtgagtaatgcccacctacttcgtcaactcaacaacttatgaataactattcaattttttttttgccgattatgtgcacaattttaaaacagaagacaaatgtaaagtatatgactataaaatattgactaaataactttccggcgattttgttagtaaatgttaagaaaatttgttctttttccttgtagaaaaggaatgattctaaattactatcccaaaaaaaaaaaaagtaataacttgtttcgaagagtttgtgtgtgagtcgtatatgccgcttaactcctatattttctttctctttctcacaacttcccctagaaacacttttttcggaattcgaacgcacagcgatcggata

SEQ ID NO: 7363 - DNA, 3000 bp, Unknown
  misc_feature (1)..( 3000): cDNA_ID_1444414_gDNA_ID_1621142_Annot_ID_172855 3000 nt of promoter + ATG
tcatccttcaccgatatacactctgcgagtgttgtcttcttggactcaatcctgcaactctcaggcgtcttttcttcttttatctcccaaaccggtacagtctcatttgtttctgttgaagcctcttccttcttgtcggcatctttgcttgatgttatggtgacactctctgtagactcttcatgagaatgattaacggtttccgaaacttccacggttcctcctgctgaagtgtcttcaagaaagagacatactacagcacaatcatcattcttggaagtaggatacttaagcctccatgctcgaaccgccgtgtcgactacagcacgagctgcagtatctcgactaggagctgaagccacaatatcaacagcttctttgttcgacaaaacatcccatacctagcattagagacactttagctccaaagatttcgatagtaaccagtgagaagaataagaagagtaatgtgtaccccgtcagtagctagaataatatactgatctctttcagtgagtctatggtagttgatatccgggacagagattagaccataatctttaaggcagaagtccccaaaagctcgagccattgctaaaccaggtgaatcgctgttcggtaaccacacacgcgcaacctcaggctcgtcttgtaaggcaaacactctacctttacatctatggattcttgctgattcacctaaagcaagtacatagagaagaaaatcagattatgtttccaaagatgatcaatagtgacaacataaagaagagactagatatacttggcaaatcaggttttaagtctatggtcaattgtacagccaccaaagcattgtcttggtctcttgtggctagaacggctctcgagtcaccaatatttcccaccaccagatccttaccctataaaggaatatataccaaacagtcattgaacagagccaatgatagagtaaataaccggtgatcggactttcacctgtttgattacagtgacagaagttgttccgctgcagaaacaattgatggttggatgcatttttaactccttatccatctgttgacaagtcttgagcaaagcccttttaagagggagatacatctcggggaatagcttttcgtccttctcacatagctgtaactcacaccattgctcttcatctacacaagtaggcgcagagttgaggccattcttggagctgctttgttctgttcctgaggtcgttttcagttgagttgataatgtgaaaggtaacatatctcggactctctttgaaaccatatgaccaaatggaccatgtccatcaaatacaccacataacactgtatcgcttctcgaacagaaattctgtaacaagttaaacaagaagaagatataaaaaagctaaaatacatcacaagaagaacatcaatagcaacaagaagagcattgtaactgtagcagcaacagcataacaaaaaggcttctaaacatcaaacaatccaacatttcatcacagtgaactaaaaccctaataaaaaaaaagtgaaacacgaacctcccagacaagcatggcgtcttggttagttccttttttgccttgttgtgtgtaaagacaagcaatttcactagaaccattgccaacaagccgacccacgacttgttgaatctcactgatttcgccgccgctgtataagtctctaggcctccgcagcctcccggagctctgtctctctacagtagtagtggcggtgcttgtagctccggtttccttcctcgtggtcttatcaattttcgaatgacacaaacccatttgcaaatccccaatctttcaaaacaagttaaagcctttttcttaaaatcgatagttagaaatagaatctaccagagacctgtttttttgtctggggtttggtcggcaataaattcccgtttaaagactcacagcttccatttcaacatcaacaagaaaaaagactaagatagagagaagcaaaaatcacatctttacaaaacattagtgagtagagacaatcaagaatctcgtaaactgtttaggattctctgtttgagaagagacaaaacttgaacacagaccagagcacaaaagtgtttactaactccactcccgttaagactgactattcaaaaaagtacttatttttagtcaaaaagaattagagaaagagagagagatattggaaagaggtcgcagcttggtactgcacgtgagccactttatcactctttaaatgttttctgccccttcaaattttaaaaatctgattttactgaaacatttagtattagcaagaattgttcacgtaattgacatagaacctgaaacgtgtctcttgcctctggtcggatgtttcaatcaaatgacaatcactgtatatatgttttatagtgattagtctaagactccaaatttatcaggttctatgtctaacattgcatgtaaaaaatcaatatttccgaagtccaaactcttcctaagaatatgcatcaagtgtatataattgttacatacgttgtttcttgtgaaaaaaaaaaaaatacactagattctcctcctatcaaaacctaatgtctaagagaagtaaaagtctatagtgtgtgatcaattactttacaaagcaaactaaattatggttattgccaatttaaaatagttcaaatttcccaaactccatcaaaacttgggcttttctcggattaagttggttgaaccgttaagcggccctctaaactttggacaagggattgtagtggatttttgaaaaaaagaatcccggttaacgaccttaacaaatgaaatgatcgatcggttgttgacccagcttttgagccaccgccttaaccaaacaaagctgttaagatcgaaccagtcaattctcagctctgagcggtacggttaattcatttcttatctatcacacaaagttgaatcgtaaccctaagcgaattcaacaatcgagagagcgagagagatcaattaaccccagcgaatcgaatatg

SEQ ID NO: 7364 - DNA, 3000 bp, Unknown
  misc_feature (1)..( 3000): cDNA_ID_1817462_gDNA_ID_1621142_Annot_ID_56655 3000 nt of promoter + ATG
tgcaatcgtgggaaaccactttgatctaaaaaactgtggacgtagtatttaatcattccttatcataatccaaaatgtataataaaaagatatctctacttaacgtggccatatagaaaaccttttaagatgaaggaaagagtaatgtaaaagaattggtaatggtatacatacatactcgtgattttatgaccatggctttttgcatcactagtgagtaatgcccacctacttcgtcaactcaacaacttatgaataactattcaattttttttttgccgattatgtgcacaattttaaaacagaagacaaatgtaaagtatatgactataaaatattgactaaataactttccggcgattttgttagtaaatgttaagaaaatttgttctttttccttgtagaaaaggaatgattctaaattactatcccaaaaaaaaaaaaagtaataacttgtttcgaagagtttgtgtgtgagtcgtatatgccgcttaactcctatattttctttctctttctcacaacttcccctagaaacacttttttcggaattcgaacgcacagcgatcggataatggcgacggagcatataactcgtacgggagatgaatacaatgtcgagcttttacctagtgacgacgatgcgccgccgcttgaatcgtcttggcgtctcaacctcgacgcttttcaactcccttcttccaccggtggccgtcacgacggacgtactcgcttttctcgctattttcgtactccaagtaatttttttattcttcttcatgtttttgttatctgctctcaatccgtaaagtgtgcatagagacgtgtacgtaaaatgatcagcgaccatgacttgtgaattgtggatatgaactttgatcatgtgtatgaaaaaaaaaaaagtagttatacaaatgtgtagttgttgaaatttttttgggaaaataaatttagaaattcagtctagaaggaaaaaaattagagtgaatgattctctctgtttaaaaccccttgctattgatttgattcagtataaaactttttctttttgttgattcaaagtttttgatgggatctttagcttctcttttggagtttgtatatacccatattctttgttttaaagttatgtggatgctgaatcagattaatctctacagaggttataaggcgttttagagtgatttgagaaactgttatacccatcaaaggtcgactatcaaattgttaaatcttgaaaatggactttaactttgaacccttttctctgttgtctcaatgcaggaaaggaacgtagagtctctgaatactacaagaagcaagagaggctcctcgagggtttcaatgagatggagactatccacgaaaatggttttgcatctggtgttccaactgaggtctggcctctactgttctttctttagtttttttttcttatggtatagatattagatgaatcctcaagcttgtttggtttgaacaggaagaaatgaagaagcttgcaaagagtgagagacttgcggttcacatatcgaacgcaacaaatttggtgctttttgtagcaaaagtttatgcctctatggagagtagatccatggctgtgattgcttcaactttggactctcttttggatctcttgtctggttttatcctctggtttacagctaatgccatgagaaaaccaaaccagtttcactatcctatcggaaagcgccggatgcaacctgtggtatgcttcttctgttttgatctcttaacccctttgtttggaacttacttgtctcacaagaaaatagaactgataatgtaaatttacagggtatcattgtgtttgcttccgtgatggcaactcttggactgcaagttttgctagagtcaggaaggcaactagttgccaaggtactttacatattttcaggtaactgctttcatcggttaattaatgtatttaaccaattctgttttttgttacagagtggtattcatatgaatagcacagaggagaaatggatgattggtatcatggtctctgtcaccatcgtgaagtttcttctaatgctttattgcagaggatttcagaacgaaatcgttagggcctatgctcaagatcacctctttgacgtcgtcactaattcaatcggcttagcaacagctgtcttggccgtcaaattctactggtggattgatcctaccggtgctatacttgtaagtaactaacttaggaatctaaaatgatcaagaaatgtctcgtcggattactaaaacgttttttttttcctttttatggttgcagattgctttgtacaccatagcaacatgggcaagaaccgtactagagaacgtccattcactgatcggccgctctgcgccaccagatttcttggcgaaactgacattcttgatatggaaccatcacgaacaaattaagcatattgacacagtaagggcttacacttttgggtcacactactttgtggaagtggacattgttttgccagaggacatgagactacaagaggctcacaacatcggagagactcttcaggaaaagctcgagcagctcgctgaagtagaacgagcttttgtccacatagactttgagttcactcatcgtcctgaacacaagtgtaactagattttaagtagtaatttgtagtactataattagttctttagtttatgtactcttcgtgtcgtttttgtctatatagatacttgaacgttgtgccgtctctgtttatcgaatgcgcattgtgtgtcgtttgaagctaatcgtcgacattaatagcgtttcaaacactaaactcaaaataaagataaaatcatatataataaaataatgaattttaaatgaaaaccactcaaaatggtttttatctatcttccgacaaaattccgtgcttcattgctcttctccacaagacaacatttctctggctcagaatcgacgccatggaaatgtaaagaagaaacaaagacgagctctcaaatccagcagca

SEQ ID NO: 7365 - DNA, 3000 bp, Unknown
  misc_feature (1)..( 3000): cDNA_ID_1817459_gDNA_ID_1621142_Annot_ID_56656 3000 nt of promoter + ATG
tcttccggtgaattgagttatcttatcgtacggacaatgactcattgcaggttgctgagccgtttttcttattggctggtccaaatgtgatcgaatccgaagagcatgttcttcgtatggctaaaagcatcaaagatatttcgacaaagtatgtgtaaccatcaccattgaagctctttttcttgttgtgacatcttgtgttcaactgtgttggaactattaaaataattgacaagggggaaaaatgtttaacacagtggagaccttgatcctctcatcacatgagcattttagcttattgagcaaggtgtttacttatatagttatagttatgcatgttcatgttgattgtgaatgttgtaggcttgggttgcctctggttttcaagtcaagtttcgataaagctaacagaacttcatcaaagtccttccgaggtcctggcatggctgaggggctcaaggtaaatcattccctcttctttgagttgcaagcatggatgactctttatctggtgctcttagaactgcgcatttgaaaaccttcaggagtatattgatgtcaaagcgatcttatatctataaattcttacgtcttttagaaccttcagtatgagctgacaccagcaattgcatttagctcctggctataatgcaaccatttacatttacggaaactagtattgatgtggcttcatttttttgtgtgtagttcctgcacaagtatactacaggtagtaacttttctgtttctctcgacagattcttgagaaggtgaaagtagcatttgatctaccaatcgttactgacgttcatgagtcgagtcaggtattttgagttttagtcacatcagagattcaagattcgaaaaatctttgttcctttctaatgcttcgtttgtttttattagtgtgaagcagttggcaaggttgcagatataattcagataccggcgttcttatgtcgacaggcaagattctaacatatgcttttcttcaactcttttttagctatcaaattttcatttactgtttgaatttatcatttatatacagagttcagggttttaactattgcctatatctccagacagatcttctggtcgcggcagcccaaagtgggaaaattatcaacataaagaaaggacaattttgtggtcactctgtgagttatctttttgatctgtacaaacttttgttccctggtatattgtagtgactgatttcatgtatatccattttaaggtcatgagaaactcggctgagaaggttagactcgcagggaatccaaatgtgatggtttgtgaaagaggaaccatgtttggatacagtaagttaactgttctttgtgtcaatagaattcaccaatttttttgcaaatagagactaaaatagactaaaagacactggatataactcctgagtgtccttacattttaattttgttcctcagatgatttaatagtagatccacgaaatttggaatggatgagggaagctgattgtcccgttgtgagttaatattgcttcttgttcttttcttgttgtgggagtttatatcttggctttggctttatactttgatgttttgacactcgtataatataatttagttattggcttcaggttgctgatataactcattcattacaacaacctgcaggcaagaaggtatggtcattagaacgatgctctgagtaatttaagaaaatgcttggtgttttaaagctaaatcagaattggtctaaactcaaacataccttgtttatatagttagatggtgggggtgttgctagtggtggccttcgcgaattaataccatgcatagcaagaaccgccgtagctgttggtgtcgatggaattttcatggaggtatccaactttatcgcaagttttgtcatctcgctgaatctttgttccaatttggttatgaaacttggttcattttccggtgaattaggtgcatgatgatcctttaaatgcaccggtcgatggtccaacacaatgggtgagttttactttttttcagaccatatccattagtctaacacaatgcattcttgatcatcgtttttcttcccgttcagcctctgcgtcatctagaagaactgctagaagagctcattgcaatcgcggtaagccctttacattatcccataaaaatttaatctgtttccttttgttgtaacattggctcttataacatctttgcagagtgtcacaaaggggaaacaacagttccaaatcgatctcacgccttatcgtgattagaatcaaagggtgtgttagtgaccgataaatcaagatagaaatgttgaactctctttgtttgttttctcatcatttgctgattcttttctgcattttgcaggtccgtacgtcactttgggtgcaactacatcttcttgataatatttcaatcttgtcggagcaataagcattatttggcaaaacacatctctccacagtgactaatgtatattcaaagtagctgatgttgcctgatatgatatcaaatgtctaagtttgttttatttttgaagaaataaacaacaattagaagttaaattactttttatgtcaacataaagcactttttctatacctgatcttgtagtcttttctttaagtttttttacataatgcatggtttctttctatggacttgaaatttatgttgttgcacttgcacagtatcctctgagaaactgaacaaactaacaaaatgcaaacagtgaagttcttttattttattttttcagaataatagaatgatgggtctgacaagctctaggttggattaaaatgggcttgggtaaacaaagcccaaacaaaagcagaaaatacgtagcaacagaaggggcataatcgtaaattagataggctcaatttcaaatacttgagaagcggcgtcgctacttttgggaatttgcaacggtagaactctcttgcaattgggtttctgggaagaacaaagcagaagatctggagatttgaggaaaatg

SEQ ID NO: 7366 - DNA, 3000 bp, Unknown
  misc_feature (1)..( 3000): cDNA_ID_1817455_gDNA_ID_1621142_Annot_ID_56657 3000 nt of promoter + ATG
tgtatttgggatctgtcacatacttctccttcttttggtaaataaattcactatgagaatagatgtttaccgtttatgagaaattatatgtatagacactaacccataagactagagcggctcttatgataagactatatcacatcatatataatttttttgtttgatagagactgtctttagtttgcaaaataggcccatagtttgttgggaactaactaaagtaaacgctgcgaccaaggtggaaagtttgttggtatcactgggtcaggaatcgatatgtcagaatcatgtaaaatggacatgagtggttgcaacttgcatggagtggcaactggcaagccattttaatacaaaatttcttttgattttggtccagcaagattcatatttattgtgtttaatacaaaactgaaaacacgaacaaaagttatataacataattccataatcccaaatgattgaaatggggcagtgaaatagcattaagaaacacgattcaactattacaggattacatgtgagacaagaccttattgttgacactacaagtgctgtagtgcattgtaacataagaaagtaaactggggaaagctaaaacgatttcttttcgtaagacaccagtccatggattccaccttctatctgtgctgcaccggtacgagcctattcacaacatcaaaaccatcaacgtaaatactaacaacaaaacagcggaaatcgcagcttaagatagttttccaaggagtagaattaacgacatacctcgagtctaagggtattatctctcaatagctcgtgagcagactgcaaagaagaagcaccgagatcttgaaaaccttgcttcacggcatgcattgtgtatggtataaacttcaacactgagcctttatctgcaaccgctccaaccactccttgtgcaatcttgagtttcgcggtatctcccaagtatctctggtcgcttcctttggtcattgcttctaatgaacccatacctctgtatttcttcactctcctaccgttctataaaaacagaccaaacaaagcaagatattgaggaaaatatcaaggaagttggttaatcaatatccaaagtaggaaggtgtgtgcaattactcgatattcataggctccaggagcctcggtgcttccagccaagaagcttcccatcatcaccgttgatgctcccagaactagagccttcacaatgtgacctgagtttgagatgccaccatctgcgataacaggtacaccgtgctgagcagctagtgtcgagactttgtacacggcagtagcctaagagagaaccaatcacaaaaaataaaagaacccgactttgtaaggtgcaattcatggaatcaacttagcactttatttcaaatatgaaagctttttcatttacctgtcctcgtccaacggcacaaacctcttgtgttgtgcatatagatccagatcccataccaactcttaacccatcaactcctgctttgatcaagttctcagcctggtacatagtcaccacattcccaccgaccacatccaactccggatacgtattcttcacatacttgatcatctcaagctggtaaatcgagttcccttgcgaactatccaacaccacaacattagctccagctttcactaagtgctctagcctctccttgtctgattcccttgtccctatagcagcaccaaccatccatttcttgtctgcaccaacagttcctgaccctaacttgggatatcctttaaccctctccacatcgtcttttgttactacgttcacagtctcaccttccttctccagaacaacaaaccctttctgcttatcttccaaaaccgcctcaatcttgtcaagatcaatatcccatggcacatagtaatctttgttctcacaactcttcatgtaatcatatatcttcacctccttttggtcatctttcatactcgaccactccgattttgaaacataacccaacaatttcggtgtcaatgttcctgattcatcaaacaaacaacaacgaagttgtcaaatggaaactatttcacaattttgaaaatgaaagtagctaactttcagctaaaaggtatgaaattgattgtgaaattatacccgtctgcgagacaaaaacgaaggaagaaggaccaaaatcatcaacagaaccaatctggtgctctgggcatttaaaaacagcatcagacgcaatcggaacttgaagcgatttagcgtgacggataacggaagcttgagtatcgatgtcgcagttatagtgcacgattccgattcctccaagagcagccattgcagcagccatgtgggattccgagacagtgtccatcggcgaagcgacgcatgggatcgagagtgggacgcgcttgctgagacgcgtggatagcgagacggcgtcagtggaaaagtcgatgaagtgtggtagaaatatcacatcgtcgtaggtgtatgagtatccttgtgagaatagcttttcagctgaaaatccatcttcgaatcctgacatcttcagtccaacaatggcgtcgatgccaatagagagaaatgaacagtgagtgtaagctagggttcagtggaggagtaggtgaaggtttaggtgcgaaagatgacaaacgaaaatgttggtgaaaagataaaaccggaaccgaagaaattaaaccaaatcaaatagaattttatttattaaccgattggtttaacgatctatgaattgaattaaaaccggataatgattatccacgccagggacagtactgttggcgtatccgaacatcacctctcggccattggcaatttctattttggcatctcactgccttcactcacactacaacttccagttaaaggtcagaatcctaaatccttgatttgtgattttcttcgatgcagatcaatgtagagaaattatcataagttctttcgtgaattttagattctgattttggaagttgaggttttgttatctgatcttaagctctactatagaaatg

SEQ ID NO: 7367 - DNA, 3000 bp, Unknown
  misc_feature (1)..( 3000): cDNA_ID_1817451_gDNA_ID_1621142_Annot_ID_56658 3000 nt of promoter + ATG
taatgcttattgctccgacaagattgaaatattatcaagaagatgtagttgcacccaaagtgacgtacggacctgcaaaatgcagaaaagaatcagcaaatgatgagaaaacaaacaaagagagttcaacatttctatcttgatttatcggtcactaacacaccctttgattctaatcacgataaggcgtgagatcgatttggaactgttgtttcccctttgtgacactctgcaaagatgttataagagccaatgttacaacaaaaggaaacagattaaatttttatgggataatgtaaagggcttaccgcgattgcaatgagctcttctagcagttcttctagatgacgcagaggctgaacgggaagaaaaacgatgatcaagaatgcattgtgttagactaatggatatggtctgaaaaaaagtaaaactcacccattgtgttggaccatcgaccggtgcatttaaaggatcatcatgcacctaattcaccggaaaatgaaccaagtttcataaccaaattggaacaaagattcagcgagatgacaaaacttgcgataaagttggatacctccatgaaaattccatcgacaccaacagctacggcggttcttgctatgcatggtattaattcgcgaaggccaccactagcaacacccccaccatctaactatataaacaaggtatgtttgagtttagaccaattctgatttagctttaaaacaccaagcattttcttaaattactcagagcatcgttctaatgaccataccttcttgcctgcaggttgttgtaatgaatgagttatatcagcaacctgaagccaataactaaattatattatacgagtgtcaaaacatcaaagtataaagccaaagccaagatataaactcccacaacaagaaaagaacaagaagcaatattaactcacaacgggacaatcagcttccctcatccattccaaatttcgtggatctactattaaatcatctgaggaacaaaattaaaatgtaaggacactcaggagttatatccagtgtcttttagtctattttagtctctatttgcaaaaaaattggtgaattctattgacacaaagaacagttaacttactgtatccaaacatggttcctctttcacaaaccatcacatttggattccctgcgagtctaaccttctcagccgagtttctcatgaccttaaaatggatatacatgaaatcagtcactacaatataccagggaacaaaagtttgtacagatcaaaaagataactcacagagtgaccacaaaattgtcctttctttatgttgataattttcccactttgggctgccgcgaccagaagatctgtctggagatataggcaatagttaaaaccctgaactctgtatataaatgataaattcaaacagtaaatgaaaatttgatagctaaaaaagagttgaagaaaagcatatgttagaatcttgcctgtcgacataagaacgccggtatctgaattatatctgcaaccttgccaactgcttcacactaataaaaacaaacgaagcattagaaaggaacaaagatttttcgaatcttgaatctctgatgtgactaaaactcaaaatacctgactcgactcatgaacgtcagtaacgattggtagatcaaatgctactttcaccttctcaagaatctgtcgagagaaacagaaaagttactacctgtagtatacttgtgcaggaactacacacaaaaaaatgaagccacatcaatactagtttccgtaaatgtaaatggttgcattatagccaggagctaaatgcaattgctggtgtcagctcatactgaaggttctaaaagacgtaagaatttatagatataagatcgctttgacatcaatatactcctgaaggttttcaaatgcgcagttctaagagcaccagataaagagtcatccatgcttgcaactcaaagaagagggaatgatttaccttgagcccctcagccatgccaggacctcggaaggactttgatgaagttctgttagctttatcgaaacttgacttgaaaaccagaggcaacccaagcctacaacattcacaatcaacatgaacatgcataactataactatataagtaaacaccttgctcaataagctaaaatgctcatgtgatgagaggatcaaggtctccactgtgttaaacatttttcccccttgtcaattattttaatagttccaacacagttgaacacaagatgtcacaacaagaaaaagagcttcaatggtgatggttacacatactttgtcgaaatatctttgatgcttttagccatacgaagaacatgctcttcggattcgatcacatttggaccagccaataagaaaaacggctcagcaacctgcaatgagtcattgtccgtacgataagataactcaattcaccggaagaaaataaaaaaaataacactgaacctagtaaaaaaaactcaaccttgagctgatcatacagtagtgacgctgaattcgccatttctatagtagagcttaagatcagataacaaaacctcaacttccaaaatcagaatctaaaattcacgaaagaacttatgataatttctctacattgatctgcatcgaagaaaatcacaaatcaaggatttaggattctgacctttaactggaagttgtagtgtgagtgaaggcagtgagatgccaaaatagaaattgccaatggccgagaggtgatgttcggatacgccaacagtactgtccctggcgtggataatcattatccggttttaattcaattcatagatcgttaaaccaatcggttaataaataaaattctatttgatttggtttaatttcttcggttccggttttatcttttcaccaacattttcgtttgtcatctttcgcacctaaaccttcacctactcctccactgaaccctagcttacactcactgttcatttctctctattggcatcgacgccattgttggactgaag

SEQ ID NO: 7368 - DNA, 3000 bp, Unknown
  misc_feature (1)..( 3000): cDNA_ID_1817448_gDNA_ID_1621142_Annot_ID_56659 3000 nt of promoter + ATG
ggtatgtatcttccaatcgaagcaattagcggacaacaagctcctccaacgacaagagcctgtctaaacatcattgttgccgagcttctcacacaagttggaaacatttcaaccataaaaactgccataaggttaaatccgattctagcgcagaagaatgttccgagttcgaaggcaaacgcgatctctgttttgccgagaatgctgagaacgaaacagagcacccctgatgccccaccgagtaaggtattcacaagaacagagcttcttctgttgaatctctccaataagatcggagtgataacaaaagtaggcaactccaccaatgcatttagggtttcactcaagtagatgttgacgtctatgtctctagctgctaaaggaacgccgtaatacgatattcccaacccaaacattatgatcataacaactaaaatcctacgaaaagcccattttcggaagaagaagtccttaatcgagtaagttggcgcttgttcaaagttttcttgcttgaggggtaacttagaaaccactgattccaaataagctttttccttcggtgacatctttgtgagaacatcaatggcttctttatcctttccttgcatgtgaagccaccgaggcgattcgagtgcgaagaggtagaggaagatacagtaaaataccgctggaactgatgtgtatagatatagatatctccatgaagaatcttgtgcaaggaaagcgattccagacaacgacataaaccctaaaacgaatagggtaaatggaatcatcgtagctctcggtctccatctggtggagactcgctcactgatgagaaccaacgcgtatgaccaggtctgtgatcgcgaaaatccaatgataaacttaaggaatgtataaatccatacattggttgagaagataacagagattgaagtgattgacattgcaaaggttgagaacaaaactagtttcttgcgacccaaggaatcgtctggaatcaaagcaagaaaaaaccctccaacaatggcaccgatgtagaaagcagaactaggcatacctctgagtaaagagctcgagcactcgaggccaaattcggaaatgacggatttgccctgggagccaccgtcccattcccaagctgatcttggaagcttgcagatgtcggaggctgaaggatcacagatcgtgtggttaagacagtgccacgtgggataagcatctgtgtacacggtgatgaatatctgctgagcgtcgaagagcaaagctagtccaacgagggaaatctggaaaaattgccagaatccgaaatctgatagactttgttcgacgatcttgtcgaaagtcaatgcttctaatctggttttttcgttgactccagaatcatcggtgagatgagacaacaatggttctgatattggatcagccattatcgtttagtttcaaagcttttttgttttggtgtatttgaagaatttgactattggtattatggtatactctcattaattcattcttatcaaactactgtataaatataagtctgaaatctgaatctgtgttatcattaaatgaaaatgtcaaatctatataaattattaaatcattccgtgtttaatatgcgttattataatatttcaaacgtgcttcatgtgaagcttgggtccacgaagtcaaagtatgaattcagttcattacggttcatactcattagtcgtggatttgctttatctaattttataaactcaactttacttaacatgtaactattattactcagtacctataatagttaaaaaaaaaaaaagaattaatacctaatttcattattaaattatatgcatagaggaaatataggttggtcatcttccatgacagataatcctttcttttttttggcgtcaaatacaatgaatcggttacactactatatgccttctccagctcatataataggaatgatgaagaggaatctttcgaacgacaggataggacaagaatgtctaccaactaaagtttcttcttttgtcacaaaaggggaaggaaggctatagttttttttgtcgaccgcatctatatttgtaggaataattatttaatttgaaagggttacattgatcggattagttcacatacatacttgtttgattggtgacattttaattttgtgagctttgaaaattatcaatcaattcgatggaccaagttaaataatcctaacctctaatccgatactagccaaaatttctcaaacaaaaatttaacaatcagtgaaatgattgataaacgaaaaagtcaaatacgaaacaattaacgcatatttttgaaaactaaagaataaaagatatatcgaattaacaaaattagttttttttttctcattgtcaattctttcgtaatgagcttttctgcgacgtcctcaattgccttagggggtggatccgctgaggcttctgctgccaaaaacacctcaaagcgtccaaaatgtgatctctaacctattccctaatttttgttacattttgtcatttgcggttatttttctgatttttttgtttcttttgcggatttgacaaatctgtactttgggatcgtacctagtgtttctggaatgcctttataatttccacctcgtaatggatcagttcttctatgttatgaacgtattgaaaataatgttaagaactcagattctttctttgagatgttgctagtctctcgatcatcatattctatgatttctttatcaatgcaaatgactaaaatttacattgtgtatacagatatattatataggaaaaaattccgattattaatattagtctagtacacacaaatgggtacttgcgttttcttctttgtttggtatgttctagtaatccatttcatgtgaaagtttaacaagggtgtagttgaaacccattttgtgttgttggactaatgtaactcccaataaattaaaatgtgtgataccttttgatttctctagtcttaagataagtttcttagaatatg

SEQ ID NO: 7369 - DNA, 3000 bp, Unknown
  misc_feature (1)..( 3000): cDNA_ID_1817537_gDNA_ID_1621142_Annot_ID_56663 3000 nt of promoter + ATG
cagtgcaacttgatcattattgaaacagatttattatagcgttttacagcatctattgattgtaattttgtacttatcttacaataagatatatataaatatatttttttcctcacaataagattcaatctaagaatatgaatttattgacgaagatgtaaaataaatgaaactggctttttttatgaagatgtatatcaagaaatgataataattcatagaagaaaaaatgataattataaagaagtagaccctaaaataaatagttaaccccaaagtggttgagtgggggatcacatgcagcaaattaacggcggtggggaagaaggtctgagaaattaaccaagagatggctcatcctcagccattcacttagccatcgagagatctcaaacccattaatcatttaacttactgaacatatctaataaatgtgtgtttatatatgtaatgagttagacgccaaaaataaattatagactagagacatgtcctgctagctggatcctagtcatcacggtctcacgagcagtattgcatccaattttcgatcacaatatttacaaaaaattcccaccactctaaagttgtagtttattctctatatatagagtaacataaattgattggacatgcaaatcaagtcaaacataaaagtaaacaaaaccctatctcttcctatatatggccgactcgactcggccgcttctctcagatttcaactcgtccgagtcaaatcttccgccaccaagatcccttgaggagacgatagagcgatgcattggagacttcgggtgggcacagtttctccaagccgctttagtctcattcgcttggttcttcgacgctcaacaaacattcatcaccgtcttcaccgactcacaacccatgtggcactgtgacaactcggaccgagtcgactcagtatgcaacacatcctcctccaacctctgcaccttacccaaccaaacctggtcttgggacttgaacccacacgtttcaatcatttccgagtgggggctacaatgcgccggctcgttcctcaagggatttcctgcaagctcattcttcctcggctgtctaatcggcggcttagctctctctacactcgccgactcatcgctcggtcgtaagaacatgctcttgttgtcgtgtctcataatgtctctctcttccatgttaacagctttctcaacgagcatttgggtttatgcgtttttgagattcttgaacgggtgtggccgagccacgatcgggacttgcgcgcttgttctatcaacggagttagtcggtaaaaaatggcgaggacaagttggagcgatgggtttcttttgcttcacgctagggtttttatcgcttccgatgttaggttacattaatgaagggaattcttggaggaatctgtatgtttggacatcgataccgactttaatctattgctgtttagttcggagtttcgtccgggaatctcctagatggcttatcgtaaagggtcgtaaagaagaagccgtctcaattctccaaagcattgcttctaatgcaatcactatgagcttcacaaacttatgttttgaagtagaaaatgatcaatccaagtcaaatcctgatgtttatgatgcgttaaagatcttggtgaggaaaagttggtcgtttagaagattattagcggcaatggtggttggattcggtatcggtatggtttattatggaatgccattagctttaacgaatctaaacttcaatctttacttaggggttgtgttcaacgccttgtctgagttcccagcttttctgataacgtttttcttcattgataaaatcaataggagagatgcgttgatcggatttacagctctaagtggaatctctagcgctctaatcgcggtgttaggacaacaactagggtcattacagattgtgttagagctcgtttcgtttttcagcgcatgcaccgcatttaacatgacgcttatttacacaattgaaatgtttccgacatgtgtgaggaactcggcgatttcgatggtgaggcaagcattggtgtttggcggcgtgtttagtccagtgatggttgctgctggtcgggaaaatcagttttggtcgtatgggttgtttggtttgatcataggattgtgtggattgtttgtgtttggattgccggagactagaggaagtgttttatgcgacactatggacgaggaggagtataagactttggcaaaaagacaatttattggttgatacttgatactgttgtcttttgttgtaatggttaaaaagtttgcaggcttaaaccagttcggtattgattcaaatcaattctgattttaatacttataaaccacgggttaactccttacattataagtgactgtctcatctgtaccggaccataaaccaaattcaaccaaccataatccccctttcaattttgatctattcaacaatgactcatgcatactttatttcccttatctcatttccatattcgaaatgtaagctctaaaatggtactcttaactgaaactaaaatatatataaaaaaaaaaaaatctacatttcttgaagaaacatttttaaaattaactatagttgctaaattactattttagattgacatatatatatatgtagaccaactaattaacccactgaaatgcaaagagatggtctgaaaatcaaaacagacatctaaacgtggttacctacccaagagctcaccagcctatagtatcccattccctttatattgaatcactttagattatcttttctctttcatctttccaattccactctatattaaagaaatattattttaagaataaacaggatcgtattttcatcatatgccaatatgttatttggatttaagattgttttcgaatctataaatactaattaacacaacaaacaatttccaaatatcgtagtgttcataacgaaacgagcacacaactcactaaacactcaaacaaaaatacaaacattaagatgatg

SEQ ID NO: 7370 - DNA, 3000 bp, Unknown
  misc_feature (1)..( 3000): cDNA_ID_1817533_gDNA_ID_1621142_Annot_ID_56664 3000 nt of promoter + ATG
acatgttttcggatgatgggagactaggaaaagccgaaaaacatcatcttgaggtgattttcaacactctaaactgtttgccaggttttagtcccgtggattacgtggaccgatggttaggtggttggaatattgatggtgaagaggagagagcgaaagtgaatgttaatcttgttcgtagttacaacaatcccataatagacgagagggtcgaaatttggagggaaaaaggtggtaaggctgctgtggaagattggcttgatacgttcattacgctaaaagatcaaaacggaaactacttggttacgccagacgaaatcaaagctcaatgcgtcgtaagtaaaatgtaacttttataaaagagtgtatgttatacacagaaattgtacactaaataagccaaacagaaaaaaaaaaaattatgttgaatactatatattgactaaattgcgagatctacacatatataatctaagtatattaattatttgttattctggtgttttttacaggaattttgtatagcagcgatcgataatccggcaaataacatggagtggacacttggggaaatgttaaagaacccggagattcttagaaaagctctgaaggagttggatgaagtagttggaaaagacaggcttgtgcaagaatcagacatacgaaatctaaactacttaaaagcttgttgcagagaaacattcaggattcacccaagcgctcattatgtcccacctcatgttgcccgtcaagataccacccttgggggttattttattcccaaaggtaaaacatatagggaatacatatgttttttatttacataagatttaacgtttatagctagtaagtttatgcatgagcttcgttaacaaaataaaacacatggttttggtttgtggctacatatgatacaacctaaatttttttgtaatacttttttgtttaaaataccaggacaactagtaaatttatacataggtttccttaacaaaatctcgatacaattttgcattatatattaagaaatattgatgattggacaggtagccacattcatgtatgccgccctgggctaggccggaaccctaaaatatggaaagatccattagcatacgaaccggagcgtcacctccaaggagacggaatcacaaaagaggttactctggtcgaaacagagatgcgttttgtctcatttagcactggtagacgtggctgcgtcggtgtcaaagtcgggacaattatgatggctatgatgttggctaggtttcttcaaggttttaactggaaactccatcgagatttcggaccgttaagcctcgaggaagatgatgcatcattgcttatggctaagcctcttcttttgtctgttgagccacgcttggcatcaaacctttatccaaaattccgtccttaaaaacaagacgccttgttttttctctgtgatgtgtttcgacgctttgtcgtttctgtattacttgacgtactgttgtttttagactatccattgcccgaaaacgctatattgttaaaatcgtgtgtcttgtttattcttttgtatctccgtaacttaatcatgaatatcaatcaataccatatgaggttaatgattaccgtgtttaattgaaatggtgtgaagaattaggttaactataccatatgaggttaatgattaccgtgtttataaattgaaatggcgtgaagaattagactacatgacaccaacaagaatgttttcctttatcaggataaacgtgttcacctacccaaggtattatttatttattcaaataatagatattggttatgtttcgcacacacacaacaacaacaaaaattagatgtagaaatatttcactggaattcacctttcaatgttttattgatgaaattgatagagcggagagtattcaaaactttaaaagaatagtttttttaaacagaaaatagataaaaatccaaaagaatagttataagttaaaaaaataattgaaccatagttgatgattttttttccccggatttttggaaatcaaaaatgaattgaagtgaatcaaagttgatgataacaagtgaagaccagtttaagacaaaacaatcggattctttggttaactccgattcatgatccagtttgctgctaagctaagagaaagatcaaaaatgaaattttcgggagtaactggtaggagaatgggagatggaaagccaaaggttggataagtgtataaaaagagagagtcggatgttcataaattttgtaataaagaactgcggttaaaatcttggatccctccactccacggctccactgtgtagagtaaattcttgacgcatgttcatagacatagtaatacgtgaaatgttgtgattcgctttttttcctttggagggaaaatcccccttgtatttgggatctctcatgttccattaaccttatccagattccaatattgaaatatcgaatatatatagtcgtgtatattagtgattaaacatatatcacaacaccactttacagtcacatatacatatatatttgaattaagtgttcaagtttgtaatatgagttttgtggatctagcaaataaaattgaaaggaattatatggataaatttattttgttaattcaatatattttttatggataattaattttaaaaattttactctctttttttttacggctaaaagacgtttacattcaaaatacaaaacaaactgtttttgtgacaaaactaaatcccttgaaatagcagtatagacgtagtagacattaaaaaatctatagagcttttactatcgctactcatcaaactagatataaaatatatataaacgtgattaccgtagtacctacccaaaagcccaaaccctacgtgagcatcacatgcatgatatcgattctataaataatccacacaacaaacactttccagatatcgctagtgttcatttctaacaaatgcacacctcactacacgcatacatacatcatg

SEQ ID NO: 7371 - DNA, 3000 bp, Unknown
  misc_feature (1)..( 3000): cDNA_ID_3050319_gDNA_ID_1621142_Annot_ID_172888 3000 nt of promoter + ATG
aacttttcccatttaatgaaggtaagttttagtaaaaaaaaaaaaaaaaaaaaaaaaaaaactattattacaacaacatcaataaatagacatatattataatttctaattcaaatagtttatagttggtttatgatgtgaacacactattatatatacataacttgttctattagaccattgttataaacaaaaagtcagtgaatatgatcttgacgttgaatgattttgaccaaatcgaattgcagtagggatgcatttctgaatttcattgcacataaggcaaagaaaatataaatctcttttgtttttgccaagaaatatacatataatcctaattaatttgtttggcaaacaagatcttgctcaactgctaccgacgtatgagtatgaccattagtatcacaccagtcaccaatcaaatgcataatcaaatctattaataaaaacatctttctattagtaaaaaactttggtgtttcaccaaacaaatacattatattgtacatacatactgtcaccaaacatatatacatcctctatttagtatttttgttttgtaacttttgttgtagaaaaaagaacaaacgttgcaatcaattaaaaatatggttctctattcaaacatgaaacaactatagaatagagagaattatattgttaaacagttgagctcatttcagttttatacattttaatacgtttgagaccgaatagttgaattagggagccatctctcctttaaagggataatatatgacgctcaccagtactagtccaaagtataattttatacattttaacatagaattattaatttgttgtaccacatttatgcagtccaaccgcaataagatatagaccaaatttcttatattgtaacatacgttcaccactcttcgttgctagctagttagcggtacaaatattaaaaggcaaattcaactattattcacaccttagtaaacagaaaatgtactacggattcatttcattgtacttgtggtattttatttacgaaaacgggcggccgaaccaaatcaaagactagagacagaggcgtgccaatagcaacacgtttgctttcgtcatgcaaattgggatatttcaactttcttccattttttcaacctagtttactaaacttttctttttccagtgcgaacctaattggttctagttaaaataacattttcgtaagttgttcaccaaacaaaggaacatatgattataactttactagagatgcatgcacaataatgctattgtcgaataaatacttatatcttctccaaaaaagtttctttattatgttagaagatccatcaatatactaattgatttttggttatatgttttgatttaaagacaaaactatacaggacatgcatgtgagaacaaaaattgttgttgttgtagttgctagttgagttttatttatgttgccaaaataacaccatgtcaactttaattttcgtcatataatttaacgtaagcatgatgtgtttcgtcatatcttgtttggcatatggaatataaatcatactattgatttggaatctttaacttaacttcctattaagtaagcgattgatgctgatatgtatgtttctttagattgatgaacgtaatattaatcagtagtggatatacattgtatctttagaatttaggttagtatattatggccaaaatgactaaattgagtaccataaactaaagttaaagtagtggtaaaagcttacgatattgttttataacaattttcaaaaagtaaaagatatataaatgttagaggttttggataaccatattgttctataacattttaaacatatgtcatatatgtttcgtttataatatttatgacttgaccaaataatttgtgtatgttatttaaatccaaatatatatgagaaatatatagacgacatgattaaaattatttaaaagagtcatgatgagagggatggagactaaaaaaaagaggagaaaaagatagaacgtcgagaaatgttgtgtgtgtataaagtaaaggaaagctaatttgatcattgtattcgaagaaaacaaaaaagtatacacatgttacagggttataggacccattttctttaaaataaatccactatggactgatgtacatattttttcttactgttcttaagcatgattttatatgtataatatggttatagattagaattttattcagccttccacgattcttaaccctaaccagtcaattttttcttccttataaatatgagtgccaatcggaaggtgatagcatccttacgtcttgtttggtagattactaagtcaagttttattcatgaaatttccacttatcaaactttctcattttgttaaaatttaaaaccgtttttcaaaagttggtatagccatagacagaaaaaaattattacaatcctatctgatttgactcagacaccctaattagtcaaatctcaaaattagctaatattaactaacgagttgcgcattttgcagcagtacaacaaaattagtcaaaataatttaggataacagcactaatcacaggaacaggtatttttttttttcctttcttttgacatcataaagatggattcaacttatagattggtcagaggcaatctttataggtttcatgattgaataaaaaatatgagactcagtatctaagtttcaaacatgtttcatctgtgtttagttgattacattttcataatagtttattaatgacatatagaaatgcgaactatacaattataaaaaagatgtgaattttgccagatactcatccacaatatagacaagtttttaacctcaacaaatctgatgtgacatttgtcaatgtctgtggtttataacatgtttctcaatgtcaggatcacacacaccacttctcatgtataaatacacataaaagcaattggatttggtaagagggaatctcaaaagtgtgtgtctgtgagagaggagagagagaatatg

SEQ ID NO: 7372 - DNA, 3000 bp, Unknown
  misc_feature (1)..( 3000): cDNA_ID_2992570_gDNA_ID_1621142_Annot_ID_172881 3000 nt of promoter + ATG
ataaacgtggttaccaacccagaagccagaggcatctcaaatccatttgacatgagtatcacactaatgaccgtttaccatcatcactcgttctcacaactattattacaccaatcaagattcctattcacgttatcatcatcaccgatctaaacatattcgtccaggcccacaaggtcaaaacggattaatttaccgaggagatcgccttgagaagcgttttaaggagaaggacgcctgacctgacattccctaccggtctgttcttgtccatctcgctaacaacaatgtttggtccgtgttttttgtttttctttggcttagctcattgtttttctttgacttagctcattgtcaactatacataacatttgggtggtcttgcataatagttgttatttaattagaggtcagcacgtcaccgttataaacatactgtatatatattccatatctctagtattgaaataatcgttgtgactaagttgttatttttttccattaatcctacctatataaaataaaactgtatattacttgaatcacaagtcactgagagacggtcaaatctacccatttgtttttttaatctacataaaaatcttaaatcacaaaaagaaataacttcaaatgcaccatcaaacaaaactttccagatgaacttcttgtgttttagtagcatataaatggtttatcaacaaaacggtcatgacaatacaagcctggtcgttgactatacccccgtttcttgagaaacactctagcttcggaaaccaattctttgttcgtaatcttcttcttatcctttctcggcgcggacaatatcatctgaatcgcatcactgaatgctccataagcttttccagttcttgtcacataaacatcctctgatctctgatctgtttgacatccacttaatagaatcccattgtcggtaacggcattcaatcttgaagctccagaatcacctgcatcaacctcgcagtttcctaggtcacttaaacctctctgacgattcgggcttgggtcttcaccgaataatttgagaagtgtctgtctaattctcacaggttcgatattggtttgcccggtttgttccttgagaagacttaagtagctttcgaaaggtagatatcttgtttttatatcaagcgtttcgtctttctctaattctatctctcctctaaagctttcttcgccacctccacggtctctctgagattttgagactccacaagtcgctaacaaattcatcacaatgttaaggaagtaactagcaatcccgagttttggctgcttcatatggctttcctcgatctgctccttaactttatcgaccggcttcatatggctttcaccgatctgctcctttacttcctggatgagaccaccactatgacaagagtccgagattatcgtcaactgacaaccttcttttacacgtgacaccatttctctaaattgctggtctacaaacacatttgtgcaaaaaaaaaaaaaaaaaaaagattagaaaaaacaaaaaaataatcgtaaacactaaaattcataatatcgatgtaaaaccagtggtaacacaaaaacgaccaagacttgttattttcaaactctatgaacttatccaaaaacgcaaaagatttgaggtaaatcgaaattgcgatcaaaaacgtattgctctgtttcaagaaacagagcgctctgttttctttatgcagctgagggctatgttttaaccaagaattttgtttggatgaatgcgtatgtactcgaagaaagaaacatgaaacaataaaaaaaaaaaaaaaagacgtcaaacccatacaaaaagggattacttttgatctcataccctttattagattcatatcgcacggagtgatacactcgtcaaaccctgtagggtcttctgagtcttctatcccaggagggattctcgtgccatgtccactgtaatgaaagaccagaaaatcgccagattgccctgatgcgatgagattatccagttcgtcgcagatattcttgcccgtaggttgtatacatgatttgtctgtgtctatcattatgacgatgtccttgttggcgaacccgtaaagctcgattaggcatttctgcatccggtggacgtcgttgacacagccacgtaactccaccgcggttcctgggtagttgattcctatcaaaagtgctttcttcgccattgacgaatgaatgaattatacctttgttttttctttatgaattgcatttatttttcactttatttataaacgaaagacttagcatttaaactaccacgaaaggtctgaagacggaccaacatgcttgactgttattttgcctcttctcctaagagaaactttgtgtggtttgctgttattggccttttacgtctcatttttaattttttccttggtctttcttttttgagtggcggctatttccattgtcgtttttattatcaaatgttaatataactctcatgttactcttaataaaaagaaagtgttaatggactatggtctattattaaggaaaaaaacatgagtgtcattaagttaatcgtctggaatagtctacgggtggccaaaaaggaattatatgagtaggtttcattcattttaaaagagttggcattagcttgttgacaaagaaaaaataataaaaaggctggcattttctttactaattattccacatgcggttgtgaatctaagatccataaattaattcctattttaggaaactaaaattatgctcttgacttttgaatttctgtttgggtcgcacttagctgatccaaaaatgaaaaattcaccaattatcaaagtgagacaaaaacaaaacggtagtccgtagtaaatagcaaacacaatcggaatatgtaaggtccaatagtcaatattagctcaatagttaaggcccaatagtacttttaggccttttgtgtctgtaccactaaagcctccataggttcccttcgtttctgtgtaaagggcatga

SEQ ID NO: 7373 - DNA, 3000 bp, Unknown
  misc_feature (1)..( 3000): cDNA_ID_1817533_gDNA_ID_1621142_Annot_ID_172879 3000 nt of
tcaacactctaaactgtttgccaggttttagtcccgtggattacgtggaccgatggttaggtggttggaatattgatggtgaagaggagagagcgaaagtgaatgttaatcttgttcgtagttacaacaatcccataatagacgagagggtcgaaatttggagggaaaaaggtggtaaggctgctgtggaagattggcttgatacgttcattacgctaaaagatcaaaacggaaactacttggttacgccagacgaaatcaaagctcaatgcgtcgtaagtaaaatgtaacttttataaaagagtgtatgttatacacagaaattgtacactaaataagccaaacagaaaaaaaaaaaattatgttgaatactatatattgactaaattgcgagatctacacatatataatctaagtatattaattatttgttattctggtgttttttacaggaattttgtatagcagcgatcgataatccggcaaataacatggagtggacacttggggaaatgttaaagaacccggagattcttagaaaagctctgaaggagttggatgaagtagttggaaaagacaggcttgtgcaagaatcagacatacgaaatctaaactacttaaaagcttgttgcagagaaacattcaggattcacccaagcgctcattatgtcccacctcatgttgcccgtcaagataccacccttgggggttattttattcccaaaggtaaaacatatagggaatacatatgttttttatttacataagatttaacgtttatagctagtaagtttatgcatgagcttcgttaacaaaataaaacacatggttttggtttgtggctacatatgatacaacctaaatttttttgtaatacttttttgtttaaaataccaggacaactagtaaatttatacataggtttccttaacaaaatctcgatacaattttgcattatatattaagaaatattgatgattggacaggtagccacattcatgtatgccgccctgggctaggccggaaccctaaaatatggaaagatccattagcatacgaaccggagcgtcacctccaaggagacggaatcacaaaagaggttactctggtcgaaacagagatgcgttttgtctcatttagcactggtagacgtggctgcgtcggtgtcaaagtcgggacaattatgatggctatgatgttggctaggtttcttcaaggttttaactggaaactccatcgagatttcggaccgttaagcctcgaggaagatgatgcatcattgcttatggctaagcctcttcttttgtctgttgagccacgcttggcatcaaacctttatccaaaattccgtccttaaaaacaagacgccttgttttttctctgtgatgtgtttcgacgctttgtcgtttctgtattacttgacgtactgttgtttttagactatccattgcccgaaaacgctatattgttaaaatcgtgtgtcttgtttattcttttgtatctccgtaacttaatcatgaatatcaatcaataccatatgaggttaatgattaccgtgtttaattgaaatggtgtgaagaattaggttaactataccatatgaggttaatgattaccgtgtttataaattgaaatggcgtgaagaattagactacatgacaccaacaagaatgttttcctttatcaggataaacgtgttcacctacccaaggtattatttatttattcaaataatagatattggttatgtttcgcacacacacaacaacaacaaaaattagatgtagaaatatttcactggaattcacctttcaatgttttattgatgaaattgatagagcggagagtattcaaaactttaaaagaatagtttttttaaacagaaaatagataaaaatccaaaagaatagttataagttaaaaaaataattgaaccatagttgatgattttttttccccggatttttggaaatcaaaaatgaattgaagtgaatcaaagttgatgataacaagtgaagaccagtttaagacaaaacaatcggattctttggttaactccgattcatgatccagtttgctgctaagctaagagaaagatcaaaaatgaaattttcgggagtaactggtaggagaatgggagatggaaagccaaaggttggataagtgtataaaaagagagagtcggatgttcataaattttgtaataaagaactgcggttaaaatcttggatccctccactccacggctccactgtgtagagtaaattcttgacgcatgttcatagacatagtaatacgtgaaatgttgtgattcgctttttttcctttggagggaaaatcccccttgtatttgggatctctcatgttccattaaccttatccagattccaatattgaaatatcgaatatatatagtcgtgtatattagtgattaaacatatatcacaacaccactttacagtcacatatacatatatatttgaattaagtgttcaagtttgtaatatgagttttgtggatctagcaaataaaattgaaaggaattatatggataaatttattttgttaattcaatatattttttatggataattaattttaaaaattttactctctttttttttacggctaaaagacgtttacattcaaaatacaaaacaaactgtttttgtgacaaaactaaatcccttgaaatagcagtatagacgtagtagacattaaaaaatctatagagcttttactatcgctactcatcaaactagatataaaatatatataaacgtgattaccgtagtacctacccaaaagcccaaaccctacgtgagcatcacatgcatgatatcgattctataaataatccacacaacaaacactttccagatatcgctagtgttcatttctaacaaatgcacacctcactacacgcatacatacatcatgatgagctttaccacatcattaccatacccttttcacatcctactagtctttatcctctcc

SEQ ID NO: 7374 - DNA, 3000 bp, Unknown
  misc_feature (1)..( 3000): cDNA_ID_2169576_gDNA_ID_1621142_Annot_ID_172877 3000 nt of promoter + ATG
aacaaccagtgcaacttgatcattattgaaacagatttattatagcgttttacagcatctattgattgtaattttgtacttatcttacaataagatatatataaatatatttttttcctcacaataagattcaatctaagaatatgaatttattgacgaagatgtaaaataaatgaaactggctttttttatgaagatgtatatcaagaaatgataataattcatagaagaaaaaatgataattataaagaagtagaccctaaaataaatagttaaccccaaagtggttgagtgggggatcacatgcagcaaattaacggcggtggggaagaaggtctgagaaattaaccaagagatggctcatcctcagccattcacttagccatcgagagatctcaaacccattaatcatttaacttactgaacatatctaataaatgtgtgtttatatatgtaatgagttagacgccaaaaataaattatagactagagacatgtcctgctagctggatcctagtcatcacggtctcacgagcagtattgcatccaattttcgatcacaatatttacaaaaaattcccaccactctaaagttgtagtttattctctatatatagagtaacataaattgattggacatgcaaatcaagtcaaacataaaagtaaacaaaaccctatctcttcctatatatggccgactcgactcggccgcttctctcagatttcaactcgtccgagtcaaatcttccgccaccaagatcccttgaggagacgatagagcgatgcattggagacttcgggtgggcacagtttctccaagccgctttagtctcattcgcttggttcttcgacgctcaacaaacattcatcaccgtcttcaccgactcacaacccatgtggcactgtgacaactcggaccgagtcgactcagtatgcaacacatcctcctccaacctctgcaccttacccaaccaaacctggtcttgggacttgaacccacacgtttcaatcatttccgagtgggggctacaatgcgccggctcgttcctcaagggatttcctgcaagctcattcttcctcggctgtctaatcggcggcttagctctctctacactcgccgactcatcgctcggtcgtaagaacatgctcttgttgtcgtgtctcataatgtctctctcttccatgttaacagctttctcaacgagcatttgggtttatgcgtttttgagattcttgaacgggtgtggccgagccacgatcgggacttgcgcgcttgttctatcaacggagttagtcggtaaaaaatggcgaggacaagttggagcgatgggtttcttttgcttcacgctagggtttttatcgcttccgatgttaggttacattaatgaagggaattcttggaggaatctgtatgtttggacatcgataccgactttaatctattgctgtttagttcggagtttcgtccgggaatctcctagatggcttatcgtaaagggtcgtaaagaagaagccgtctcaattctccaaagcattgcttctaatgcaatcactatgagcttcacaaacttatgttttgaagtagaaaatgatcaatccaagtcaaatcctgatgtttatgatgcgttaaagatcttggtgaggaaaagttggtcgtttagaagattattagcggcaatggtggttggattcggtatcggtatggtttattatggaatgccattagctttaacgaatctaaacttcaatctttacttaggggttgtgttcaacgccttgtctgagttcccagcttttctgataacgtttttcttcattgataaaatcaataggagagatgcgttgatcggatttacagctctaagtggaatctctagcgctctaatcgcggtgttaggacaacaactagggtcattacagattgtgttagagctcgtttcgtttttcagcgcatgcaccgcatttaacatgacgcttatttacacaattgaaatgtttccgacatgtgtgaggaactcggcgatttcgatggtgaggcaagcattggtgtttggcggcgtgtttagtccagtgatggttgctgctggtcgggaaaatcagttttggtcgtatgggttgtttggtttgatcataggattgtgtggattgtttgtgtttggattgccggagactagaggaagtgttttatgcgacactatggacgaggaggagtataagactttggcaaaaagacaatttattggttgatacttgatactgttgtcttttgttgtaatggttaaaaagtttgcaggcttaaaccagttcggtattgattcaaatcaattctgattttaatacttataaaccacgggttaactccttacattataagtgactgtctcatctgtaccggaccataaaccaaattcaaccaaccataatccccctttcaattttgatctattcaacaatgactcatgcatactttatttcccttatctcatttccatattcgaaatgtaagctctaaaatggtactcttaactgaaactaaaatatatataaaaaaaaaaaaatctacatttcttgaagaaacatttttaaaattaactatagttgctaaattactattttagattgacatatatatatatgtagaccaactaattaacccactgaaatgcaaagagatggtctgaaaatcaaaacagacatctaaacgtggttacctacccaagagctcaccagcctatagtatcccattccctttatattgaatcactttagattatcttttctctttcatctttccaattccactctatattaaagaaatattattttaagaataaacaggatcgtattttcatcatatgccaatatgttatttggatttaagattgttttcgaatctataaatactaattaacacaacaaacaatttccaaatatcgtagtgttcataacgaaacgagcacacaactcactaaacactcaaacaaaaatacaaacattaag

SEQ ID NO: 7375 - DNA, 3000 bp, Unknown; identical to SEQ ID NO: 7367
  misc_feature (1)..( 3000): cDNA_ID_1817451_gDNA_ID_1621142_Annot_ID_172870 3000 nt of promoter + ATG

SEQ ID NO: 7376 - DNA, 3000 bp, Unknown; identical to SEQ ID NO: 7366
  misc_feature (1)..( 3000): cDNA_ID_2169563_gDNA_ID_1621142_Annot_ID_172869 3000 nt of promoter + ATG

SEQ ID NO: 7377 - DNA, 3000 bp, Unknown; identical to SEQ ID NO: 7364
  misc_feature (1)..( 3000): cDNA_ID_1817462_gDNA_ID_1621142_Annot_ID_172867 3000 nt of promoter + ATG

SEQ ID NO: 7378 - DNA, 3000 bp, Unknown; identical to SEQ ID NO: 7362
  misc_feature (1)..( 3000): cDNA_ID_1817466_gDNA_ID_1621142_Annot_ID_172866 3000 nt of promoter + ATG

SEQ ID NO: 7379 - DNA, 3000 bp, Unknown; identical to SEQ ID NO: 7361
  misc_feature (1)..( 3000): cDNA_ID_3050343_gDNA_ID_1621142_Annot_ID_172865 3000 nt of promoter + ATG

SEQ ID NO: 7380 - DNA, 3000 bp, Unknown; identical to SEQ ID NO: 7359
  misc_feature (1)..( 3000): cDNA_ID_1817478_gDNA_ID_1621142_Annot_ID_172863 3000 nt of promoter + ATG

SEQ ID NO: 7381 - DNA, 3000 bp, Unknown; identical to SEQ ID NO: 7358
  misc_feature (1)..( 3000): cDNA_ID_1817482_gDNA_ID_1621142_Annot_ID_172862 3000 nt of promoter + ATG

SEQ ID NO: 7382 - DNA, 3000 bp, Unknown; identical to SEQ ID NO: 7357
  misc_feature (1)..( 3000): cDNA_ID_1817486_gDNA_ID_1621142_Annot_ID_172861 3000 nt of promoter + ATG

SEQ ID NO: 7383 - DNA, 3000 bp, Unknown; identical to SEQ ID NO: 7355
  misc_feature (1)..( 3000): cDNA_ID_3050355_gDNA_ID_1621142_Annot_ID_172859 3000 nt of promoter + ATG

SEQ ID NO: 7384 - DNA, 3000 bp, Unknown
  misc_feature (1)..( 3000): cDNA_ID_2169551_gDNA_ID_1621142_Annot_ID_172858 3000 nt of promoter + ATG
tcaacattcaatgttttaagacaaaacatgattttgaagagaaaaggtaaaggattgagatttagattcaactttgtgaaggaagaacaagagagctaacacttacatgaaccgaatcgtactcgagagattgtaaatgtatcttctgatccccttctcgaacttgctttagaacaccaaaatcgcgcttcaaagtttatcactttcccggaaacaaaaacaccattaacgataatcgaaacggaaactgcaatcagaacgatatagttatgatggaactaagcacagtcagagagaaactcaggattctggcaaggaagagaggagacggaagaaacaggcatgagatggatagatccattataatgggtcgaaaatttaaatattctttattgatcccttcatttatatgttctttctgcttcttaacgcatactttcttaaataactaatttaacccataacttttccaagataacaagttaaaaccgcgtcgttttatttcagcttcgtctttatctcatctttcttgcgacgggccctgctacccggtgcgtgacaggttgaatcattctcctccgattcacggtgattccggcgactacagactcaacatttaataagccgatctcttacatggtacgagctcggacaaattgaagaatacaaaggtccgagaaataatttggtaagcaattcgatcctttaaacgatgttatttttgtcaatccgagtcattgatgagggattatatctgttactgaatctctctgatcttcccctgataatggacttcatgatcctgtaaatttcagattttgagccttgtgcctcaaaattgtagtcaaaggccgcgtttttgtctcaatttgtagatctttgttgttgtttctgttggatcttacgtatatatccttgatcattttaaaatttcaatggaagtgatccaggctttgattagcttttaattatataggaataatggcgtcttcatcggattcatggatgagagcatacaacgaggctttaaaactctctgaggagattaatggaatgatatcagaaagaagttcatcggctgtcacagggcctgatgctcagcgtcgtgcttcagctatacgaaggaagatcaccattttcggtaacaaattagatagtctgcagtctcttcttgctgaaattcatggaaaacctatgtaagccatttactagtccaatcctaattgcttaaatctgtaaattagacacctttaaggttagtgttaatctgaattattacttactgacacagttcagagaaagagatgaatcggcgaaaggatatggtagggaatctgaggtcaaaagcaaaccagatggcgaatgctttgaacatgtcaaactttgccaatagagacagcttgctcgggccagatatcaagccggatgattccatgagcagagttactggcatggataaccaaggaattgttggatatcaacgacaagttatgagaggtaaaacctctcttatcctagtaaacgtaatacagatgttgatttctgtatttgttttttcctattgaatgttttattttcctgtgagtagaacaagacgaaggacttgagcaattggagggaacagtcatgagcacaaaacacattgctctggctgttagtgaagagcttgacttgcagactaggcttattgtatgtcactagcttttcattttttcgcctttgatttgaattttcggatactaacacatttggattttcctttatgcaggatgacttagattaccatgtggatgttactgactctcgcttaagggtaatatatgcttcaactcttaaatatttcaacaaactaattactttggtgaatcccaagctttagttgatccatactttcattaggagtaacactgatgtaatggtgatctgttttcggtttgctcaaccaagaaccacattatgcttaagctaatggctaattaaagacattgatctgttatcttattacagagagtgcagaagagccttgctgtcatgaacaagaatatgagaagtggttgctcttgcatgtcaatgctcttgtcagtgctggggatcgtcggtcttgctgttgtaatatggatgttggttaagtatatgtaataccaacatcagacaacttataagttcctctgtaggtccactggcctctactctctatgtgaatggttgcaatgtatttcctcattccacatttgtggctgagcttttcatttctcttctgttaccaaaaccctttaagtaatatataatgtgtgcagttatcacagtttgctctttgctgtcttcataaagatttaagaagtggtagcaagtcaaacacagagacaaaaaaacaaaaattatctgtagaatcttccacgaagaaacttgtctgagtttgttataagaagaacattgtggaaattttgtaaaacaccaatattcatatcatcatcactggaaacaaaattcgcaaaatacgtatctgatccttcattttatacatgtgtactgtttcttaatctctacatttgtaagaggcaaaacaagagatagtgtaatgcatgttcctttttttatttcgccaagaattgtcaacgtaggcctacctttctacgatcatataagtaatggtctcgtatttagaagatgtcttctttcgaaggaaactgccgtctggctgcgtggctacaaagtcagcactcagcaagttgatctctttctcaatgacaatgatgtattatttaaaggtccttggtgagcaatttgattctcttttagagatatatatgttgctgaattgctccgatcttcctttaatacatgtgccaataccattatcgaagttgttgcttcttgtaagctagttggatttttgttgttcttattgttgcatttatatacatccttggtaaagttaaaagttgtctgaaagtgatctgtattggatttttgattatgtaggattaatcaaagtcaatg

SEQ ID NO: 7385 - DNA, 3000 bp, Unknown; identical to SEQ ID NO: 7354
  misc_feature (1)..( 3000): cDNA_ID_1817494_gDNA_ID_1621142_Annot_ID_172856 3000 nt of promoter + ATG

SEQ ID NO: 7386 - DNA, 3000 bp, Unknown; identical to SEQ ID NO: 7372
  misc_feature (1)..( 3000): cDNA_ID_2992570_gDNA_ID_1621142_Annot_ID_56666 3000 nt of promoter + ATG

SEQ ID NO: 7387 - DNA, 3000 bp, Unknown
  misc_feature (1)..( 3000): cDNA_ID_2991367_gDNA_ID_1621142_Annot_ID_56670 3000 nt of promoter + ATG
aagtaattgcataaaacaactacttgagacttcattttgttttaccttcctgttcaaactgcttcttcagctcctctgctggtaacagtgtttgagaggaatcaaacatctacataagaatatgttatcatatatctggtttcaaagagcagatataacggtaagcccttcaagttagacggtggcttactaggggaaaagggacacacttgctaccgggtatatgaccactcggtaaacccttccaaggttctggagcaataccgtcaaatctgtgaaacagagtaaattctatatcagatcctatgagcggaatcaacttaaaaccattagcatattatagtgaaattacaatccagaacaagcaataattttggcatgatacctagcctttgaacgcgcatcgatgtgctgataagtcttatcctcgatgttttccttcacctgtcaattatccagttagctcccctagtttactagcaactatgtataaacttcatttaagaaacggtaacctgatcaagtgccaatacaagatgtggccggaacttcgtctgaaaagttattgggctaatctgtgcaaatggcaaagatgtgaataaaccatatgtagcaggtaaaccaactaaatatgcaattttcagatacatcagattggcaaaaacttttcgatgaatgaatcaacttactgtttgtccttgatagatcttctctatagcctcagttgctgcactggctttcaaaatggcatcatttgaaacactggattcaacgtcatagcctgaagcacgccatttcggcaagcctccatcaagtacccatactttgtcatgtccaaagactctaaacatcctgttttaacaaaaggaggactcatcgatttgataataccagagaaaacatattgaggaatgataaaaaggctaatggacatgagattcataactcaccaccatacacgagctgcactaaagagccccattccatcatacacaaccactccatcgttgttctcgattccaagagcagaacaaccagcagcaaaagcttcctcagatggtagcatgtgtcgtaactgcacatgtaattcaaataatatacaatactttttggttgttgcgcatacagacacatagaagctcacagccagaaggcttgccaaagctattaatgggaatctctgaacagaaaagagtccagatttttgcgtcaaagaaacaacaatatgttcaaatgactgcaatgaagaatagttactgataatatttcatttatacatataagcgatggcagtgtaaactgtaaagtcaataagttagaaataaacaacacaataacatcttctcaagaaaaaagacagtgattctcacatttgtttttcgatctgctattccattcaaatcaaagaagagagcacctggaatatgagcaacctgtagacgaggacaacatacaagtcaatcaacattcagtcgtgtagtgaccctgatgaaaagtttcatagcgctcattcagaacaaaggcttatagcttatttacgtagttatttacaaaagtgtaaatcttctcacttgatactcttggattggatttctttgctcatgtgccatgtaccatgaggcatccaaaacctgaccatgaaacaaacaagttacataagaatcatggcagaaaaaggctacaatctcaacaagtgcaaactataagcattctgagacgaaaataaacacagcaagaacgtcaggttacctttatatcagcatctccaagattagagtggagccaatcaacagacacaacaggttcattggtagatatgggtgcgtaattagcttttgcctcagatccagaagaagccatgactcgaccaaagtgagtagatttagaagctggataggcagagcgtaactgtgagctgaatgctctcttctgcaagtaatcatttacaatctcggaattacaaaacagaagatataaaaaaatcgaaactttgaacacaattcagtagagtgaattatacaagagaaagttaaactcagatttgaatcatgtgactcagatattatcggatatctacacacagctaactataactcccaatgtgaaacctttctaaactcgaaagcccactactagtagtacccaaattatacaaacaatttaaacagtaactagaagtgaatatctaagctcagagaaggtcgaaatcgaattaagaaacaacttaaattcaaaaaggttgcgcaattacgagtcttgtgatgaggaacagcagatagagagggattaatctggcagtgaccagaaaccaataaagttgttgagaaaagtgtcgaagccaaatcacctcaaaataccatgtacagaacaaattgctgagttaaagccgccaaattttgctacttccagattctctgagctcgcaactttttcaagcttcttcgttctcaacgatgctgcttctgccacctagatgattaatagattatcactgatcactagtgatcaggataagtgacgcgactaacgcatgtttaattatataaaattcacgtttgccttctctttgatataattcgcgttcgcgttctctttattaaaaatcgcgtttctgataaaacgcagtcgtttggttttacttcccttttcttcttccagaaaagaattcgtaaaatctcacttcaaccttctcttctctgcaagaaacctaaaagcctatttatttcacctctctctctctctctctgcaactaatcacttgttcgatctcgaagctgaagctaaaggtaagctattctcttcacagcgctagttcttttccgaagattcgtgtcgatctcaaaaatcccattctatcaaattgtttttaagactctaatgatttaaccaaaccaaaacctgaatcgtttgatcccggtgacgttgaaaccctgaattccggggaaattgatcctactcgtttgtgttgttcacagctttcgctaatttgcttaaggagct

SEQ ID NO: 7388 - DNA, 3000 bp, Unknown
  misc_feature (1)..( 3000): cDNA_ID_1817513_gDNA_ID_1621142_Annot_ID_56671 3000 nt of promoter + ATG
gatgtgtttcgtcatatcttgtttggcatatggaatataaatcatactattgatttggaatctttaacttaacttcctattaagtaagcgattgatgctgatatgtatgtttctttagattgatgaacgtaatattaatcagtagtggatatacattgtatctttagaatttaggttagtatattatggccaaaatgactaaattgagtaccataaactaaagttaaagtagtggtaaaagcttacgatattgttttataacaattttcaaaaagtaaaagatatataaatgttagaggttttggataaccatattgttctataacattttaaacatatgtcatatatgtttcgtttataatatttatgacttgaccaaataatttgtgtatgttatttaaatccaaatatatatgagaaatatatagacgacatgattaaaattatttaaaagagtcatgatgagagggatggagactaaaaaaaagaggagaaaaagatagaacgtcgagaaatgttgtgtgtgtataaagtaaaggaaagctaatttgatcattgtattcgaagaaaacaaaaaagtatacacatgttacagggttataggacccattttctttaaaataaatccactatggactgatgtacatattttttcttactgttcttaagcatgattttatatgtataatatggttatagattagaattttattcagccttccacgattcttaaccctaaccagtcaattttttcttccttataaatatgagtgccaatcggaaggtgatagcatccttacgtcttgtttggtagattactaagtcaagttttattcatgaaatttccacttatcaaactttctcattttgttaaaatttaaaaccgtttttcaaaagttggtatagccatagacagaaaaaaattattacaatcctatctgatttgactcagacaccctaattagtcaaatctcaaaattagctaatattaactaacgagttgcgcattttgcagcagtacaacaaaattagtcaaaataatttaggataacagcactaatcacaggaacaggtatttttttttttcctttcttttgacatcataaagatggattcaacttatagattggtcagaggcaatctttataggtttcatgattgaataaaaaatatgagactcagtatctaagtttcaaacatgtttcatctgtgtttagttgattacattttcataatagtttattaatgacatatagaaatgcgaactatacaattataaaaaagatgtgaattttgccagatactcatccacaatatagacaagtttttaacctcaacaaatctgatgtgacatttgtcaatgtctgtggtttataacatgtttctcaatgtcaggatcacacacaccacttctcatgtataaatacacataaaagcaattggatttggtaagagggaatctcaaaagtgtgtgtctgtgagagaggagagagagaatatgggcaaaggaagagcaccatgttgtgacaaaaccaaagtgaagagaggaccatggagccatgatgaagacttgaaactcatctctttcattcacaagaatggtcatgagaattggagatctctcccaaagcaagctggtatgtctatgatctttaaaagcctctttctttagcttttctagtcttctggttctgattctatctatgcatgcaatgaaggattgttgaggtgtggcaagagttgtcgtctgcgatggattaattacctcagacctgatgtgaaacgtggcaatttcagtgcagaggaagaagacaccatcatcaaacttcaccagagctttggtaacaagtatgtgttatcttgttaatgtcttgttgtgggctcaaagttttgattttgacaatagcttttctgcattttggattcaggtggtcgaagattgcttctaagctgcctggaagaacagacaatgagatcaagaatgtgtggcatacacatctcaagaaaagattgagctcggaaactaaccttaatgccgatgaagcgggttcaaaaggttctttgaatgaagaagagaactctcaagagtcatctccaaatgcttcaatgtcttttgctggttccaacatttcaagcaaagacgatgatgcacagataagtcaaatgtttgagcacattctaacttatagcgagtttacggggatgttacaagaggtagacaaaccagagctgctggagatgccttttgatttagatcctgacatttggagtttcatagatggttcagactcattccaacaaccagagaacagagctcttcaagagtctgaagaagatgaagttgataaatggtttaagcacctggaaagcgaactcgggttagaagaaaacgataaccaacaacaacaacaacagcataaacagggaacagaagatgaacattcatcatcactcttggagagttacgagctcctcatacattaatgaagccataaagcaagtcattttcaccttgaaaatggaattattagctaacttattggcattattagtatataagcaagatcagataggcgcatgtagtagcaacaacgaagaaacgtcgaattgtagacaaaatgtagatattacagagttgaaagattgtattttgcaaatgattgctttgtagtgaaatcaagttatcacaagctaacaagtaacaaccacctagatttggaaagctgacagatgaaaattgattcatcacctaacagtttctacataagaacaaacatagacttctcttccaaaatagatatatcttcagccaagagagtaaaacttgaagaacgaaaatgttttagctttcacagattctgatgaatacatcgattgaatcattcacacagtttcaattgcaaatgctgaatttcaaaggaatcatttttttttgttttgcttttgtttgtttctgtagatattagattcacttacgctacatctgagttctcaaccatg

SEQ ID NO: 7389 - DNA, 3000 bp, Unknown
  misc_feature (1)..( 3000): cDNA_ID_1817506_gDNA_ID_1621142_Annot_ID_56675 3000 nt of promoter + ATG
aattggtcaataggttacagatggttggatgaaatctctgcggctaatttaagttcaatattcttgaagattacacgaccaagaagtcaaatagaatagtacaggaatgatatatcaatcgagtacagcgcgggcccttcgtttttgtcgattatttcattataatgaatttctttccatgataactttatgttttgttatctgtttaacgtattttttgttgataaaaacgtttttttttttacgttattaatttttatagtttatctgcccgacaagaattgtaagttcctcaacattacaaataaattttggttagtttaaatgttttaagcacttcttgtctcctaaacgttatccgcatgtttcaaacgtacaatataattccttcttagaaaaaaaaaatcaaatagatacaaggatataaaagacatcgaggcagaaacaaaacatcgaccaatttcggagtcacactagacaagttgttcacgacacacttgtccccatgcgtttttggatatttctaattcgtttttaattaatgaaaatgttacattaactaaacggcatgtttacagaaaaaaaaaaacaaaataaaacgacatacttatttaataattttattaatgttcttcagtacgactttccaactatttccatatttttctatataaataaatacacacaaaaattagcgatatttatagaaaagagaacagacaagtttatgaaaatcaaaagaaagaattttatttttggtttaaagtttaaactgacgtgtgattaaaggtattaaagagtggcaggtgggtttggttgtacggtcatttattcatatagagtgtgacccaccaactctctgcctgtccttcttttctcttacccccagtacggatccttcttattttatcattatttattttgcattcatatcttaaagacttaaaccttgacgtcacttacggaagccaaaaaaaaaaaaaagacactgaaatctgatgaaagaaaaacctgaaacctaaaaaacatatgaaggcctgtcggctcggcctcaaatcattgcgatttatcttgggccttcacaataataaaggcccatcatatttttgaataagactctagtttctgtattcgtttgtactcatgtatacgctaactactatatacactgatacacaagttaagcaaatgtgaaattaaaatagataaagaaacaaaaaataataaacgttaccaagaagaaaatgagttggtggtgattaatttgcggctaattttgggggaatataaaaagaaaaaattaccgtattttaaaaccggtctatataggatcgagcttgctaacaccattttagtaagagtcttgattggttcgctttaatttttcatttttgtatctgactgccgcaaactaagtaatatcaacactcaaaagtcacgataataaacattataaaaccttttcttcgctgtcctacgaacgtaccatattacttgattccgaaccagacaatattagacagacaaccaaactaacacaaatcattattctataagctgcggtctaacctactattcaaaatttagttttacttcacgtattaaagaaaggtacgaataacagcgatgagactggattttttttaacatggtaattaatataacgataagtacataattaaacaatactacaaaataaaactaaaaaacaatttcagcgacatctttgattacagattctaagaaaacaccagagaaagttagattaaaatctccctgagcttgttgtgtatcactaaacctcataaacgatgccgttcttggctcgccgactcgattatctggtgagatattctggaaaatagcgaagaatctgagaaagacaaaaataatcagagcaagaagataacatatccgagatgcgttgaagaacaagtgatatgctgcaacttgaagacaatacatctttttctcttcttcttcttgtctatttcgagtattaaaaggttaaaatctcagaagatgatgtttttttttcttagcatcgagatgtgtgtatatataatagtatacgtgtgtgtgtgatgtttgttgtgtatatatgtaatccgtaatcgcatgtacgcgtgtatctaacgcacacagacaatcagacatactcgacgacaccactgtggtccgaacaaagcaataaatgttcaaagccgatagttgtctctcattgatttggtactgtagtccggtttggatggtataccaggcgatacaacctattacctaagtggaggagattaagatccgattaattgtttaatcgtctgaataattaatgcaaaccggaaaaaaccggttatatgtttatacatgtaaggaaattgaatacacgtagatacgaaattgatatgcatttcaatacgtgtctggtgattctgctcaactgcttagatgtagacatctcaacttgtaaccagaagatactgaaacctttattattgcatttctaaattttagaattctattttcttatatactatatggaatactttaatgccacataataataaatgagagaattcaggtcattatatgtcattttggagtgtaggaccaaaatggcactaacattttcaattttattttattttgtgaaaaacaattttgagaaactttaaaaagtgtattttttttcctctggtttggactttggagggaaaagtaatcaaaagtgtattcttaaaattcaaacaagaaaaattcaaaatagagacaggaaaaagatatgtagccaatgataaaatgccaggtgtaaagttctgttttgtctttttgatttcccttctgcaacaacttacaggcaatcggacaattccagagctaaaaaaccctaatcttctcgggcttgtcatctccaaaattcagggttcaatttcttcaccatagaagatatagcgttatctccggcgtctaaggggactttagggacattcttgtggtggagaa

SEQ ID NO: 7390 - DNA, 3000 bp, Unknown
  misc_feature (1)..( 3000): cDNA_ID_2992592_gDNA_ID_1621143_Annot_ID_56680 3000 nt of promoter + ATG
ctggaaagagaaagttggtttggctgaggaagaacttcacgaagaagcaattaaaaaacgttttgtgaataattatataccacacacttcacgaatgagtatcaatgagtttacacaataattattttatttttatctagttatgtaaaacaataaaataaattataatttgaaatagaatacgatcgcgttaagcgtcaactaaatgttaatatatattagtctttttgatattatttttgttaattttagaattttgaagattatgtgctaaatttgatatcaaaatttatttttgtgctatttgtgagaactgacttttttattcaatgtatgattaaacgtagaaagcttgttaggattgcaaaagtttaatattccagattttctcatctaactaaaatttgaaattaaaatttctgattataaattttattattagtaaaacgttcatataaatttactgatatattgtaagaaagtacatgtagaaaataattagaagaacattttactgtattatttgggaagtacattttaaatgtaaccttactttttgtaagtaattatataggtatgccattaaaaataaaattttaaagagtaaattaatttataaggattaaaaagtcaaatactaatttaattaattaaatttaattaaaaaacgaaatatatttttaattaacaaaaacaataaccaatcaaaatcaacatataagatttgatatctaaattttaattaatttaatttaattacaaaaacgaaatacattattaatttccaaaaaagtaaccagtaaaaattaacaaattagatttgatatctaaattatcatattaattttttattaattattatagttcacttctcatctttatatgattctatttttgcgaaaaataatatcatcattataaaaaataattagagttttttcgcatatgccataatttgattttttaaaaacgaatataaactgttcaatacatgaaaaaatattataacgggtgaaaatagatttaagaaaactttctactgagtaacgggtcataatttgaaatatttatattcaatttcatacatattatattgaaaatttataatcttatatactacaataattaaaaacatattagattttcttatatgtatgatgtgattcaatttttaatacaagctggaaaatcttagaattgacgggtttagatcgatattaatacaagatggtatactacaggtgaaactcttaaattagcaatcaaactacaagtgtataatcttaaacactaaacaatatacataatattaacaaaacatatacaactcacagtttaatatacatttaaaatcaaataaaataatatcatatatttttaaatcatctttacaataaaagtttttagtttaactaaaatataagtctacctgcggtatacagcaggttaatatctagattatagggcttattggatctaaagatgggtcatcaaatatttcctaaactgaagcaaaatatattgaatattcaaatatctatctgttaccaaattataaacaaataagttcgtaaaataatttaatattttatatacgaaattaattaaatcttaatcacataaaaattagcaaaacaaaaagtattcaacaattaaaaaattatcaaatctctgtgttatataagttttgatactatattcgaataaaatgtaatatactttttcaatttgtattctttaacaaatttaagctaactaatatatttgcttttttggtggatttgggtaaaagtgcattcaggtcatatgatacattttcctattgaataaatatggtgcactcctatgttattagttaaaatgtttagattataattcagagtcatatcattaataaaattaatattaataaaataaattgctttttggaagacggatttgaagggacgggtttttgaatcaacattaataaaaaagtaaaatataactaatccaccgtttcaatacgggttaaatctttaatttattattttttaaaactactaatattaaacatatcaaatcatcctaatttagaaaagattatataaaaccaaaaatgttatgtggtatgtataatattactatatataaaattaaactataaaatataaatgtattagagaatgatacaatttgcaaagcttttatatataaaaaataattcttaaattttaaaaattactactttaaaaaaaaaatcatgggacgggtaagaaattacataacggattttattttagaattgggttatatggtggatgtatttgaatcaatatttataaaatattaaaatattattaatatgatgttttaataggggttaaaacttcagttttttaacaattgtctcatggattcgtggtataacgttacctaataacaattttaaactgtaaaatattaatattttataaaattaaaatttgcaagttttaatatattactttaaaaaaaaatcgtctcgcggtataccgcggtttaaaatctagtaacaaaatatttgaagtacacactaaaccaactcagtaatctaattaagtaaatacagaatggacatattttttgataattttcaattattattaaaattcttcagtaaacagatttttaatgaaaaagatgattagatgatgttttgacggttgaaattggctataggttatatagtttagatttgttcagattgataaatagtctaaaaaccactttgaataaatattaggattgggccaagcccataacacaatattgggtcagattttagtacatattatgggcctatgttagcaagatatcaccgagtacgtagcaacttagattctaaagtctaaactaaacaaaatcgtaaataaactgagaaaaagcctccgtctcctcctctctctctattcatcagcctcaacctctctttcgtcgtcgactcagtttccgatttagggttacccaatcttcgccatg

SEQ ID NO: 7391 - DNA, 3000 bp, Unknown
  misc_feature (1)..( 3000): cDNA_ID_1807729_gDNA_ID_1621143_Annot_ID_56682 3000 nt of promoter + ATG
tcatcttctggtgtatagtgtaggtgtgttattgtacccggattagctaattggagaagatacagataggtcggcaaaaacctgtaatttgctatctcatccccccttacattttccactgcaacctcttttgctctccaagcggtagaatatgaaatccgcacattcagatcatttaggagcagctgtggtaaatcgacagctcgcggcccaccctgcgtagaactgtatctgctcctcacaacttccccgaggaacttataattagcatgtttattgtagttcttccgagagtcgatgttacacgtatgtgtcgtagcatacgaagtgattttgaaactttctgaatccttcacgacgcgagcagtcaattgccatggacaagtctcatcaacgcacaccatcttcaatgttttaggacatgactgaggttgcttgaagcaaaagcattgctttatcgcttgaagagacattgtttgttgcaagacttttctattcttaaaaacacttccaacaaacaaagtttcgcctgtggtgctgatttcaacctgtgtctcatcagctcaaaaattgagtaagtcatcgaacacaggagcagcatcgttaccgagattcgccaactcgccaccatgtaacttaggaaattcattatacacttggtaagcctcagctgcggtaactacaccattatcattcagtgtcccagttgaggaagctccaataccgtcgatcacttcatccccggtgacttcgtctatacaaataagattggaatccctttgcccttcgcagcgtgtaccgtaacccaatggagaaattgtttctttgtcaggtacattaagaccagtgtacgtacacgtttccaagagacgactgaattcccctgtatctccgccaggtacactaacacccgtgtacgtacacgtttccaataaacgactgaattcccctggatgttgagcagtctgttgagtgagactgacgtcttcctcaagatttccttgtacatattcttctactattacatcgttccacttgttgtaatcgtatttttcgccaataccttcactaccgtctgtggtaggatacagggtacttcccccaatagatccatccacaccaagataatcatcacacccatcatcatcttcgttgccctcctccacttcatcctcttctgttgtatcgtcttcaacatcggcttgctcctctgcatcctcattattttcatcaacatttgtagcactatcaaacacacggtcactttcagaaacttcaccatgagacctagagacagtattcccgaacgccttcactgtattattgaaagagacgaacaagttgagagaaagatacccaccacgaaccaaaaaaaaacgtttcgagacccatctgactgtcaatgtatacaggagggtgtttagtatctatcagcactgacatttctcccagcatccagtagctaattatgggattgatctcggtggacttcaaactgaaagcctctcggagtgtacggacaaagtccgtgtacgtcatggtttcctgaacgcgtacacaacgaccaaagatgccttccttaggttcaaatttccattctccttctttgcatttccactcaccgaccatagtaaatacgggaatatccataacccacctgcatcataaattcaggagacacacattaaatgcaactgaaaaatactatacatataaaaaacaaatggaatgtcgatactacacatttataaacctaaataccaattatcatttgactattttaaacaaacaaatatagattttgcaaattttctgataaaaaaatggagttcgaacacaatcaagatcctaatatgacataacaaaaaacttcttaaaagaacttcattacttacacgagcaatgcttgttttggctccaaacttggtacaaaaacaagatcaacacttcttcagcagcaatgtccgttctcaataattctttgttcttgggttcatcttctttatctcaacaatttttttattaattattatcaataatttttttaatattatttgatgtaatgatgattttgcattaattgtgacaatagtcacatctaaactttttgggggcattaaatgttgatgtcacttcggaataatggaaataatctcacttgtaacggaaccgaatcgcgtcaacgtgaaacaaaaaatctttaactgaaccggaacagtgtacgtaactaaacctactaaactaaaccgtacatttcaacaattactaagagagaagcgcaagggcagaaacgtcattttgcagacgaaaagacaaatgatgaaaaccacatttgactttgacaatccatggaaataaaacatggtcaacgggtgtgacctacaatttacccttttttcaaccttcttttgtcatccatttaagaaattttggcaaaacgttttttttttttgtgggtgagaagcatattctatattttttttgtaaccaaaaatgtttaatattgccatgtgacaaataacagtaactaaccttatcccgaaaatggcaataaatatggaaccattacccaccctcaattattgcaatttactctcctccaatcatcctccactcaggtacgtactcgctctctcttctctatctaatttcgatttttcttgaatatttttatccatccccaaattctgtgatatcccctactaaagtttaagtatgtaataaactttcaagcatttatgaacaaatcaattctgtggctatgttgatatcagttgcacacacataataagctataactgtataattaatgtttactctttttatgattttgatccattacattcctagagagacgtttttatgttcattagtaaccaattaaaaaaggataaaagaatttacgttttgttataattttcaagtgtataaacttctaatttggatgaatttgtgtaataattttcagaagatatcaaacggaattcaacggccacgatg

SEQ ID NO: 7392 - DNA, 3000 bp, Unknown
  misc_feature (1)..( 3000): cDNA_ID_1817565_gDNA_ID_1621143_Annot_ID_56684 3000 nt of promoter + ATG
cgggcagctaaaagaggtaatgaataaaccatgactttgttattattcacttggttcttatgaaactcgtaaaatttttgtttttaatggaaaatgaaatgcagttttcagtggattatccgaatgaatatatcacagccgttggtggaagctacgacactgttttcggttacggatcagcgttgatcaagtcattactcttcaaaacctcttatggaagaacctctccaatccttggtcacacgacattactagggaatccagctgggaaagaattcatgctcgagtccaaatatggaggaaagcttcttggtttccatggacgttctggtgaagctcttgatgccattggacctcacttctttgctgtgaactcttctcttaagcactttaaaccgcaaggtgggaatggagggagtgcttgggacgatggtgcttttgatggtgttagaaaagtgcttgttgggcgaaatggtaagtttgtgagttatgtcaggtttgagtatgcgaaaggagaaagaatggtaccacatgctcatgggaagagacaagaagctccacaagaggtatcttcatagaaatatttgtgttgtttcttgtttactaagattttattggtctcttttgactggataaatttttgaatttggttgtagtttgtagtggattatcctaatgaacatattacatcggtcgagggaacaatcgatggttacctttcgtcgctgaagtttacgacatcaaaaggaagaacctcccctgtttttgggaatgtggtcggtagtaaatttgtgttcgaagaaacaagttttaaacttgttgggttttgtggtcgatccggtgaagctattgatgctcttggtgcacattttgcccctcttcctgctcccactccagctcccgcgcccgcgcccgcgcccgctccagctccagctccctcgcccgctcccgcttctgcgcccgttccagctcccgcacccacgcccgctccagctccagctcctcctaacaaagtggaagctctaggaggaaatggtggaacaatatttgacgatggtgctttcgatcatgtaagaaaggtttatattggtcaaggtgattctggtgtagcttatgtgaagttcgaatacagaaaagatgggaaaagagagacacgggagcatggaaaaatgacagtgttaggaacagaggagtttgaggttgagtctgatgattacatcacatcaattgaagtttctgtcgacaatgtctttggttttaagagtgaaatcgtcacttctcttgtcttcaagacctttaagggaataacctcacaaccttttggaatggagactgagaagaaattggaacttaaagacggtaaaggaggaaaacttgtgggattccatgggaaagctagtgatgttctttatgctcttggcgcttatttcgctccaacaacaaattcaactacgccatcgactccttctacatctaagaaactacaagcaagaggtggaaatggaggagcttcttgggatgatggtgtttttgatggtgttagaaagatacttgtaggtcaaggaaacgatggtgtagctttcgttacgtttgagtacaacaaaggctctcaagcaatcctcggtgatcgtcatgggaagcaaacattacttggaactgaaacggttctttcttctctccagtctgtttctagtttcacccaaaatttgatttcttgacctaatgttcctcctcttcttttcttttgtagtttgagcttgattatccaagtgagtacatcacttcggtagaaggttactatgacaaaattttcggagttgaagctgaagtggtgacgagtctaacgttcaagactaacaagagaacgtctcagccgtttggaatgactgctggggaacatttcgagcttaacgaggacggttacaagatcgttgggttccatggcaaagctggtgatttggttcatcagatcggagtccatgccgtgcccattttcaccaattacagatgtgttttctagtttctttctctgatgattccgttaaataaggtccatggaccatggttatggatttgtgtgtgtttcactgttttagtgtcaatgctttatgcgatcatgtgatgttatgccttcatggtatttgatcactaataaaggatttttcttgtcaatctctttttagatttttgttaaattttcgcatatgaaaataaaaattaaaaaataactcatttttcaaaaacaatatttctaaaatttcaatgaaatattgcaaatcattttgtttgcattgacaactccaaacctctttgaacaagcgtgggtctatcacaagttatttgttgcgacgccatacataccaaacctatcaatatccagaagaaaaaaaaaaaccggtgttgtgtgaactccttccatgagttccactcttttttttttgcagcaaaaatggtccacaaaaaattgttgtttctttctcaattttttcaaaagaaattttcacagaagtggacgaaaaaagatttgctttcaccgtttgtcaaagtgagaactggttttcacgttttgtcttttcattcaatttcggaccaaattactctgggaaaacttaataatggcacaaaccaaactgtgcagcagttcgtatcggttaagttgacgacgtaaaccaaaccctacagcagttggtttcggtttagttgatgcggttcagttttgaaaaagacaaaaaaaaaaactgaaacgaagaaacccgaaaaaacgaagaagagaagagagtaacggagagatttgagagagaatcagaaagcgaaacgaaattcagtatccattgcttcaaaattcgacataactttgaattgttgggtagttgaattgagccactgaactcccacatccggggaagtgaaagttactgtttttcccggcgaagccaagagaaagttactgtttattccggcgaaatttgaacctccggcgagatagcatctttagctatg

SEQ ID NO: 7393 - DNA, 3000 bp, Unknown
  misc_feature (1)..( 3000): cDNA_ID_1839138_gDNA_ID_1621143_Annot_ID_56685 3000 nt of promoter + ATG
aatggtgactgagaagaaattcgaacttaaagatggtaacggaggaaaacttgccggattccatgggaaagctagtgatgttctttatgctcttggtgcctatttcgctccatcgacaacttcgactactccatctactaccaagaagctacaagcaagaggtggtaatggaggagcttcttgggatgatggtgtttttgatggtgttagaaagatacttgttggtcaaggaaacgatggtgtagcttttgtcacgtttgagtacaacaaaggctctcaagcaatcctcggtgatggtcatgggaagaaaacattacttggaactgaaacggttctttcttctctctagtctgtttctagtttctccaaaaaaaaatatttcttgatctaatgttcctctttttgtcttttgtagtttgagcttgattatccaagtgagtacatcacttcagtggaaggttactatgataaaattttcggtgttgaagctgaagtggtgacgagtctaatgttcaagactaacaagagaacgtctcagccgtttggaatgactgctggggaacatttcgagcttaaagaagacggttacaaggtcgttgggttccatggaaaagcgggtgatttggttcatcagatcggagtccatatcgtgcccattttcaccaattacagagttgctatttaggtttttttcttctgatgattccgtaaaataaggtccatggaccatgcatgcttatggattagggtgtgtgttttagcgtcaatgcttctatgcgaacatgtaatgttctgcattcatgtgtcttatcatcacttgtcgattttaataaaggatgtttcttttttatctcttttttggtctttctatcataacttggaagagccactgatggaacttgtgcagttttaatttcttgcgacgaatactttgaacgataaccaatactaaaaatcacaacaaaaaaagaaataacatttttgatcatttgttaactggtaatttttttcgaaagaaacaacgtgtaaatctgcttcttacattctattatcctgtgtggggatgttttagtgtcaatgatttatgcgaacatgtaattttctattgttctgccttgctggtgtcttgtcttgtcacttgttgatttttcatagaggacgtttcttttcaatttctttttagatcttggttagtttttgtgtatgttttacatctaaaaaactgcaaaaattgatgtcaaaaaaaaagatgtcaaaaaaaaaactgcaaagaaaaagccatatttttaaagtatttatatttttagtttttcataaaatatgttcttaaatttcaaacgcctaatgggaaaaatgttttatttgctgcaaaagtttattcataaaataagtaacagaaaatatatgctgaaaatgttaaatgttgttggttaatattttaaaaaaattacacaccaaaagcatcatcagcgaaattagacattcacttacttgaagcgtcaaagggttaaatgttcgaacccttcttccttcatatcacttgattttaattttttctttttttcttgcttgtaacccattaaaaccagggccactatgttctggcttaatgtcttgggtaagatctttctagttgtacgggccataaaatccagtatcacacgcttttgatggccatgacccatgaggccggtgatcgggttaccttgtgccgtccgtttgactttgattgatgatttcttagtcgaacatatactggccgtgtttaatatattggtatcatatacttcttggcttgaacagtggccgtgaagctcactcactatgggcgctatagagtctgaccatgtaataatcctttttctagggacccgaagcttttgctgtcttgcttatagaacaatttcgtcgagatttatcgacgtgtcgcaaccagattgatagacagaaattcaccccaagaaatataggttttaatagactggtttagttatattgcaaatttccaaaaatatgcgatgcataaatttttttgatggatattaaaaaaaataggtgcctattgatttttgttactttttggttggtataacaaatgtatggtttattggctttatatttgttagttggaccatgtgggaagcatttctctcacgtttaaaaaggaatgtaaccgtttccttttcaagaatttataactcctctcattgtcacaaagaatataaagactttgtctaagtgaggttttcactttcacattatataagaatttttttactattccttgctatcactatccacaaactcgcaagttactctctcattcctcatcgtaccctctttactcaggttactatgtctcagtctcacttctttttttgttttactcgagttttcttgagtattaatcagcgaaaaaacgtattttgaatattttatgttttgtgtttcttctctaactagtgactacttctagatttcaaagaacttataaacaaattattatattattttcttttttctttccaattttgtatttcttccttcttaacaatagctttaagctaggcttctttttctctttataacgtcaaaactgattagtttgttaggaaattgcagaggcaaattaaagtaatgatagtgtaaaccatgaatttgtcaaaatccagaaattttttctaatgatttcctcttgttaagtatgtaaaaataataattatgtcaaagactcaaaagaagacaaagatctgaaaaagtatttcctgaatcatggaacctgagaaataatattcaacaaaaaaagtaattaattatctagggttataacgttttttgcttcacagttgtgataagtaaaaaaaaaacatagtttgtgttgcttcctcttattctgtttttcatatgaggagaccattcggttctttgtttcttagtgtgtttctatgaaaacgtttccatctttcaggtattttctgaagttaaaagatagaaataatg

SEQ ID NO: 7394 - DNA, 3000 bp, Unknown
  misc_feature (1)..( 3000): cDNA_ID_2152269_gDNA_ID_1621143_Annot_ID_172911 3000 nt of promoter + ATG
ataaactttcgtttatgtttttagaaagtgttatttttttgggataattgtaaacttcgaacgatggataatttaaaaatgaatagaaattgtaatgtaaaaaaacacacgaaatcagtgctttttgtcttaattaaaaagaccagcttgcaaagtcacgcaacgtcgaagctctaactttctcttctaaaagtggcttactttggtcgcaaagacacaaattttaaggaagaaaaaaaaacaaaacaaaagccagataatttacttgggagaaataggttcgataattcgattttttcgatgaattagagtaaccttgggagcaaaatgcgaccacgcttcgtcatcttctacacaattccaagagaaacgagtagaaatcgtcagtttgggatattttgtggttttatgatttataggaacgggttgaatccttaaactgttgaatccttgatatttgtttgaagtactcttcatctactttcctcacaaaaatctacttggcatgtagatcttgagaattctagaatgtggatacagttgaaatgaacctctaattatttttcttagaaatcacttgaacaatccggtgtggatgagtagatatatactacataaaaataaaatctttcaagtcatgcttggtactaaatctctctgctaatttagtaatacaaattaatcaataagttttgacgtataacacaatttatcatgcaattacacataattaaagtaaaaaccttttttgattttttttttcaacttcattatcaagtatatattatgacgtgtgatataattgttgtattcgaagaactaaactacaaaaacgagtgaaattaagaaactctgtcaatttcatggttggtacttcaataatctctatgctaattggccaataattatagtaagtttgtgtaactaacattattccatttggaaatataaagtaaagatgtacgcgttgtacgactcacgtgatcacccagtcactcacaagtcaaaaccttagtaacaacctctaatataaatatatcacatttcacatcagtgtatttcgaaatttgataacataaataatttaaattgattttgtggattgacgacttgcatatgaactaaagttaaagttatttgtctctgttaattagtcatataaattagtatgttttgacgtgtttattctttgaaattgtgtacaaaaaaaacaataaattgaaaaccttttaagaaaatgttaacttgttatatatattttgacgtgtgattctgttgtaatgggaagagctaaactacgtaataaagcaaatctgtcagtttcatcatgcttgggtatccaatgatcttaatgctaattggccaataattttagtaagtttttatcgtgtggagctaggtgaaacttcttctttcgtttattttagatgtacgcgttttacgactcaacaagttcaactaattaaatatcacatgtgtgtttagtaggtctctatctctcaaacacacaaaaaatcactagagaagaacaagaatggagaatccaaattatttcgatacatttcctgaacatctacaaatggagattctgtcacggttgcctgatctacaatccttgggtaaatgcgtatgtgtctcaaagcaatgggcatctttaatcagctcccaagaattcatagatctttactcgagccgatggatgtttaacgatcttgatcacaaagcgctacttgatctgctactcacctagactaaccttgattaaatcttcaacgtgagatctgaagagtttagtgtcattgttcgtctcatatatttctattgtccgttcattaatctttaattatgcaaaataataatgttgtctctcgagtatatatctcttattgggattatttgaatccatttctattgtcgtacgttaatctttgttatgtactataaataataatctttcatcgatcaattcagatgtaaaatttaataacgtgatagatcggtagagtcgatgaaacttttttttttctctaagtagccaaattgaattcgaataaatgattttctcagcctgtatggttaaaatttgagatataaaaggatgggaaaattgataaagaagagaacagaaagtgcatgccaattgctgcaaattgtaatgttactgttttaagttgcaacctgaagtttaagttacataactatgcaacaaagagtcttctccccgaagactcatttaactatccgatttcaaatcctaaagcaatcaatatcagtaaatacagatcttagataccaaaacttaagaaacaaaagatactttcctatggttaaaacttaaaagatgaccatttacaatgcaacgacgtgtgataaagatgaagccctaaaaaaaaaaaaaagagaagaaaatgaagccgtaaactaactattggacatctacaaggtacctgttgtcggcgatgtcgtctgatttatgggcttttttgttgtcaggcccattatcgtgtttgcttcattaaaccccatcagttgaaacactgtcgtttctcttgtttgagttggccggaaggtgtggtgctttgtggtagtggaagtttcgagaagaagtagagattgaccaaaattaagttgcgagttctttttaatataaacaaaaattaaacatatagaaatttagctattaggagttttagattttaatttgataattttctgagtttattaagttgtttatcgattcatttaatattttttggtaaaggttaactattttaggtcaaagttgttaagtcaaccataagttcaaaaatattgtgcatacgatacttgaggaataaatgtgttgattgcaaatacttgaggaataaaatgtgcattttcccctgttttgctcattcatttatattttcagttgaatttcatatttctgctataattctaataggtatgcaaatatgctgcattattcaaagaagagtgagaagaacagagtaacatatg

SEQ ID NO: 7395 - DNA, 3000 bp, Unknown
  misc_feature (1)..( 3000): cDNA_ID_4371052_gDNA_ID_1621143_Annot_ID_56686 3000 nt of promoter + ATG
ccaagtggtgacacgttatcacgggatgaagaatggagaaacgcaggaggtaaattctctatagcccttggtcggtatatacaataaactgaacgaggtttttataaataaatgtttctatttcgaatggtatatgaaataaatatactaagcttttaagtttttttttggggtatgaaatatcaaatacactaattgtgtatttattgcagtttgctgtggactttccgaatgaatatatgacatctgtggagggtacatacgaccatatcagtgagggtaactatttggttcttacgtcattgactttcaaaacgtcaaaagggagaatctctcagacatttggattggtcattggtaccaaatttgtgttggagactaaaggtaatgttatcagtgggttccatggaagagatggtggttcttttgatgctattggagtatatttctctccaatgatatcttcctaagctacagaagtttgttcatgcatggcttcacgtatcttttactactttaaaatacttatcgattccgatgttgtcaactatgaacatctatgtaacgaaataaaactttatccaaaactaatttcaatatgtcatttaaaatattttcgatctatattttataataaaacttcaattttacaattttctatgataagagtgaaaataaatctttattaaaaacttttcccacagacaaaccaaactaaaattaggtcaagggagataataaattattgcgccttatgtgattagtggtgtccgcattcgatggaacttggctaagatctaacgagtctctactcgaaaaagaccgagccaccggagctccaaagccctgagttgctctccgagaactttgcctgaagaagtagccaccctactcacaccagagaacaaacactaccaaaaccactcaccacacgatggctccctcgtgaccaaatatgaaaggatcttgcctcaccaagttggaatcttcgacggaacaatcgtcataggagccgaattgccatttttagagcaacttcatcacattaggggagaaaatcatccagaggttaatcgcgtcaagaatttctactattgttcccagtctcctagagccgtacgtctttacaaaattctaatcgtttcaagaaaatacatgtgaataggcgcataatggccgctttatggtttagacatgtaaccgtgaaatacatctacttcatgtaggtgactatataatagtatagttgacatatgtgatcatgcattctcttatatttcgtgtagctagcaaatttttccctttttatttttattttaaagttatagctttttcttgtgtagccactgcgatggttagtactatatatagtaattgttaactgtagctgttgatatatcaaaataatgatatgatcatatatggaattatgtatattaaaatgaatttgtttatttgtatgaaaaaggtagtttatttcttaatgacataattttaaactatataataacacaatgtttactctagataacactccaattgagaagtcttacttttaactaataataaaatttctatatttatctaaacattttctgtaaaattaattatcttatttgatctaacaatttggtatctatctaattgatccatttgacaataactaaaatattgataaaattaaaataattgagatttacttttattaagaaaaatatagacttatatagtcagtcatacagaaagtttgatggcatattatcgttaggtgcacatagatttttgtcatattttgtttggtgtaacaaattcattggttgcttggccttttctcttctttttttcacaacgtggaaagcattttactacaaatgtaaccgttttcgatcgttacaacccctatcattgtcacaatgacaaactgtttataaaaatattcaaaacaaaacattaaaacttatatgagaacaaattgtaaacgcgagataatgtttttgacaaataagttataataacattaacgtaaatttatctccaaaaacataacaaaataaagaaaaaaaaaacttatcccgaaaaatagcttaataaatagggtaatattagtagataaccaaataaaacatataaattaagaaactagcagagagaaagttttttgttacaaaataaccatggacctacgttgtcggaagaaaagaaataacaaagctacccttcatttgttgtaagatgaacagtaaacgaaacacatctgtgtaatttttcaaaatagcatgtaacattaaaatttcacatgttatatttagtttaaaaacatgttatttcaaaaaacgttatgaatttttaagaaaaaatattattatgaaattcttttacatgaacagaatctttaaaaaaaaaaaattacatgtgattttaataaaaaccatatattactaaaaaataagaatatatttttaaggaaatcacgtgtgatcttaataaaaaaacgtgtattactacaaaatatcatgataaaaagagatattaaactgaatagaatgttttttccaaaaaataccatgtgttttttataaatactatgtaataagagaaaataacaaaataaaaagaggatattatgttatcgcatgtatttcggaaaataacatgttacaaaggacatttacgtaattacacgtgttctccagcatgtttccgacaagatactgtaactcaaggttagtttgtacattcttttcaaatctatagtcatttattataaatactctaataaatatcacaccattcgcctccgcaatccacaacctcgcaagtaactctcatcctcgctgtactgatcaggttactctttgtctctcttctttttctggttttcgagttttctttagtattatgcattcaatatatcatatcaaaaaaatgcatttacaggagtatactagtagtaaaaagtaatagcttttataatttcagaagaaaaaactctgaaagatg

SEQ ID NO: 7396 - DNA, 3000 bp, Unknown
  misc_feature (1)..( 3000): cDNA_ID_1817562_gDNA_ID_1621143_Annot_ID_56687 3000 nt of promoter + ATG
tcatttttaattgtaaaaaaaataaaaaaaatcaatgtaggtttactaacattatttttcttcattgcagtttgcgatagactatccaaatgaatttttgatatcagtggagggtacgtacgactcaatcctattccccgatcattacgttttggtcattacgtccttgagtttcaaaacatcgaaaggtagaatatctcccacatatggggttgtgtctggtaccaaatttgtgctggagagccaaggtaatgcaattgtcggattctatgggagaaatggtggtgctttcgatgctattggggtttatttctctccgatatgatttcttcgtaatattaagctatgaaggctactaaacgtatatggttccactgaaaaacttaccaacaacttcaccaattttatcatgttgttttataatgctcacatctattaataaatatttactatatgatgttcctcatcttctttaatttcacattgtatttcgagtttgcaaatctatgtaataaaataagggtctctatttcggtattatataaaatattttataacattggataaagtgttaaaaaacaaaatcatctctaagattattctgtttttgtgcgtaaatgtttatatatcaagctaaaactcaatgagtaaaaatgagaaaatcaaaaatttaaacaaattgtgacatcaaaagtatttcccatttgatgtaaaataattgattaaattatacattaattaactttaacgttcatcatatctccatttaattgaaatggagtaaccgttggggtattaatgccagtcctataactggaacaacgttaactagccttggttccacgctaacaagggcacaactaatattaacatatacaagtgagtctaagatattcttacaaaaaaaagtgagtctaaacgaatatataaaagacattaaccaatttatttagtgccagttagttttgaatttaaccaaatgagctttaccaatatatttatactctttaaggtaaaagtgtgaacgtatcatctctaactaaaactaaaaaattgtttctaacactgagtattaaaaatcgccctacagtttaaattgccagaaataaaagaaaacgagaaagaactaaaccgtttaaatatcaacatttgagctaagaacttcaatcttacaattaaacacatgaagaacgcgggaaaagtaagtaaccaattatctaatagtccaaagtcaaaattcatggtctttcgtattctttaacacacgatctgagattgaattaatcaaatacaagtaggttttcagtatatatatatttcgtaatcatgattcgattcaaataatacgttttgcggttttggtgtgagactttttgttaagagatatagtcatatacatgtcacatgtgtatctgatgaactgatttgggcatacttcatgctccaagcatttaggcttaagatatcaacattttgagatctataattaaagcaaagagatgtgaacctatttcctattgaccagattacatggtccttatttattaatcagatcgatctgatattgaatcagattaattaaatgcaagtaggtttgaattatatctttcataattaggcattgattcagatatacgttttggacttttggggatgtgagaagacgcagtgacaagattaccgtaattgtgtggcttaagaaaattgttttttttgggattgttaagccactctattaaaatcgttataatttttatttccatctgcaagtattttgaagatgttgaatgacactataatgaacactaagaagtctaaaacttagatgtttttgggtaattatatgaaacaacacaaatgcataacaatgaatcttctcgaccacagagtcgaataagagtaagaagacagaaagggaagtatagaattaaatcttctccaacatgcaaactcatgctagctcatcttaactaatccaggtcagcaaaacaatctaacgcaacactccaatacaatcaacttcatgtgataacaaaatgatgatctaagtttcttcatctcgaaatctgaaatcacgataaaaatgtatttagtctactgaaaataaaatgaaaataaagtactttaaaaaaataaataacaatttcactatttcaatatttaaattaaaactcgagtaggtattaattaaattaagaaagaagaaatctaaattactatttgatatttctagttgactggtcaatgataaagttcaaaataaatcaaagtataatacttcatagtcacataaagttttgttttgtttcttataatggttttaggtcaatctcagttcacattgttcaaatatcctaaagtttttaattcaattggttaaaggatttttaatcaaagattgtttctgaaggttttgttaaaacactataaataccttcaagaagataaaaatttgataattgaggaacattattttaaaatgcctaatggccactagtcagatttttatacatacactaatatgcaaatgtgaaagagccaaactgtgtctataaataagcatcttcatcctcaacttatggattcatcaaacactaacagcataattatcgatcatgttcatcatctatctttttatctttctctcatctgccattataggtaattaagctcgctatgtctcttagaccattaatgtttttagatgaaagagaacagctagaattccctataaagctccaaattaataattttctgttaattgaaatttctgcttttttatcatgacctcaaattcggctttgatataaaatttccaaagaacttaaaacgatacttccttctgtttagaacaaagttgatgattggattaaaaaaacagttgttttcttttgaatattcatagtcccaacataaaataatactaacgactatgaaataataaaacaaaatataacctaaatcaattatatgtttaaagattcaaatggggttgcaatg

SEQ ID NO: 7397 - DNA, 3000 bp, Unknown
  misc_feature (1)..( 3000): cDNA_ID_1808779_gDNA_ID_1621143_Annot_ID_56688 3000 nt of promoter + ATG
tttatcaattcctcaaagtcaaaattaaaacacttaatcttgaagcagtctgatatccggtccatgcattactttcttatatttccgacaccatactgttgcttatctaaatttcctattaagtattaaccatgttggtaaagttgaacctaaactaacatttttttttcttctaaatatctggaaatttaagcctaaaggccctatgtatttttcagggaagacccatattcaattaaatttaacttttttggagaagaaatcatttccaacttacgttgaaccaatcatatttatttgggagatttaccactagaccaacaactcgttgataactaacaactttttaccctagtataattcaactaatcgaactatccttgacctctaagagtactggagtacttgatattaagctttctaaatccactgttcctgtcacaggctaggttaattttgtttctttttgaataactaatattttctattggttaggttaagttactgattcactatctaatttaatttggacgaattatttgacatttacccattgtggggccttaaactatataaactattaaccgaggaacattccatatgaaaccgtttggtaaaacatgagtttggagttccatcaaacttattaagcagtcttataatggttgactaaattcataaaaatttcctcaaaagtcaaaacttgattcctttttgtttggcctcaccgtaaagtggaatcatgaagatcattaaattgtcgtagatctcaaggtttcatttttgttggtcaaatccttaagtaataagatcactcttttagggtttccacgttccatgagaccgatcagaaaatgcaaaatcagatttgactatttgagatttcgtcttaaaccatacagatttaataatttggtcaaaccatattccctcatatataaaaccgtttttctaacattaaacaactatcaccggaaacgtatgtctaaatcgattcatgattacggattttgtaagttttgtaacatctgcgaactttcattaaactgtaaacggataatacaagaagtttactatccatggaggtggtgtatgaaagaattgatacaaagaagctagagaggggaaattaattataaatgtatattcgtgatatgtgttaaaatgtcttgttaatatttttatttgttaaatacaaccttaatcatgcttggaatcagtggtcgagctcgaataatatgttatggaggtcatatattatataactgaataatagtattaaattatttatttttaagtaagcttagaaaataaattttgtaaaggttatggggtcgttgaccccctcctcattagctagctacgccactgcttggaagctggaatggccactaaggtaacgatatatcatcattatgcatactgatctggtaggagttatttggcagtattttggctcttgggttactctaaatttttattttttttaaatatcatcgataatttttgactgtatatttacagtcttagaaagttgttggaactttccgacgaatttccgactaaaattttcaagtttcatcaaaaataaacagaaaattctgatgcatgcctatccgacaaacctatctcgatacagataccacgtttagttggaaactcatcggaattttcgaacaacgttttgacaaaatctctcgatggaaaaatgtggttgaaactttctccaatattattttaacaatatttttttgacatctgcatcgacaaatttctggaataatcctagtttccgaccatcgtttgccaatgcacaccatgtatggagagaatataatgattgaagacactagaaggatggccatcctccatatcccagcccatctacaagattgacaaaaatgtaattgtagtcttatcagctcccttcaataccacgaatcaaacaaaactcgagggactccttacgggtttgttcagtacaaggggattagctaaaacttcatctccttgatgctcactttttttcttattttcgatcattcaattctattttctttcgttagattgtaaataaacctttttgatgagcaatagatttacatttagaaaagaaagtatattcattttggtaagaaaaaaaaaatatataggtcaaatggtaaattgaagcaacttgcccctcctaaattcatgatcaaatcccacgttagctattatatgaaatgtggataaatattattattttttcctatttagaatttaaataataataacataattgtttgtatctttaaaattagtatagtattttatcccctgcatgtaaattttatttctaaatccgcaactgcatgtacgcctttaggttaacttactttgatatccaaacattagcatccatattgttctttcattaagattacgtttacgagtctattggttcagtgaactttctttaagaaatagtattagtatatataacaaactacttaaaatgatgaaacttgagaactgagaaacattaatctattgccttagaggccactagttaaatatactagtaatatgcatttgtgaaagagctaaaacttggtgtataaataagcatttcgatttcagcttcttcatcaatcaccatagcacatcgatcatgattttcatctatatatttctctttctctcctcagccattataggtaactaagcttccttatgcaccgttttcattcacaccattcatgtttcagatatttgctagagagaacataaagtacacttttcccctatattttaatctaaattatgtacataattgtgtatatgtggctccaaacgttagttggataattacaactttctttcttccattttctttaacacattgatgcttggctagaaagttaatgttctcagtaaaattaataatgacaagaagattatataacacaataatagtattcaatttttatgtataaagattcaaatgggtttgcaatg

SEQ ID NO: 7398 - DNA, 3000 bp, Unknown
  misc_feature (1)..( 3000): cDNA_ID_3593683_gDNA_ID_1621143_Annot_ID_56689 3000 nt of promoter + ATG
actcaccagaaacgccatgaaaaaatcgcttaaagatttgggttttatgtttttttgtttttcccgagaaaaattacaggaagttggtagcagatacgaaaatggttaatgggtttaagagaaagagaacaaaaaggagtttgattctgtctttttgagtgggtttatttcattgtccgatgatcaaacacggaatgtgatgtttctcaacaaattggagaagcagagatttatgatttgatttgacggcgagaattttgatgacttggagaaatattgaacagagaatgatgaaggagtcgatcacaaacatcaccagatgcatagataggtaatcaattaattaatttaatttaattcatatagactggctcttattgtgtgtgtgtgactcagttttgtatcgctgtatgtttattattaaatttgatattttaatgctactaaagatgcatgtcagtgtcattaactcgtgatatgtgttcctttgtcaataaaaaatacaaggagaaaaaaaatatggacaatttatggcccaaatccatgttgggagaacttggtccaacagaaaatttcagcccatgttgatggcagagagcctaagagcctaaacaatcaatccatctaatcatcgtgacaatcgatctagtaagacaaaggccttgattgggaaaaaaaaaaaaaatacaaaggcattgagaatgttttgtagttttttttttttttttttttttttttttttaaataaacttatagatttatctagtgagtttcagtagaaatgtaccaaagtattttagagtggacttctctctaaaagcccaccacaccgtcggttccgattttgaaatgctttctgactaatgtcagaggtagccaaatcgcatgttactgaataataggtaaattacttgaacttttagctcaaactcaaactttcgaaacatatgtgatttttgtttgtaaggtggattgaacttaggttagttccttccaacattttcccaattctcctttaacactagaccacagttgtgtgggcggtttttgtttttcaaaatctcattttcataccaaattgttaataatactcaagaacaccttataagctagatagattacaatctaaagttgcatgataaaagtggagaagaatcggctgataaaagtggagaagaaacggccttagactgaaactgaaactatagttcaaagtttttctataattaattaggaaacaaattttatagtaatcttccagtcatgatgttagatttttatttatcctattatttaggaaatctagttctacttcatctacgttattttttctcaaaaagcaaaactttttttttaaaaacaaaaatttaataacaaaaactaaaactaaaatctaaaatcgaaaaactaaaaaccaaattcagaaactaaattaaaaaaacagcatccatttcatggccaaaacattagatattaatgcttctaactgtctatgaagagtgagatataccatgaagaggttcaaagttaatagaggatgggtgaagtctctggtttggatctcgtctttagatggccttattatgactttaagtcatctttgtacagtttttagtatcaaatgatcttaaaatctatttcttagctttactttcaccaatctaatgtgatattccccatctagtccctcgaaatagtttttcatgccgaatttttcatatatagtatatcacattatccaaagaaaaactttcgaaccaaccctaaaagcatctataccaaaacagattccccatgagccatgagaaactatgttgaccaaatctatgggttcttaatattaatttaagattctgattttccctaatttgtgaaatcaacgtcttctgcccataaatcgaacctcgaaatcgacaatactattatatataattaaatcgttatggttccactttacggtgaagttaggcgaaaaaagaagtagttaagtgtcataaactcaagtatgaacagaaggggagtacatattcaggggagtaattaactaattaagtgttataaactcatcatgaggatttgtgaaagtgttttccagaacatgcatgtgtgcatatagaaaatctaaaaaacatataagtccacgtacgatattaataagtttaatttaaatgttacacaattaatcaaaacatattcatttgttttcaagctcaaaaacgttttggttaaatgtaagcctgtatataaaaaaaaaacacaacttgtaaattaatttgatatccaagcattataaatccatgttttttaagaaatagtttctttctatatcgcttgaatcgacgttattttaaaattaatgcatgcgtgtaagtgtagctaaatacttttaaaaggcgaaaataagaactgataaacatttttctataatgcctcataggccactagttataaactagtaatttccatatgtgaaagacccagaactgtgtgtataaataagaatcgtcagccatggcttcttcaccaatcaccacagcacagcgatcatggttatcatctatatatttctttttctctcctcagccattataggtaactaagctctccttatccacacttttttatttacaccactgatgtttaatactaaggagatcagcttccttatgatccactatttacacacgccaatagtcttattccctcttcttcactaaaatatatataacactatcacataatgttataatgagataataattacatatgaacataacactatatatatagtaagttttgaatatggtatgaatttattttgtttgttttttggcaacatcaaatataggtttgttataaattttgcataaaatttccaggcaagccattccttctcttttaaaaacaattggtggtgtcttggtatataatatttattttcgagacagaaagtatattgaatataattagaaaacacaataccctaatttaaattttatg

SEQ ID NO: 7399 - DNA, 3000 bp, Unknown
  misc_feature (1)..( 3000): cDNA_ID_1817556_gDNA_ID_1621143_Annot_ID_56692 3000 nt of promoter + ATG
tgagggttactacaatgatcatgacgaatctggagtcattcaggcacttcgattcaagactaatatcaagacctctgaactaatgggatccaacacgggtaagaagtttagacttgcagccagtgaaatgaagattgttgggtttcatggatacgctgggaagaatctaaggtctcttggtgcatatttcactccgattactcctacaaaattggcatggcaaggtactgctctaggcacactttgggatcatggtgctttccaggctgttagaaagctttccgttttcgagattggtggttatataacgtgcctcggtataacctatgacaacgatggcaaagtagaaaagcgtgaccacggaatgcaagatggttaccctggagaagaagtagaggtcagaattcctataactatatattcgttgtttaacagaaaataaaataaaatacatccctcgaccatatatatacatatattgttggatagcttatctgaagctccttttattgcagtttgtggttgactatccaaatgaatttatcacgtctgtggtcgggaccatgagtactgatagggtagcatcattgacttttaaaacatcaaaagggagaacctctcaaagatttggagacagaactgctaatttagttgaatttgtccttgagaacaaagattgtgctattgtcggatttcatggatggtggactcctagttatcttacggctcttggtgcatattcttttccgatgcctctttctcctgcttcggaaaagctagaagcacaaggtggtgatggaggagcttcgtgggacgatggcggtaatttcgaaggtgttagaaagatatgcattgggacaggtgagattggtatcgtttctgtcaagtttctgtatgaaaatgacactcacgagatagtagtgggagatcatcatgggaacaagaacctgattaaacatgaagaggtgattactacttcacttttcttaattaattgttcaattacgtaccctaacttagttatataattgagcttgatattattatacttgattttctaatttttatttgtagttcgagctggattatccgggtgaatacctcacattagtggaaggtagttatgacatagtacctggaagtgaggaaactgaagttataatcatgctcatgtttacgaccaacatgcgagcctctccatgttatggactcgatgataacccaagctttgtgctccaaaagagaggtcacaagatcgttggattccatgggaaatcaagtaaaatgcttcatcaacttgggatccacgtactccccatcacccacccttgatcatgtttatatgacttagaacgaaacattctcctcctatgttttcattaactttgattcgtttctcctctttctttttttccctctgttttgattttgtttcttttttctttgtttgaacttttgaataattcatgttctaagaaagtgtatggagttggagtgaagctcattgtgacttatatatctgttttcaataagttgtttccaaaagcaagaaccattttgaagattccacgaaaaaaggatataagctaaatttgttttttatgaagttcatttttttggtatataatcgtcggtaacacaatttcatcaacaatttgttggtagagtactgataacaaatgcgtcggtaattgttgttaggttactacatgccaggaattttttggcaatttgtcgacgtgagtttccaacaactaattagtaaaacaactttcatactactattaaccatctctatgaaaatcctaaagattatgtagtgaacttagttaacttaaatttaaattatttagttgcaatctagattttttttttttttttttttatggttctaataatatttttattaaaagatttataattcaaatcaatttaatttttctttttaaaatagttatttaattttataaattttatatattatatatattctaaacgtttttcgtcaaatattctaaatattttataaattttagataattataatatttatttttaataaaatataatattaataaaattttaagactttcttttctaaaaatagttagaattgatataaatatattaaataaagaaatattaataattataaatattaattaattgataataattaatgcgaatgacattctttttaaataagttacagatttatttgccaaaacctgttgttaaataataatgttagatcgtacgttcaccacgttacgatgttgttccacgttacgatgtactattgttccacgttacggtaagactataaacatgtttagatgttggaagtttaaattgtatggcctccctcacgacacacgagcaaataagaagatggtaacttaattaagattattatatagtctcgttggaccacggatgatataaattcaaaaaccttatccagacagtaagaacattaaaactttatataatattggtctctcgtggatcacgattcatatttaaaaaatcatttctaacaatgaaactgtgtataaaaaggcaccttcactagtacctgcacatcactcagcattgttcttcagctctccttatcgctctctaaaatccactataagaggttctatcttcttataatttggaaagtatatagcatcgaaacactttgaatgtaaaaatatatacatattataatagttatgcagtacttaaatatgcttagttaattagtttgattaaaatatgtagcttagtggttaatattaatatttagattgggttaccacttagcttagattcaagctttcaacactacgtcaacccacgtaatatatgttgttaacaaaaaacttagttttcttcaagaagtgagtgtttcattactcttgctttaatttgtgtatgcaaaatgattttgcgttttttccttaagtaataaaaatgaatttatatatggcagattcgtaaccgtaagtgatg

SEQ ID NO: 7400 - DNA, 3000 bp, Unknown
  misc_feature (1)..( 3000): cDNA_ID_1817552_gDNA_ID_1621143_Annot_ID_56693 3000 nt of promoter + ATG
tatatttgtattgaatataaaatatgttttttgattataatacatcaaataaaactttttaaatattaaagtaaataaataaaattttgaatatttttgttggtcaacgttggtcaatattagtcaacgcccgagtcaattaatcagtataccaaaattgtatgtttatagtgttaactacaggacaatctaccgttcatatatgttgtcatataatacatatagctgaaaatacaatgtttaaccatgtattcttttttcctattcttttatatttcaaataggtatcaattgtttttctaatctatatatataaagaggcacgtcctaccctcaacttacaaaacaagatagcagtctctgttccttctattacaatatctcctccagcaaggtcatctatatatatgcaggaaatttgtatttatatttcattataatctttaacaaagccaaggaaataaatgcaagggttgacaaaataaaacaaacttaatacaatgcaagtagggttccatacttccattatttgcaaaatgtctatctttttgattcgtgaatcgaatttaccatcctgtaaacgatattcgcggggaagactttgtaagctttttttgttttttttgttttttttatcacgacttcgtgtagtcttttaaaataagaatttattagtattttaaagcagacttatttaatcttacaaaatgacattataatatattaatgaccaccgaagtaggagtcttgtaaaatgattcaatggtagctattgagtcgaatttacaatcccgaaaacaataatcgcgggacggctttgtattgttttttttttgtgtacgacttcatttaatcttttaaaacagcaatttttatatttaccccaaatcattttaattatacaaaaatgatgaccagttttcagttctattccagaaaacaattttccatgtttaatctattgaattaaatacgctgtttttcttgttcaaaaggagaaatggaaataatcccgagtttctgtagagaatagttggttaaatattgggttgaattataattggtatattgtaaatacacaattaataaattaaccacaaatatataaaccaaaataagaaaacactctaatatttatttgtaaatcactcacaatacaaagtttataacttaataacaaatacactcaaatctcacaccactctttatttttctcaaacctcacactctatttctacgttgcatgatattgcaacttctctctcttgtattgtatgttatgggataattgctctcgtttaattcctctcaatttatagagagttcgcagcctacttttgttgactaaatgagcaaccaccacttcttattttcaacaataaacactacttaaatattcaacaaaaaacactgctttgactaagagttaccgcatgtgaaagtgatgatgcaattctttcaacagtttcatctcttcttctctattgcttccgtttttgtttttatataacgaattaaactcaaaagcttgtgtttacttgctttaatttagaacttgaactttggctgattattgaagagaatctgcgttttgtttgtctccctcaactcaatccatgataagattctagaaatccaaaatgtccactcgacgttgagattcttaaaaagatgaaaacgtgaaatctaccaaattctaatgcttttacaaggttttaaaatatttttaaatgtttcataaaagtgattataaaactcaattcttcttgttttacacattatataaaaggtattgttttaaaaggtcttaagaagattttaaaggttttataaatattttaaaatgtcttatttttgttacccggttctaaattttttaaaaggtgtttggaattttttataaagattttaaaataaatttgataaaaataattctcttatgtcgtataccatacgctaggtcaaatcaccctaggcaccgccataaacatcgaaagaaattttggattgtttttttgtgaattttatttttggtttgtatcatttggaaaagaggcgttgtaaaaaagaatttaaaacatcatttcttatataattaaaaactattcaaccaataagaaaatatggtgaattataatttcgccatttgtgattttttaatctcatccaaataatattgtaaaaaagactaaaatttgtgtataaataaaggcccatttgtagaagtccctttgcttaatgtttgaccaagagttcattaatgcttctacactaaaaggtctggggttcgagttccaactactgcgttttattagcagatttgcagattaatagaggcaagtgtgcaggagatctacaacgatgtacaattatagtcgttcgccaggattctacgcaaagaaaatattgaagatgtctatcaagcgtatgaagaagaagaatgagatgtcgtctgtcgtggatctaataaagatcggaaggaattgtccgtaggaaaatcgtttatgtaacagttttcataatttgtataaaatcataaatctagacggcaagaaaaataagacccatttaatcctttccatatagatccgccatagttcagtcggatgtctctctttcctctaccatcataggtcaacgttttctctctaaggtacatttctttacatcaatgtttcagagctctatatcttatctgaattatattgccaacgtaatgagcatccaagatcaccaaaggttacttagtattagattatagttgcatctgcttccttttcaacaagaatcttgatcttcttccttcaataaataacttgtgttgatcctctgctagaaaaggtatataaactttttccctttttaattaaaatcccaaacctatatatgctaattactgactaagaaacacaattcccatccatatgtgaagattctaatctgttcgagatgaccgaatgattggaagcggaagggagcaagcagaaaggcttatatatg

SEQ ID NO: 7401 - DNA, 3000 bp, Unknown
  misc_feature (1)..( 3000): cDNA_ID_1817544_gDNA_ID_1621143_Annot_ID_56697 3000 nt of promoter + ATG
gttgttatagaaaaaaaggaacgtggaagacactacaaatcaaattaaagtcaaaacatcaatttcgtggcatatgtaaaataaaaaaattgtaggttgatgatatatattcggacaagtatctgcaagaagattaaaatatataacgggcagagagaaagattcacgtagggaaagatgcaagcatgtcactatttcttaagaatgtttatatgtaatcaacattatccatttaggtttactacaatctacatttaacaaatgtctttttttcccataacaattaacaatgttaatttgatcagaataacatttgatgttaaatctcagctatgctaaacctctaagtctaaacacctaacatcagatcatcaagtcgacgagctttgagatcattagagaaaaggatcttgaagcaaagcaacaagaacacctccattttgactacaataatgaatttattcctagtttcatttgggtcaagggtccgcttgattctgacttgccgaacagtgatattcgttccataactatggaaaaacatttcttttataagatttagcatctgacgaaagatctgatccatcttccaaagtatacaggccataatgtagatacaccagaagctaaatcttgaaaaagcagagagattgcttcactaatttggcagttgcatgaaccgaagcaagcaatcaactataaccagtagaaaaatctcctgcaaatatagcaatctttttttgttatgagtaaaaaaacaaacgaaattaatcattctatttttccaaatagaacaatcagtggacagattgaatatcagtgacctatatagcctatatgaaacaagtccaccaattgcaacagccgtgatacataatggactgggctgaatttaggcccgatatgaagatagcggtccaacgtttaattaaaacagtcaattctacacttttttgtgtgtacgtactctataatgaaaatatattggtaattgaaaaagttaagacttgaattgaaaccacttaaagaagaattgaattcatcatgatgaacaattcaaatcagtagtataatacaattcttttacaggcattattgggaaaatgaaggaatagtactagttaaattaaaatatttgaaagagagttgacaaaataaaagaaagaaatttgagaatagagaaaaagaaagaaggaaagaaagaaagtgaagcttcagctttaagacggaggagacgcatgcaaagaaggtaatgatgttgtctctgtctcctacgcagacctctctcccacgccttttgttattttttatacgcctctgaccttccccattccttcttacctttattaccctcctattcactcttttaccactcgtttactactagttaaaacttagaagtagtaatatttattggtataaacctcattaatttcatattgtgggcataaatgtaggagtataagattagcatccgttagagattagtcacaaacattacaacattaaacgttaacattatctatgttgttttccatgattagatcgaagaaattgcatgaccatatcaatgtgctgttagttcagtgataaatcttttaggtggaagtgctgagttcgaaacatattgggatgaatctcttttccataaaagatgaatttaaccgagtgtttttgagtctgaattttcaaatattaaaaaaaaaaagaaaattgcatgaccataatttttttatttataaatataaaaactatagtataataaaaaaactatagtataacaataggtaattttcacaaatagcaaaaaaataaaatttattacactagtataagcatttgattgcctttctcttcaatttgactgcctttttctcgtttacaattttcactgattatatatttgagaatgttttaagctttaattaacctttttttaaccttttggaacaatttttttgacaattatacctatttagaccattttcgtagagtaaacaagagaaatttggttttccctcgaggtgttgttgtttgttggtttatgaaattgaaatgtgccaatcataaaaaaaaacaaaagaaaatgccaacgaaaaagctaatttcacaaacgcaacagcactatcaaatcacattattaaaataatattattattttaaggccaaaaaaaaaaatcaaagttgccatgaacgagctagaggaaaaaaaacacacaaagtagataacatctaaaaacaacaaaacagtacagtagctccatgattcgttttctacatacatctcttcttcatcctctcttctactttcctctttcctctttccttcttcgaataaatttctagggtttttcttttctctaaagttttcatttttatttcaatgagagctcgaagaaggagaatatgggtttgagaactgataatattatggcttcgtttcgaggtggaatcggggtttctaatggctgagtcaactcggtgattctgtgttatagtcacgagcaaatataaaaaagtttgtaactttcttgtttttttaggtgtgtgtgttcagagaaaaggtcgaatcttttttcggtgtttgtaaaagggaaagttgtaatcttaaagtctgtttttctttcttgtgttttggtatttagctcataaaagccgaggagtaatataaaggataggttttgtctttgtgtgcccttttgagattgcatgaagaaaaaaagcctctagtgtgttttgaaggaaacagaattcgatatttatgcggtaatgtgatttgtgaagctactccaagtgcttaggatttgagatggcttagatttggtagttgttcaagctgtggagtttgtggtggactaagaagctctctgtctcctttgtttagtatgttgtggttatcttctgtttagaaggatttagttattcatctggagggggtagtagggtcatttgtgagattctgtgattgtgaaataagaagagttttgctgaggagtaatg

SEQ ID NO: 7402 - DNA, 3000 bp, Unknown; identical to SEQ ID NO: 7401
  misc_feature (1)..( 3000): cDNA_ID_1817544_gDNA_ID_1621143_Annot_ID_172935 3000 nt of promoter + ATG

SEQ ID NO: 7403 - DNA, 3000 bp, Unknown; identical to SEQ ID NO: 7399
  misc_feature (1)..( 3000): cDNA_ID_1817556_gDNA_ID_1621143_Annot_ID_172929 3000 nt of promoter + ATG

SEQ ID NO: 7404 - DNA, 3000 bp, Unknown
  misc_feature (1)..( 3000): cDNA_ID_2152299_gDNA_ID_1621143_Annot_ID_172927 3000 nt of promoter + ATG
tacagagttgaacagagtttgggaagatattgtttgaggagatatgaaaaatgattagttggtaatgggtaggacatggacaccaatttgatgaagcatgttgttggctttccatgaaaccctaccattttatgaccttccttgtggagtacgaaatttgaaatcatatcgagtccaaaggctttagaggttcgtttgttggtcttgaagttaagcataagtaaaactttaacttcacttccatcaactttatcataactaccctccagtgatatcaagtattcactcggatactccatctcgaactgccaaaacaagtaaaaacaacttgatcacttcaaaaaataattggctaatgtttaggttaatacctacattaacgtataacagttacttgaatcggaacaacaatagttagtatctactcaacgagaaaaaatcaaagataacagtataaaacaaacgaatggtttattaaatagtttacatctaaatattagcgtacaattgtaacagtttcttctggagcaaaattagcaacaaatatgtagtgtatgctaaaatttaagttatcgaataaatgttatttattgatcaaatccacccaaaaagacatggttattagaaagttgaattcatgtgttctgaatcagagttagcatctactaatgtggttatgttaatacgtaaattaacgaataacagttccttgaatcggaacaaaaatagttagcatcaatccgaaagagaaattcaaaaagaacattattaaaaaataaatggtttattaaaatggttagcatctaaatgttagtgaacaacggtaatagcttcttcgggaacagggttagcaagaaatatttagtatatgctaatatttaactgaacgtataacatatgttggatcaaaacaaaaaaaaaaacaaaaaatattatgttgccgtctgacacaatataggggcacaaaggttattatactcagcagataacagttgaaaattcgaagacttaattttggagtcttccgagtatagacaatgataataccctttttttttgtcacaagtgtgttttatttagtataaaaaaaaataacatgactatattttacaaacattaaaacaagtaaacctaacaaaacaaaacaaaaccaaataaaaaaaactctaaactataggaaaagctaacacaacatattagacacgtggtaagccggaaacatgttagttgacatgtgcaaagttgaagatgtgggagtattagttgatcggaaagcttcaatttcggccaagatcgccggaaaattattcaatccacttatctcaatcttcgctcaaagaaacaaaacgaaattctattttagctttgatgagattatgactccacaaactaaatttgaaaatcttcttcatcttctttttcaatcaagcacttttcaatcttcaaagaaattatcaaatataggtttcctttcattcaaccctgatcttaggcaaagaagatgagcctaaaaccatgatgctgatatagactgcacaatttattcatgagaaagacaagaagcggcaacaaatagccgtaacatgagccggaccacaccggaaacagagccagaccacaccaaaaacaaagtcggttctaatcgggacaacgaaagccgataagcataccgaatggtggaacaaggattgagttttctctctcttaataatcctagagagagagagctcatcctttgtgaccaggctagtccaaacacttacaccaagagagacttgaaattctatttcttttttggatatcattctctcaatattgaatactacaacaatgttatttcatggttggatattgctatctcatataaaacgtggatcaaaccacaattttgtttagggtattgtgaaaacatgtattttctctaatgtttatagaaatgagtattttatctctctaaaagactaatttttcattccttcttctttttttaagaatttgtttacaaatgacggcgatgattgagctcgtgcaatgacaaaaattttgaagactgtgagaagcaagggcagtgactcatgaatcatgtcttgtgatgaaaaagacggcaagatcttgacttccgattagcgttggcggcgatggtgactcatgaatcatgtcttgtgatgaaaaagacggcaagatcttgacttccgattagcgttggcggcgatggtgaatttcagcgatgatggtgaattaagcgtgagaagcaagggtggtagtttgggtctccagatcctctgctagcatcgtcgtccaaacatcgcgaacaaatttggtttagaattactcttccaaatcctctgttattagttggtgacgacgatgatgaatttcgacaataatgaacaaatttgatttaaaattagtgatgaattagagattaattgattcgagcagtgtctaagattagatcaaaggattttttagatagtatccttagggtttggatttcttccattgaaaataatttatgagaatattacacgtagaggcaatatttcaaaactttggccacaatagaacactttaaaactattagtcactttaactcagtataattatccctttaccctgaaatcgttggtttaataaaacataacaaatttagccggttttctctcatccggttccggttgaatcacgtattatcagttactgtctgggttaaatcttcatttaccaacacgatcgtaaaaaaacggttacccagtaaaaaccctaatttactgtatctccacatcgccactgctcccaatccggcgactgctccgaatccggcgactcctccgtcgctgtccatcaatccaccactcaggcgagtttatactcgctgaataaaaaccaaatagtaatttcccccaaatctctgcaataatcgaattcgatttcgatttattgttctcgtaagccagattcattagcattccagttgattctcactgatcggaatactca

SEQ ID NO: 7405 - DNA, 3000 bp, Unknown
  misc_feature (1)..( 3000): cDNA_ID_3050385_gDNA_ID_1621143_Annot_ID_172924 3000 nt of promoter + ATG
gtggaagaggaggcaaagtaggtccaattctttttgtattctttctaaatcgggcaaagagaaatccagcaaaagatacagcaagagctgctcctaattgaagcaccaacaagtttatatctcttttgtgtgtggtaataatcatgactaccaataaaaaacaaccaccccaagattctcaatttgaagaacgactaaatcatatctcttcttcttcatcgacctccatctacaaaaagtaacagattgtaatcaaaaagacaaacttttgatgatgggatcaaataaccaccaaggatcaacagtaatctactcactacagaaactaaagatctgatcaaaacgaaaaagttttgatttttttcccctttctatatctaatagtacaaaaaacagagctttgggaagaacccaaaacataaaaatcgaatctttgtcttatttgaaggagataaattaagtcaaaagaacaacataaacaagtaaactcaccagaaacgccatgaaaaaatcgcttaaagatttgggttttatgtttttttgtttttcccgagaaaaattacaggaagttggtagcagatacgaaaatggttaatgggtttaagagaaagagaacaaaaaggagtttgattctgtctttttgagtgggtttatttcattgtccgatgatcaaacacggaatgtgatgtttctcaacaaattggagaagcagagatttatgatttgatttgacggcgagaattttgatgacttggagaaatattgaacagagaatgatgaaggagtcgatcacaaacatcaccagatgcatagataggtaatcaattaattaatttaatttaattcatatagactggctcttattgtgtgtgtgtgactcagttttgtatcgctgtatgtttattattaaatttgatattttaatgctactaaagatgcatgtcagtgtcattaactcgtgatatgtgttcctttgtcaataaaaaatacaaggagaaaaaaaatatggacaatttatggcccaaatccatgttgggagaacttggtccaacagaaaatttcagcccatgttgatggcagagagcctaagagcctaaacaatcaatccatctaatcatcgtgacaatcgatctagtaagacaaaggccttgattgggaaaaaaaaaaaaaatacaaaggcattgagaatgttttgtagttttttttttttttttttttttttttttttaaataaacttatagatttatctagtgagtttcagtagaaatgtaccaaagtattttagagtggacttctctctaaaagcccaccacaccgtcggttccgattttgaaatgctttctgactaatgtcagaggtagccaaatcgcatgttactgaataataggtaaattacttgaacttttagctcaaactcaaactttcgaaacatatgtgatttttgtttgtaaggtggattgaacttaggttagttccttccaacattttcccaattctcctttaacactagaccacagttgtgtgggcggtttttgtttttcaaaatctcattttcataccaaattgttaataatactcaagaacaccttataagctagatagattacaatctaaagttgcatgataaaagtggagaagaatcggctgataaaagtggagaagaaacggccttagactgaaactgaaactatagttcaaagtttttctataattaattaggaaacaaattttatagtaatcttccagtcatgatgttagatttttatttatcctattatttaggaaatctagttctacttcatctacgttattttttctcaaaaagcaaaactttttttttaaaaacaaaaatttaataacaaaaactaaaactaaaatctaaaatcgaaaaactaaaaaccaaattcagaaactaaattaaaaaaacagcatccatttcatggccaaaacattagatattaatgcttctaactgtctatgaagagtgagatataccatgaagaggttcaaagttaatagaggatgggtgaagtctctggtttggatctcgtctttagatggccttattatgactttaagtcatctttgtacagtttttagtatcaaatgatcttaaaatctatttcttagctttactttcaccaatctaatgtgatattccccatctagtccctcgaaatagtttttcatgccgaatttttcatatatagtatatcacattatccaaagaaaaactttcgaaccaaccctaaaagcatctataccaaaacagattccccatgagccatgagaaactatgttgaccaaatctatgggttcttaatattaatttaagattctgattttccctaatttgtgaaatcaacgtcttctgcccataaatcgaacctcgaaatcgacaatactattatatataattaaatcgttatggttccactttacggtgaagttaggcgaaaaaagaagtagttaagtgtcataaactcaagtatgaacagaaggggagtacatattcaggggagtaattaactaattaagtgttataaactcatcatgaggatttgtgaaagtgttttccagaacatgcatgtgtgcatatagaaaatctaaaaaacatataagtccacgtacgatattaataagtttaatttaaatgttacacaattaatcaaaacatattcatttgttttcaagctcaaaaacgttttggttaaatgtaagcctgtatataaaaaaaaaacacaacttgtaaattaatttgatatccaagcattataaatccatgttttttaagaaatagtttctttctatatcgcttgaatcgacgttattttaaaattaatgcatgcgtgtaagtgtagctaaatacttttaaaaggcgaaaataagaactgataaacatttttctataatgcctcataggccactagttataaactagtaatttccatatgtgaaagacccagaactgtgtgtataaataagaatcgtcagccatg

SEQ ID NO: 7406 - DNA, 3000 bp, Unknown; identical to SEQ ID NO: 7397
  misc_feature (1)..( 3000): cDNA_ID_1808779_gDNA_ID_1621143_Annot_ID_172923 3000 nt of promoter + ATG

SEQ ID NO: 7407 - DNA, 3000 bp, Unknown; identical to SEQ ID NO: 7396
  misc_feature (1)..( 3000): cDNA_ID_1817562_gDNA_ID_1621143_Annot_ID_172922 3000 nt of promoter + ATG

SEQ ID NO: 7408 - DNA, 3000 bp, Unknown; identical to SEQ ID NO: 7395
  misc_feature (1)..( 3000): cDNA_ID_4371052_gDNA_ID_1621143_Annot_ID_172921 3000 nt of promoter + ATG

SEQ ID NO: 7409 - DNA, 3000 bp, Unknown; identical to SEQ ID NO: 7393
  misc_feature (1)..( 3000): cDNA_ID_1839138_gDNA_ID_1621143_Annot_ID_172920 3000 nt of promoter + ATG

SEQ ID NO: 7410 - DNA, 3000 bp, Unknown; identical to SEQ ID NO: 7392
  misc_feature (1)..( 3000): cDNA_ID_2152288_gDNA_ID_1621143_Annot_ID_172919 3000 nt of promoter + ATG

SEQ ID NO: 7411 - DNA, 3000 bp, Unknown; identical to SEQ ID NO: 7391
  misc_feature (1)..( 3000): cDNA_ID_1807729_gDNA_ID_1621143_Annot_ID_172917 3000 nt of promoter + ATG

SEQ ID NO: 7412 - DNA, 3000 bp, Unknown; identical to SEQ ID NO: 7390
  misc_feature (1)..( 3000): cDNA_ID_2992592_gDNA_ID_1621143_Annot_ID_172915 3000 nt of promoter + ATG

SEQ ID NO: 7413 - DNA, 3000 bp, Unknown
  misc_feature (1)..( 3000): cDNA_ID_1817639_gDNA_ID_1621144_Annot_ID_56704 3000 nt of promoter + ATG
ttggaaattgttgactatgatgattagtggctagactgactttttaatattgcttattgatcatttgaatgcttttggaaaatgatgatgattagttgattagtaaaacgattaatttcatggaaatgaagaagtcttgttaatgtttagcgttagaagttcttttgctgcaaagtaaatggtaaaaagcattattcaaaaaacaaaagtaattgggtaatactgtaatagttctacggtagagaatccgaagcagtatttgtatatccggacccgacccgattcgacccgacccgaaacaaaacggtcaaaatcagcagaaacacgttgaatcttcttcttcttcttcttcttcttcggctcagtgacgacgacgattcttttgacggtctttttctcaaagtattttggattgtcttccacgttttgatcgatcctttcctctccactcctcctcttctctgtagatgtaagtcttctccattttcgtcatccaaatttaagtctctcgtttctgttatcatctcaatttcgtcgcaatcaatctcaatcgtgtttcagattcattgaatcgactgcaaattttgtaattcaggtttagaaattgaatttaggacttgagagagcttagtgatcttctacaacgaactaatccatttgaaaaatctgaatcattcatgttttcttttgtcttttgtgaaatgatctatcagatttttcatacaatcactgtgcagattggtatgtagctggtatatatatactgtatatagctacacaattactgcaatatggcttcacgagcgcttcttcgaaggagaagttacgacgtagtgaaatctctaagtgaacatttgcctacggttcaatgtttttcaagtattgagcggcaaggacaacgaggataccgtgattttaaagatgtgaagaagaaagagtcgagcgtgttaatggaggggttctatagaagtagattacttcagtctccaagttttagtaatggagttggaatattagaattgccttatcctttgggatatagattggtttttcaatctatgtactcgtctttggcaacggctaataagcctgaccatgataaaaagggagaaaaggttacctcgcaaactaaagaagcttctcctgaggagtgtgatgaggctgttgaggggttaagtttagctaaggctaaagctaaagctatgaaattggaagaatcacagaaatctgatatatccattatgcaacgtgtgcggttgtttcttctggggataggtcctgctttgagagctattgcatcaatgagcaggttaggctgtagtttttgttgttttagcgtttgagcgatttcatgccatttattgttatgtaacatatgctttatttatgcagggaagattgggctaagaagcttcgtcactggaaagatgaatttaagtctactctgcaacattactggctggggacaaagttgctttgggctgatgtcaggatcagtgtaaggctgcttgttaaacttgctaatggaaaaggtctatctaggagggaacgacaacaactcactcgaacaactgccgacatttttagattagtcccggttgcagttttcattattgttccattcatggagtttttgctaccggtgtttcttaagttgttcccaaacatgctgccgtcaactttccaggataagatgaaagaagaggtactgttaaaaaacctattttattgcttctctattccttatacgtcatttatttttatttttacattgatctgggaagtatgaattggtttgatctttcattctcgcgctgtcactcttgcctgtttctcaagtatgaatctaaaattcacgtttattttgcaggaggctctaaaaagaaggttgaatgcaagaatggaatatgctaagtttctccaagatactgtcaaagaaatggcaaaggaagtccaaacctctcgcagtggagagataaagaagactgcagaagatctagatggatttatgaccaaggttcgctttccttgttatctaacgcaattgacgtccttctataaacttcaagatggacttatagcgtcattatcaattgtacaggttagaagaggagtcggtgtttcgaatgatgaaattttgggctttgcaaagctcttcaatgatgagcttacattggataacattaacaggttatgaactagtcaaaactgtatctattggtaatgcgatattgcttctgtcttggtttgttttgttaatcttatcttccttattgcaggtcccgattggtaaatatgtgcaaatacatgggtattagcccattcggaactgatgcatatttacgttatatgcttcggaaaagattacaggagttagttctacattactcatattgctatttttcttgtctccaatggctgacattgagtcctactactctacaagacacgcatttcagattatatatatatctaaattaatgtcttctttctcacataatcattgggcaattccattccttggacttcataggattaaaaaggatgataagttgatcaaggctgaaggtgtggagtctctctcagaagctgaacttcgccaagcttgcagagagagaggaatgcttcaattgggttcagttgaagaaatgagagagcaggttattgctttataaatatcattcagcattccatctttagtggagttggtatcaacaaaattgtactctttgtgaataagaagaatgatctcgtgatttgtgtttgtgttgttctagtagtttaactagagatataggtgatttctgatctgcatatctctcattacagctagttgactggctggatttatctctcaaccattcggtaccatcatccctcttaattctttctaggtaagcttttcttgcaactcagtcaatatatatattatatacaaagaattaagaatgacattgcgacatttttcttcctgtacgtattgacagatcattctcaatg

SEQ ID NO: 7414 - DNA, 3000 bp, Unknown
  misc_feature (1)..( 3000): cDNA_ID_1817635_gDNA_ID_1621144_Annot_ID_56705 3000 nt of promoter + ATG
gcaacaatttaatcgtcacttaaaacatattttttgaccgtttattaactatttatttcatcatctatatgaacatttatataaatatcttgtagggagttggagtattactcaatggcatgcttggaggcatcacagggatcacaacatcaacgtaaataaactcatctctaaattacaaatttttaatttttcgagcatttatcttaagtttctcttgtatatataaattgtagtaattaaaggctaatgatatagttttgatatgggtgtgacttaatattcagagaaaatgttggacttttggcaatgactaagattgggagtcgaagagtgatacaaatatcagctgcattcatgatttttttctccatttttggtaattttcttgttttgtttttactaataatctacatcttcctatttacaatgtctaaatgatttcgttgaatatcttttactggttttgtaacttatttattttgatcaaaatacaggaaaatttggagcgttttttgcgtccataccattaccaatcatggcatctctttattgcatcgtcttgtgttttgtgtgtaagtctttttcatcacatcacatttgtagtatagcattttcgataaatatatgttttatttttttcactaaaataaaatcaaattcaatatataatgcagcttctgtgggacttagctatctacaattctgcaacctcaatagcttcaacatcaaattcattctcggattttcctttttcatggctatttcaatcccacaatacttcagagaatactacaatggagggtggcggtctgatcatcactcaaattgggtaagcacatcttattctatactttgagacaaattgtttaaatcgcaaacgccttttttgcaacttatcaaattgagattccttttatgtgtgtgcacaaaacagttggaagatatgataagagtgatattcatgtcacatacaacggttgcggcaataattgcgatagtgcttgattgcacattgtgtcgtgacagcgatgaagccaagaaagattgcggaatgaaatggtgggataagtttcgactttacaatcttgacgtgcgaaacgatgagttttacggtctaccttgccgcctcaacaaattcttcccttctcattgaaactttcacaaatttctttctattcttttgtctttttgaatgttttctttcttctttatttatgtctatctagaagtttagagtgctaatatattttattacaatttacttatcttgttacatatatgtcttcaaatggtttcttaagaaactttcatattttgttcgataatttctaaataagaaagttattaaacgctatttagaagttttagtattgcatggagcttaaattgtttgaattatttaaactgtaattcctaatgttttttcaattttatatatttatatagttaatttaaccaactgcttatatccaaagatgcatagatggtttttcataatgtaattactgaagacgaatcttaacatattatatcaagtaaaatctttcttagaaacaaaatcaaattccatttaacaaaaccgctttggagctactaaaaagtcagaattccatcaaaattggtaaaatgttcccatagatatacacatttttctctaaatatcatccacgaataaaacagaatagaagatcaaacacttgtgtcaagactcaggattagaaccagcaccacctaccttcttattagccattatgttcttaagaatctgcagaaataaacaaaaacttgaacatttcgacagattcgtaatcataaccgttaaaactacactgtgacagtctcttaaatcacgatgatcttaatgaatctcaaactgaagcaaatcattgatgagtgatttaacaaaaaagaatggtgagagagacatatacatgtgacatgtcgaagcatttgattttcattctacaaagttgaagtttgttcctgcattttcttgataaaattctcaaacaaaaaattactaagtgcttttcattacctacctttggaaattgttgactatgatgattagtggctagactgactttttaatattgcttattgatcatttgaatgcttttggaaaatgatgatgattagttgattagtaaaacgattaatttcatggaaatgaagaagtcttgttaatgtttagcgttagaagttcttttgctgcaaagtaaatggtaaaaagcattattcaaaaaacaaaagtaattgggtaatactgtaatagttctacggtagagaatccgaagcagtatttgtatatccggacccgacccgattcgacccgacccgaaacaaaacggtcaaaatcagcagaaacacgttgaatcttcttcttcttcttcttcttcttcggctcagtgacgacgacgattcttttgacggtctttttctcaaagtattttggattgtcttccacgttttgatcgatcctttcctctccactcctcctcttctctgtagatgtaagtcttctccattttcgtcatccaaatttaagtctctcgtttctgttatcatctcaatttcgtcgcaatcaatctcaatcgtgtttcagattcattgaatcgactgcaaattttgtaattcaggtttagaaattgaatttaggacttgagagagcttagtgatcttctacaacgaactaatccatttgaaaaatctgaatcattcatgttttcttttgtcttttgtgaaatgatctatcagatttttcatacaatcactgtgcagattggtatgtagctggtatatatatactgtatatagctacacaattactgcaatatggcttcacgagcgcttcttcgaaggagaagttacgacgtagtgaaatctctaagtgaacatttgcctacggttcaatgtttttcaagtattgagcggcaaggacaacgaggataccgtgattttaaagatgtgaagaagaaagagtcgagcgtgttaatg

SEQ ID NO: 7415 - DNA, 3000 bp, Unknown
  misc_feature (1)..( 3000): cDNA_ID_1817627_gDNA_ID_1621144_Annot_ID_56707 3000 nt of promoter + ATG
ctcatcgtcatcttatcttgtataataactcacccgagaccaggcacacaaacggaacaacaacaagacaatcaatacatacacaaagaaataaaaataatcttgaggctcacatgcatggtttcaacctattaagtcgaagcaaggtatatctttttttattttgacttggtttttctaactacccgtcatacttatatagtagcagtcattttcttctccaataactgcaaatattttcatataactcatgttatgccacatgttaaattagtttaaccttttcgacaaggacgactattttatttggttctaccaaccatacgttggaacatggcttgcattataagataagtagtttaatgtcaaattttggtttggagctggagatggtttagcttgaaaactaaatcttgaattgtaaatcggactaaaggcgtttttgaattttagcgatatgataaccacattaactaacgatcatctttgtaatagtaaacggtataaaaaggataaagttgaaggatcacttgatagttactcaacttattaaaaaagatagagtgatttttcaacgttacctacggaggctcccaaattacttttaaacaaagcaactcgttttcaaatatcgtagagaaatcaatggcgccgcgcgccgtttgcttaatactttgattcttaaaccacaaagaaaccctcttctctttatccaagatcctaactaacttatatatatacacacgtgcatacttctatctttcatcgaaaaatacaataatcttaaactttaaatccttccaattaaaaaaaacacacaacaaatggcattgtttctaagctttgttcaggtctttagcatcgttataacaatcattatgtcccactttggtcagtttgacgcaagaacaagtcttaacgttctgagtttcggtgcaaacccaaacgggatcgtagagtcggcaaaagccttttcggatgcatgggatgctgcgtgtggagtggaagactcagttgttatttacgtcccaaagggaaggtatttggttagtggggaggttaggttcgaaggagaaagttgcaaaagccgtgagataaccctaaggattgacggaactttaattggtcctcaagactacagtttgcttgggaaaaaagaaaactggtttagttttagtggtgttcacaatgttacggttcttggaggttcttttgatgctaagggatcaaccttgtggagttgcaaggctaatggttacaactgccctgaaggtgcaacggtatgtgtttaagtcttcaattaccaatttatgcatttgtgtttttcttttttgtcaacaacatgaacacaactacacttgcatgttctaaactcctaataatttatgcgattgcgtttggttgcaataacagaaaaaaaaatgcgattgcgtttggttgcaataacagaaaaacaaaatgtaacttcagaatatatattttattatggaccgcatttgtttcgtaacatatattacgtattaattacttggaaaagaatactatatcctaaatttacaatatgaatcacaaaagaataaaaacgcaaataaacagtcaagatttaacaaaggttatttaatgtagacattgagattcatggactcaaacaacgtgaagatcaaaggagtattatcgttgaatagccaattgttccacatagcaataaaccgttgcagaaacataaagattgaagatgtccgaatcatagcacccgatgagagtcctaacactgatggcattcacattcagctatctaccgatatcgaagtccgaaatgcttccatcaaaaccggagacgattgtatctcaatcggaccaggtacaaagaaccttatggtcgatgggatcacttgtggtcctggacatggaatcagcattgggagcttagcaaagtccatagaggagcaaggcgtggaaaacgtaactgtgaagaatgctgtgtttgtacggacggacaatgggcttaggatcaagtcgtggccgcgacatagcaacgggttcgtggagagggtccggttcttaggagctattatggttaatgtctcatatcctatcctcattgatcagaactattgccctggcgattcttcttgcccttctcaggtccgtttcatatacctttatcttgtttttgtatgttagtcaaataattactttagaatctaaccaaatatttgattgaaataatgagtttgattggtaaccatttacctcaacagtatatataccatatatatgattgttaccggtcacaaaagcgaaaaaattagcagtacaaaaagttaattagatatgaaattataaattttcaggagtcaggaatcaaaataaacgatgtaatatatagtggaatcatgggaacatcggccacagagattgctataaaaatggattgcagtgagaaagtcccatgcactgggattcgaatgcaggcaattaatctaacttcttacggtgaagcagcaaagacttcttgcaccaatgtttctggtaagcaacttggattggttacacctagtggatgtctatgacctctatacgtttgttcagaccaagatttgtaatattaaacatgacattggttgtacataaaaatatttgtgtatctattaaaatttattatatggttatatacttcgtaaccattgtgaataaatatttgtgtagaacataatattgtactggtatgtgtaattgaataaaagttaaagggccaacaatttcacgcaagaagacaataatctaaaccggaggaaacccaatcaagtgggtgaaccaaaaaaaaccatacgcattaaatgacttcaaccaaaatttaaaaaacctacgcgtcacataaacgagaaacactcgtcttaccaaactctctcctacacaaccaaaaccatctctttgcaacaaaacttgttgtaactcatcttcttcttcttcttctccatcacagactcataacaaatg

SEQ ID NO: 7416 - DNA, 3000 bp, Unknown
  misc_feature (1)..( 3000): cDNA_ID_1817619_gDNA_ID_1621144_Annot_ID_56709 3000 nt of promoter + ATG
agttctacgtataatgaaaataattataaactctaaacttcataaaattatatatatttgtttttgtcaattcgtctaatttagtttctaaattttctaaataaaaatatagaaaaatttgctttaaccagacagactctgaactaaacgttagtacaattttcatgctgtaatattaacaaaattttaatatttaaagaaatgattatatccaaaatatcgatgaaattcattaaatattttttaggataatatagaaatattatttctttctctttttttcataaataatatataagtggactagtggatagaaagtgttttaggaaaaagaaaagaaaataaaataaaagaaaaaaataatatgttgcaacatttgtgaaaatgacatatccaaaaaaagaggatacaatttataaccaatagagacaattgattttttttttgttaaagataaagacaattgatttgtctttgattgtggtaataatgagatgattgtaacttataatgacattaaacgtaaagcttttttcatcaacttgaagatatatcattaagaaaaattgttgttgtagattgatagatgaaactaacctcatcggtagaggaggagatgatgacgtgaagtccctgaagcaaagcagatccaccggtgcctgaagaattccggtcaccggagatgacgtggctcagcctcacaacaccaagcattctatcaaatccttctttcaaaatccctgaggcgtctccatatttgcttccctccgtaacaagcttgaaatctccacttagatacattctccggccaccgtggctaacttgtgccggtaacggccaaatcctcaacctctctatgtcttcaaaggcggagattgttccggcgatgaatagcataaacaacggcaaaacgccggcgatctttgctccgctacctctcattttttcttcttttaagttacaaggaaatagcaaaaagcgaaaaatagtaaaaatgtttttaatcaaagaaaaaaaaatgtagcaaaaatggaggagaatcttagaagtctctctctctttatatatagtataggcaagcaagtaacactattatatacacacgttagacaagcctttgaattggcgcatttttttgagtaagaaatgttattaataatgtattattttgtacgtaatcggtgtttgctgatgaaagaattagagacaacagtaaatcacacttaaaaaagagaggaagaaatccaataaatataatcttaatatgttatgtaataaaattgtgtttattttagattttatatatatgtatgtaggggaaaagatgaacattgatgctgttttttttttttttcctttttgtttcatttgttagtgattttggtgagaatttggttagttgcaggtgatcttgatataggggactatgctatttgtgttaaactttaattgataaagggactctctcaagtgttgacaacatgtctctatgcataaacataaaatcaatgaaaatttaattaaaatttaatttaattgtatatttcattaaaatatcaatattatataatatggtattagaatattagttgaatttacggtttattttaagaaaaatatgaaatactacataaacactaattttatgtatatttaaaaataaacattagttttatgtatatttaaaaatatttttaaaatagccaatattttatttttattctcttgttttttttttttaacatctagactttcattagattgtaaagggatgatacagatagttaaccaaccattgtggtggtgttgtgaaagtttgatacaaaccatttaaagaacaagccttattagcgatagtatccgctgctgcattccgttctcaattaacatgtcgcaaagatatctgtggcagtttatccatccaaaaccgaatgtcaaagagaagggtatctatttcgttgtgatctcccattgtatttaccaactttattagttccaagttatctccttcaaacacaatacaccggaaaccatgagtccaaatcatctgtaaagcgtggagaaatcacagtgcctccgcgtgtatcgccgaatttgctgcctgaagttttgcccaaccaaatcgaataacttaaccactattgtctctgactatccatccagtatttgtaaatgaacgtccctgcacatagccgctatcaaaattacatttaacccattctgggagagggggtatccattgccgactacggaaatgctcatgtgagtgaccaaacggcgagagagaatcatgatttacttcagaacctatcccagtcgtatctatccattcctaaacttcatagaaaccttttcttgcttcacttgcaggatcatagtttttcttttgaaagaggaaagcattccttgatttccatatcctccacatcatccaaaaaggtagtaatcgattgctgagagggatattttgtaccttatgaagttcaaacagcttgttgaaattgtcttccaaattctcttggttttgaggtaagttatcataaaccaaaatcaaaccaacacattgaacaatcgaaagggaacaacggaaaagaagaattagaccaaaacagtaatataaaacagagaatcaaatgacatatattaacatacgattttaagaactaaaaaaattaatccaaaacagagaatttgtgacagatttctggactgttaatccaaaaaagagaatttgacatcagtaagttttactttttaccaatctacttttttttttgttataaaggtttgtttttaccaatttacaagtacaaattttgttgttataaaataaataatttcgaatgtctgaaaaaaacaaagaaaacgagagatccgaaacaacacgtttcaagcatttctgcgatttagcttgagagagaaatatctcgagaggctttgtaccgaaaaactcgtcgtctctctctgctccaagtaaaagcttcaagtccaatactcatg

SEQ ID NO: 7417 - DNA, 3000 bp, Unknown
  misc_feature (1)..( 3000): cDNA_ID_1817611_gDNA_ID_1621144_Annot_ID_56711 3000 nt of promoter + ATG
tcgctttttgctatttccttgtaacttaaaagaagaaaaaatgagaggtagcggagcaaagatcgccggcgttttgccgttgtttatgctattcatcgccggaacaatctccgcctttgaagacatagagaggttgaggatttggccgttaccggcacaagttagccacggtggccggagaatgtatctaagtggagatttcaagcttgttacggagggaagcaaatatggagacgcctcagggattttgaaagaaggatttgatagaatgcttggtgttgtgaggctgagccacgtcatctccggtgaccggaattcttcaggcaccggtggatctgctttgcttcagggacttcacgtcatcatctcctcctctaccgatgaggttagtttcatctatcaatctacaacaacaatttttcttaatgatatatcttcaagttgatgaaaaaagctttacgtttaatgtcattataagttacaatcatctcattattaccacaatcaaagacaaatcaattgtctttatctttaacaaaaaaaaaatcaattgtctctattggttataaattgtatcctctttttttggatatgtcattttcacaaatgttgcaacatattatttttttcttttattttattttcttttctttttcctaaaacactttctatccactagtccacttatatattatttatgaaaaaaagagaaagaaataatatttctatattatcctaaaaaatatttaatgaatttcatcgatattttggatataatcatttctttaaatattaaaattttgttaatattacagcatgaaaattgtactaacgtttagttcagagtctgtctggttaaagcaaatttttctatatttttatttagaaaatttagaaactaaattagacgaattgacaaaaacaaatatatataattttatgaagtttagagtttataattattttcattatacgtagaactaatctgagcagttttcattatttagtgcattcccttttgattttggttaaattcataccaaaactaaaagagattgaatataatgggtgtatatttttcctgaaatcataagaatttgactaaaatttttagtaaattcacaagtaaaaaaagaagaagtagaaattcttctattgatacgtttattttgtgttctggagaaaaatatttctcattttttttttttccacttttccatcaaagttatgctgaaaactttttcattttttttaatcctggttggtattaagaaaaattgagacatatatttcaattgttttcctctaacatgtttaccattcaccaattggtattatttgttttattgtcttcatttataactatttttcttttgtcaactcttgataaacaatttttctctttcttaacagaagttattttagaatatattttacaaattggatcctagtttacgcaactttgtccatgagaattgagatgtgcgtagatgtatcgattatccaacttcttatcttttttttatttttttgggttgcttggctttgttgattggtgtctggcgacttggttgtgtggtggtccaccaactcacggacatcctcgttatcttcaatcagatcattgaatatatatttgttctattttaagatcattgagaatattttattccgagatccagattttaatcagatcatttcaagatttcacgtaatataaatcacaaataagtggaaaaaaactctataaaattatagtcacaagtggtagctagtaatgaaactttcatattggttgaaatacgtatcaattatattaattaagtcttttgacaaccatacgatatagctggtgcaagtgtgcaagattattctagattctggtcctaaataaaaaaatatttatctatttataaagatatgaaagtttaatagtacaaccatatatcattgagaaaatatgataatgtctaaattttcatactaaaatagtatacatcatggcctaatcttaaatcttaaatatgaaactaatttcattgtatatacattatttcatgttcttgttatgaaattaatcatctgaacattgacgtaaatttaataatatttaaaatgggaaacccccccagtaaaaaaaaaaaagatgattgaataatatagaaaatattgtttgtactaaaaatccaacaaaggtcgttaaaatttgtgtaattttcgtgttgcagttggaatatggagcagacgagtcgtacaaattagtggttccatctccagagaagccgtcttatgcacaacttgaggttagttggtaccattgaacacctaaccccagcttttgtcactttctctaactacttatatccataaagatttaaatgtaaattcagctttataaccataaaagaacctaactttgaagattttgttttctttaatagttgagttcgacatgcaatcaaattttcaccgtaaaatacatgtttcagaaaagaaaagaaaaaaaatgaaacacttctgttgtgttttgttttatgatctagtacttttgcagcttccttttaaatgtaatttttttttcacccactatagagacccatgtaacataggtagggacatgaaatggtgtactccacgtgagctgtattaaacatgatgggataattagtgtggtcatattttgttttttcctctataagaatacaaatgcttaagcacaagtcgttagctatttattatgtcaatatagagaaaggtacaaaattattgtgaaagataagtgtgattcccactagtgttggactgttgtgtttaatcaaatattatatgaaaagaaaaataatacaatctccattgatatttatgttaccacgcgtgcaggccaagagtgtttatggtgcattgcacggtctacaggtttgtgtttgctatttttccaatttggttatcattatagttaattaaagatttgagttactgaagaaaatgaaattattgtaa

SEQ ID NO: 7418 - DNA, 3000 bp, Unknown
  misc_feature (1)..( 3000): cDNA_ID_1817603_gDNA_ID_1621144_Annot_ID_56714 3000 nt of promoter + ATG
gatgaagaaattagatgaaacagttttacttcaagttttgagagatgggaaagagcatgagttccacattatggtaaaacccgtaagtcatttcttattatttagtataataattttatatatatcggtttaatttttggttcacattttttctgaacgacttcaaaactcgttttgtggtgaactattggatccaggtgccaccccttgttccagggcatcagtatgataagcttccaagttattacatcttcgcaggctttgtttttgtacctcttacacagccatacattgacagtactttgatttgcaattgtgcaattaaatatatgcctgaaaaggctggtgaacagcttgtcataatttcttaggttcgttatttgaactaagataaaaatatttggatgtttggttgtcatgaaggcattagacttactggatttgtcttcttggtgtaggtgttagctgacgacatcaatgcaggatacactgatttcaagaatttgaaggtaattaatgcatttcattgaacaactctttaatagaggctgcccaaaagcaccatgagttttcttagagaaaagaatctggaaccagaattaaacccaaaacactctttatttaaactgaaaataaggatatataagagtataaacttcccaaaatagaactatgttctcttccctcggcctaacccgcttgaaacctccaaagcactctctagcttggatgagtctcacaaaagaaacctcatgcttacttataatgaaacgtaaaaacaaaactctatgagaaaaataattatgaaaatggaaatcctaaataatttcctaaatcaagaaataagaagtattcgtatcaaagttcattccagctttgattataaagtattatgaccggaaatgaaaacaaaagagaatcatagtgttgcactcgtgagtgtctcgagaatgaggtctatggtttactaaaatgaccaaaaatatatatttatggtgaatttaggtaataaaagtgaatggagttcaagtggaaaatctaaaacatctaactgaattggtagagacatgctggaccgaggatttaagactggacttagaaaacgagaaggttgtggtcctcaactatgcaaatgctaaagaagctacttctttgatcttagaactgcatagaataccgtcggccaatgagtatgactaccagtggcagagctagaaaaaattattatgaggatcaattattagtttaaggtgagtcataggggtcagttgagaagaaccaagccaaattatgtcattatataccaattacataaagatgtaagtaagtatttttaaatgttatgggggtcaactgacctccttggttatgagttagctccgccactgatgactactagcatgacttgtttaagtatactgtatatagtttcaaagagaacatttagataatggctactagctctaagaaattgggaacttcattatgtgttcttgaagtgaaatcttgattctagaggttttactctactgtctgaatgagattacgaaactttactctgaaaaaactcattacgccattttgcataaaaagtttttttccacaattcagtaataaatcttgattgaacaattggtaaaatttacaattccggcacaaactcatgattatgcatgcagttccgttccggccacattatctctattagattcatatactgatatacaaatagtgtaataatgagctgtgattttaatgaagagacttgtttttcatgcgactttttttaatgtttttaaaacgtggtttcgttgaatacatgaaattaacacatggtttttttttttctaccgctaactaagctagagaaacttcgttcatctactgatctactaaataataaatttttggtgtctaaaaatatgtatatcatttttattcaagcttaagagtgtggccgttctatgaattccgctattccataatttagttatgatgttatgcggctattaatatgctataccaattaaatcaattctagatatacagtacactgataattaggaggttctggatcgagacttatacatctctttaggtctgttaatctaattgccactcgatcatctgacctctattactacataaaatgaccaaatcaattaatgataaggttggaatgatatgggttccatttctaggagatgtagggctttcagacttatattttttaccataaattttttttcgaaatccgttggaagaaatctcttctccaataaagattaatttaacatagtttgggaaaagatttcttccaacgaacgtcgaacccatcacggaagtcgaacttagcacctccacttgtagtggtgttttgatgttaaggttaatttatgatctattttgatgttttggtttagtttgttttagttttcacgaaaatatatttgttcctccggcttttggtttcgagggatgtcgtctttcaactcgtttggtgttgttttgggaagaatgtggatccctgctggctttatgtcaaggttgcaacgttaaataaaatcttttagagaaagaaaaatttagatgttaattttgttaagattaacacgtcaatggacatctacttaacattatgttaacttgaggctgttaattgggtaaaatatttcggcaggtttttttttggcagtaattcataaccgttataaaaaaaaaatgtatactaaattttatgtcctacaaataataaggaagctcatagcttttcatttggaaacaaaacatatctcatacagagtgcatcattaattaggaagttatggttttggaatttgaaaactttacatttaagaaacggaaacaaagcatatcttatatataccgaatttttcctttcctttttgggtaaattatgtaacatatataacctaaattatgtaacatatttatatacctattggtgtaactactctcaacgctcaaatccttcaaatg

SEQ ID NO: 7419 - DNA, 3000 bp, Unknown
  misc_feature (1)..( 3000): cDNA_ID_1817596_gDNA_ID_1621144_Annot_ID_56716 3000 nt of promoter + ATG
aagatctttcaagctgaaaaataccgcaagggagcgtgtcaaaagtatgtccttggctggatgctttaccttcagttttttgttttactatccattcccttgaatgtttgtatattttggagaaaccttggctatattgaaagtggaaaaacgattttcgttagttccattatctaacttgggcgatcttctttttgaagctgtggtgcaatgacgcatactgctaaagcttgtatggataggcctcgtaagattggggcgaagtacacaaacatgaacattgcacctgatgagaaaattgaaagttttgaacttgactacgatggcaagagggacagatggaatggttatgatccttcgacctaccatcgtgtgatagatctttatgaagcaaaagaggatgcacgaaagaagtacttgaaggagcagcaacttaagaaacttgaggagaaaaacaataatgaaaaaggtgatgatgcaaatagtgatggggaagaagacgaagatgacttaagggttgatgaagccaaggttgatgagagcaggcagatggattttgcaaaggttgaaaagcgtgttagaacaactggtggtggtagcacaggaacggttaggtatggactactcatcattcttcatctacaagatatcttatctcttttcacatattggctgtttgctttaacttgatgcactaatggtgtcatcctctcttaattcaggaatctgcgtatcagagaagacactgcaaaatacctgttgaacctcgatgtcaactcagctcattatgaccctaaaactcgttctatgcgtgaagacccacttccagatgcagatccaaatgacaagttttatctggtcagttgatgatcatcatggatcatgtggttgtatcatatcttttgatggtataaaataccaaccatctgttttacttgtatcatgtatgcagggagataatcaatatagaaatagtggccaagctttggagttcaaacagctaaacatccattcatgggaagcatttgacaagggacaggacatgcatatgcaagcggctccttcccaagctgaattgctctataagagctttcaggttgcaaaggagaaactgaaatctcagacaaaggacacaatcatggacaagtacgggaatgcagctacagaagatgaaattccaatggagcttttacttgggcaaagcgaaaggcaagttgagtatgaccgagcagggaggattataaaaggacaggtatggtttctgatggtttccttcttgagtcagttgcctgtagcattcttattgtgatatgaacagctatgatacgtttattttgtgtggatctgtttcattcttaacgtgtttgttgtgtacaggaggtgatattgccaaagagtaaatatgaagaagatgttcatgctaacaatcacactagtgtgtggggatcatattggaaagatcatcaatggggatataaatgttgccagcagatcattcgcaatagttactgcacaggttctgctggaattgaagctgcagaggctgcccttgatctgatgaaggctaatattgctcgcaaagaagcaactgaaggtctgtgtaagctctattccttatgtatttttggttgcatttaatggaaaaaatgctcctgaggaatgtctaaagaaacgtatttctgcatatgtaatgttgttttacaccatgtaacattggttttgtattttggtgatcagagagcccaaagaaggttgaagagaagagaatggcgtcatggggaactgatattcctgaagatttggagttgaacgaggaggcacttgctaatgctcttaaaaaggtaaagagtctcattcattctcttgcacagacgtttctttgtcctgcagttttatcttaagcacttgtgtttttttgttttgcacaggaggatctcagtaggagggaagagaaagatgagaggaaacgcaaatacaatgtcaaatacaacaacgatgtaatgatcatctaaaccaatcttaacactctaataacattttgtatcatattcttgatttagtgttgattaatcaaaatctctcatttcatcgcaggtgactccggaagagatggaagcttacagaatgaagagagttcaccatgaggatccaatgaaagatttcctctgaaagaagttggctttcattcccttttaccatgtaacctgaagaaacaagcttataatgttacttgtagtagtagtgttagtatgttgacattaaagctttgtggaagttttgctactactggtactaaaagctttttgttactgtcttaaagaaggcataatgtccaacatcgtctcttcttgactgaactttatctgattcgcttcttcattcgttactctatacgacagtttaatcacatatgtaggtactgcactcaagtaagatgttccatcgctgagtacactggcttgcccgcctgtggcgtatagggtcgagtatattagccaaaccaaaaaatttactagtgcatatgaaattaagaaccactcaatcaaaactaaactatggatcaacgtagtgattattttgcaaattagccaattaaccaacttacgaatatgaatttggattcagttttgttatcgtatgttttttttcacatatatgaattaagggtccaacgataagattacgaacgaacccacgaaccagagactaaaccaggaaaagcaacacgacaaagcgactatttaaaacaaaaataaaaatataatcgagctctggcaaagttaaaccctaattcccaaattggagtcacgaaagcaatctccaaatctatctcattcggttcgaagaagcttcaaaggcgattcctttgctttagctaactagtaattcatcgttttcatctttcgcctccacaatttccgtcaggcttctactcttttggtgtattgttgcggtgcttataacgtgatcccttcgtgattttcaggtagtttcgtcatg

SEQ ID NO: 7420 - DNA, 3000 bp, Unknown
  misc_feature (1)..( 3000): cDNA_ID_1839033_gDNA_ID_1621144_Annot_ID_56717 3000 nt of promoter + ATG
ttgagttcatgaagcctcatgacgcttttcagtttccaacattcatcaaggagagaatcatcaggttcatttggtaattttctctagcatgcagtaactcataacttacttaagtaacgttgtcttttttttcgatatggaaaaaataatagatatggaccaatttttcggacaagtttatttggagccaaagttataatctcgacggatattgaattaaatatggagatagcaaagacaaaccatgctcctggtctcacaaagagcatagcacaactctttggagaaaacaacttgttttttcagagcaaggagtctcataaacatgtccgaaacttgacattccagttgttaggttcacaaggtttgaaattgagtgtgatgcaagacatcgatctcttgactcgcacacacatggaagaaggagctaggagaggttgtcttgacgtcaaggaaatatcaagcaaggtaaagaaaagttatccatttcgtactcttgttgatattgcaatccactagatattggatgatctcaaatctttgtatatttaaacgttacagattttaattgaatgccttgcaaagaaagttaccggcgacatggaaccagaggcggcgaaagaactcgcactctgttggagatgttttccgagtggctggtttagattccctctcaatcttcctgggactggtgtttataaaatgatgaaagtaggtgtttttagtaaccttaattgtagtaatttttctacaaaattaatgatccaagccgtgaggatgatgtttcgttgcaggcaagaaagaggatgcttcacttactaaaggagacaatactgaagaagagagcatcaggagaggagttaggggagttcttcaagatcatctttgaaggagcggaaacaatgagcgtagacaatgcgatcgagtacatatacaccttatttctgcttgctaacgaaacaacaccacgtattcttgcagctacaataaagctcataagtgacaaccctaaagtcatgaaggagttgcatagagagcatgagggaattgtccggggtaagactgagaaggagaccagcataacatgggaagagtacaaatctatgacatttacccaaatggtgagtttaaatcaatataagattggctaatacatagtaagtagctcatagaaatatggttgtttgttttaggtgatcaatgagtcccttaggatcacaagcacggcgccaacagtatttagaatatttgatcatgagttccaagttggttcttataaaattccagctggttggatcttcatgggctatccaaacaatcatttcaatccaaaaacttacgatgaccctttagtattcaatccatggcgttgggaggtgaatgtcatatgatcttttacttatttactacaaatttagtaaacaaattcatagaaattttaaactaaatgtttagggaaaagacttgggcgcgatcgtctctcggacttacattccctttggtgctggctctagacaatgtgtaggagctgagtttgctaagctgcaaatggccatttttatccatcatttgtctagagacaggttcattttcattaactaatgattgtgattagattttatttttgcttgcagccaaagtttttacttacatgtaatataccttatatatggtttgaaggtggtcaatgaagataggaaccacaatacttcgaaactttgtactcatgtttccaaatggatgtgaggttcaattcttaaaagacactgaagtggataactcgagtggttcgaatcccgattgctgcaatggataaaaaccatcgatcttgttcttgaacgattattgcaaatgttaaatacttaaaagactagttggtaaagatgatttatcaaacgagtcatatgaggatttaagttttatgaaaaatttactggacttataagaattatgcttgtaataatgaaggataacatgcatatttttcctatgttgaacaaattgaaaatacattgttacctataaaaatggagattaaaagcaaacaaatcctcacctaaaacatgctttcttgacctctttaggctctggcaatttaacaagtagccgtttaggcctgtttagttttagacctgtttacatttttaagcttgcaagcttaggttggttcatatatgcccatttacattatattcaattaattggagaactttataccatggttttctctttctatggacatttttcaacccaatcaaaaaaaagaaaagtaaactgaaatctcttacttagaaaattgattctactatactatatccggttttaaatctggtccttgtttggtcttggggataataattagtggcgaaaacggcgtcgcttttgctttggttttgggttaaatgagtggtgtttgctaatgaatgggcctctacgccttttaacagcccatatttgatcacatttcaatctatcacatgattttaaccataataaagccgtagccatttcttcttcttcgttccttcagatttttcgcaacagagagagaagtcgaagcttcacgatcgtataataatggcgacggcttcaggtacccatttccttcaacatttcttctaattcatttgaaactggttttcaatttagctttaaatttcccttttggtggtaaaaaaatctcgatttcgaatcatactctcgtaattttgtatcattaattttaaggttcttactgttttggaagttgtattatcattgattttctctattttggttttacatccattttgttttacttacgagtctgattcaaatttttgctattcttattgatttgagactttctgtgattggtggttctctctctgttatggttttggttagattcaaattgtgattcttaagagtctgattcaaagttcactattcttattgatttggttctttgttagcaatcaattttcttaaagttctatccttttatctttctgacatatg

SEQ ID NO: 7421 - DNA, 3000 bp, Unknown; identical to SEQ ID NO: 7419
  misc_feature (1)..( 3000): cDNA_ID_1817596_gDNA_ID_1621144_Annot_ID_172973 3000 nt of promoter + ATG

SEQ ID NO: 7422 - DNA, 3000 bp, Unknown
  misc_feature (1)..( 3000): cDNA_ID_2990465_gDNA_ID_1621144_Annot_ID_172965 3000 nt of promoter + ATG
tagaggagccaatatacgtgttagccagtataacaatctgattcaggccgaccaaatatcatcaagatcactaattttgttcctcaaccaaatttccacaataagaaactcgatgtaaccattcaaaatccttcttctttcatcttaaaaagctacttaatctaacaacaaatctattcccaaactatgtaaacaaggaaaacagaaacttacaatagaacaacactcaccataagccgaaatggcaatggagagaaccggaccacgatgagcttgccatgacaaagcttcttcaataccatgatcacctctcaatctccaacacctaatcctcccatctctatgtccactccaaacaactctactaccttcatcaccaatcatacaaacaacagcagcagacccaaactcattccctaaactctccttatacggcgccgtatcctctacctctaatcccctcccacttccatacaattcactaaactcccaaactctcaacgcaccatcctcaccaccagtccataactgtctctcagtactagtcattgtcctcaaaaacctcccaatttgagtttctctcaatggatgaggtctcacatcaagactaggtggtcgattcggatgaaccgctgacctaatcggaactttgaagatcccagattcaccacacttaccaacaaattccggtaacgaatcggagccgtttccatcaccgatcccgtcgtgattaccgtcttcgcttagtctccggtcgagaaattggatcatgtaatcgatacgtttgttgctgtcgtcgacggaaggctgagattcatcgtcgccggaggaagatgaagaggagtaagctgaacggttgaaaagcgtggacggagttgcggcggagaaggaaggagagaagaaggagaaaacgtcatcgttttgatcgttttgacgatcttccatgagtattggacttgaagcttttacttggagcagagagagacgacgagtttttcggtacaaagcctctcgagatatttctctctcaagctaaatcgcagaaatgcttgaaacgtgttgtttcggatctctcgttttctttgtttttttcagacattcgaaattatttattttataacaacaaaatttgtacttgtaaattggtaaaaacaaacctttataacaaaaaaaaaagtagattggtaaaaagtaaaacttactgatgtcaaattctcttttttggattaacagtccagaaatctgtcacaaattctctgttttggattaatttttttagttcttaaaatcgtatgttaatatatgtcatttgattctctgttttatattactgttttggtctaattcttcttttccgttgttccctttcgattgttcaatgtgttggtttgattttggtttatgataacttacctcaaaaccaagagaatttggaagacaatttcaacaagctgtttgaacttcataaggtacaaaatatccctctcagcaatcgattactacctttttggatgatgtggaggatatggaaatcaaggaatgctttcctctttcaaaagaaaaactatgatcctgcaagtgaagcaagaaaaggtttctatgaagtttaggaatggatagatacgactgggataggttctgaagtaaatcatgattctctctcgccgtttggtcactcacatgagcatttccgtagtcggcaatggataccccctctcccagaatgggttaaatgtaattttgatagcggctatgtgcagggacgttcatttacaaatactggatggatagtcagagacaatagtggttaagttattcgatttggttgggcaaaacttcaggcagcaaattcggcgatacacgcggaggcactgtgatttctccacgctttacagatgatttggactcatggtttccggtgtattgtgtttgaaggagataacttggaactaataaagttggtaaatacaatgggagatcacaacgaaatagatacccttctctttgacattcggttttggatggataaactgccacagatatctttgcgacatgttaattgagaacggaatgcagcagcggatactatcgctaataaggcttgttctttaaatggtttgtatcaaactttcacaacaccaccacaatggttggttaactatctgtatcatccctttacaatctaatgaaagtctagatgttaaaaaaaaaaaacaagagaataaaaataaaatattggctattttaaaaatatttttaaatatacataaaactaatgtttatttttaaatatacataaaattagtgtttatgtagtatttcatatttttcttaaaataaaccgtaaattcaactaatattctaataccatattatataatattgatattttaatgaaatatacaattaaattaaattttaattaaattttcattgattttatgtttatgcatagagacatgttgtcaacacttgagagagtccctttatcaattaaagtttaacacaaatagcatagtcccctatatcaagatcacctgcaactaaccaaattctcaccaaaatcactaacaaatgaaacaaaaaggaaaaaaaaaaaaaacagcatcaatgttcatcttttcccctacatacatatatataaaatctaaaataaacacaattttattacataacatattaagattatatttattggatttcttcctctcttttttaagtgtgatttactgttgtctctaattctttcatcagcaaacaccgattacgtacaaaataatacattattaataacatttcttactcaaaaaaatgcgccaattcaaaggcttgtctaacgtgtgtatataatagtgttacttgcttgcctatactatatataaagagagagagacttctaagattctcctccatttttgctacatttttttttctttgattaaaaacatttttactatttttcgctttttgctatttccttgtaacttaaaagaagaaaaa

SEQ ID NO: 7423 - DNA, 3000 bp, Unknown; identical to SEQ ID NO: 7416
  misc_feature (1)..( 3000): cDNA_ID_3050424_gDNA_ID_1621144_Annot_ID_172964 3000 nt of promoter + ATG

SEQ ID NO: 7424 - DNA, 3000 bp, Unknown
  misc_feature (1)..( 3000): cDNA_ID_3050428_gDNA_ID_1621144_Annot_ID_172961 3000 nt of promoter + ATG
tcacataaacgagaaacactcgtcttaccaaactctctcctacacaaccaaaaccatctctttgcaacaaaacttgttgtaactcatcttcttcttcttcttctccatcacagactcataacaaatgggagaagtttcagtggtggagaacaagaaagtgatactaaagaattatgtagatggtattcctacagaaacagacatggaagtgaaactcggagaaacaattgagctaaaagcaccaaaaggatcttcttgtttcctcgtcaaaaatctatacttgtcttgtgatccttacatgagaggtcgtatgcgtgattttcacggttcctatctcccgccttttgttcctggccaagtatagattattcccacattttcaagttttcagcttttttgtttttttttgtcgattggttctgtaattggtcttttgggtatcggtttttgctcattggaaaatcaaattttgaagagggataggtaagtagagtttttgtgtgatagagagatttttgcacaccaagtgttcgacgttttgatggaacttgtgttagttgtgtatgtatctagaaatgttgcgaagtcttgagatttgtcttgtttattggtgaattgttcatatttgaagagagagagatgtgtagatgctgtatatatgctttagagagatcatgcacaccaagttttcgatgttttgacgaatggatatattatatgctgaggaaacttgagatttgttatattttattggtgaaattgttcatattcttcaatgactctttaatatgtttctttggttgacgtttcctttgttatatgctctgtattaagcgactgatagttttgtaatcttgatgcagcgtatcgaagggtttggtttagcaagagtgatagattctgatgatactaattataagcccggcgatatagtctctggtatcattggttgggaagaatacagtttgctacgtagttcagataacctacagttgagaaatattcagttagacgacgacattccgctttcttatcatctcggacttctcggtacggcccgtcttttgtttagcataagaggaaggtagcaattatttgtttgatctaaacagtctgaattcaccttttttacagggatggctggatttacagcatatgcagggtttaatgagatatgttgtcctaagaaaggggacagtgtttttgtctctgcagcatgtggagcagttggacaacttgttggtcagctagctaagttgcacggctgctatgttgttggtagcgccggtagtaagcaaaaggttagtctctaaactaattttagcaactcttgttactcacttgtcgttgtgaagtaactttttgtggacatattttaggttgagatccttaaaaacgagcttggatatgatgaagcctttaactacaaggaagaggctgatcttgatactgctttgaagaggtaaatatatgtcaagattcaacctaaagaatcaattacagagtagtgcttgtcttgaggttaatatggcttgtctctaggcttttgaatgttccataagtcttttaaagttcaccatcattcaactatatttacacattttatcaacactgtcactctagttagaacaaatgagacgcaatgcaattacaagataaatccataaaggtaatagtaagatactctgactatgtcacttaaactgatttcttgtggctagctctagggaatgagaaaggtatggtgcataatgtgagtctatacaaaaacgtgaagctgaactgtttcaatatctttactaaaacaggtacttcccggaggggatagatatctacttcgataacgtgggtggatccatgcttgatgcagcgctcctcaacatgaaggtacgtggaagaatcgcgctctgtggaatggtgtctttgcaaagcctctcaacttcatcacaaggaatcaagaacctatacagcgctatctacaaacgtttaaggttagaagggttcttgcagagcgattaccttcatatcttcccacagtttcttgaaaatgtcaagagatattacaaagaaggcaagattgtctacgtcgaagatatatctgaaggcctcgacctcgctcccgctgcacttgttgggctgttttccgggaaaaatatcggtaaacaggttgttcgggttgctaaagagtgattgtttctgaaagtatattgcaagtgatttaagaacatacattggatgaaataaagccacgttatgtataacatcttcttgtcgaagtcaatgtatgtataagtctcttatggaaaaacgttagttaagcaacaatgttttaaaagtcttcataactagaactagattaaattaagaattagtaagtcgattacgcaaagataatgaattcatgttgccatatatattcgacacattcattttgatttcacaacctacaatttatttcacaacaatattcttttaaaaaaatttgatctcaaaatacagaaatctcatgatgtcaaaagatttctatttcaaatttcatatatcaaaaactgacaatatttagacttttatgactacattaattgtagaaaatgtcatttaatcattcaaataacaaaagttgaaaaggttacaacttataatccccaagtctctttgacttcttcttcatcttcactctccaatcattcacttctttcgaaagtctttcataacctctcacttgacttgtatctaacgaagcttctttgattcaaaagtaagttttatatctcaaccgcctctatctcctcttttttttttgctagcgctttgttttgagatctctacagagtttgttttgtattggtattggtgaggatgacttatgcaaaacatgcagcctccttttgtttttttaatatattcattcatttcgtttactctatatactttataatcgagaattgttttttttcttttttttttctaacctttgtaatagtggtggtggcaaccatg

SEQ ID NO: 7425 - DNA, 3000 bp, Unknown
  misc_feature (1)..( 3000): cDNA_ID_3050432_gDNA_ID_1621144_Annot_ID_172959 3000 nt of promoter + ATG
gaaaataatacttagcatactgtgattaaagttgaaagtgataaattttatgtactattgtagtcgactggtttgttctatgcatccgcaagatatggaagcgcgacgccaattccaccatcagttgttagtcgtggtacttgttggctggttagtctagcaacaatttaatcgtcacttaaaacatattttttgaccgtttattaactatttatttcatcatctatatgaacatttatataaatatcttgtagggagttggagtattactcaatggcatgcttggaggcatcacagggatcacaacatcaacgtaaataaactcatctctaaattacaaatttttaatttttcgagcatttatcttaagtttctcttgtatatataaattgtagtaattaaaggctaatgatatagttttgatatgggtgtgacttaatattcagagaaaatgttggacttttggcaatgactaagattgggagtcgaagagtgatacaaatatcagctgcattcatgatttttttctccatttttggtaattttcttgttttgtttttactaataatctacatcttcctatttacaatgtctaaatgatttcgttgaatatcttttactggttttgtaacttatttattttgatcaaaatacaggaaaatttggagcgttttttgcgtccataccattaccaatcatggcatctctttattgcatcgtcttgtgttttgtgtgtaagtctttttcatcacatcacatttgtagtatagcattttcgataaatatatgttttatttttttcactaaaataaaatcaaattcaatatataatgcagcttctgtgggacttagctatctacaattctgcaacctcaatagcttcaacatcaaattcattctcggattttcctttttcatggctatttcaatcccacaatacttcagagaatactacaatggagggtggcggtctgatcatcactcaaattgggtaagcacatcttattctatactttgagacaaattgtttaaatcgcaaacgccttttttgcaacttatcaaattgagattccttttatgtgtgtgcacaaaacagttggaagatatgataagagtgatattcatgtcacatacaacggttgcggcaataattgcgatagtgcttgattgcacattgtgtcgtgacagcgatgaagccaagaaagattgcggaatgaaatggtgggataagtttcgactttacaatcttgacgtgcgaaacgatgagttttacggtctaccttgccgcctcaacaaattcttcccttctcattgaaactttcacaaatttctttctattcttttgtctttttgaatgttttctttcttctttatttatgtctatctagaagtttagagtgctaatatattttattacaatttacttatcttgttacatatatgtcttcaaatggtttcttaagaaactttcatattttgttcgataatttctaaataagaaagttattaaacgctatttagaagttttagtattgcatggagcttaaattgtttgaattatttaaactgtaattcctaatgttttttcaattttatatatttatatagttaatttaaccaactgcttatatccaaagatgcatagatggtttttcataatgtaattactgaagacgaatcttaacatattatatcaagtaaaatctttcttagaaacaaaatcaaattccatttaacaaaaccgctttggagctactaaaaagtcagaattccatcaaaattggtaaaatgttcccatagatatacacatttttctctaaatatcatccacgaataaaacagaatagaagatcaaacacttgtgtcaagactcaggattagaaccagcaccacctaccttcttattagccattatgttcttaagaatctgcagaaataaacaaaaacttgaacatttcgacagattcgtaatcataaccgttaaaactacactgtgacagtctcttaaatcacgatgatcttaatgaatctcaaactgaagcaaatcattgatgagtgatttaacaaaaaagaatggtgagagagacatatacatgtgacatgtcgaagcatttgattttcattctacaaagttgaagtttgttcctgcattttcttgataaaattctcaaacaaaaaattactaagtgcttttcattacctacctttggaaattgttgactatgatgattagtggctagactgactttttaatattgcttattgatcatttgaatgcttttggaaaatgatgatgattagttgattagtaaaacgattaatttcatggaaatgaagaagtcttgttaatgtttagcgttagaagttcttttgctgcaaagtaaatggtaaaaagcattattcaaaaaacaaaagtaattgggtaatactgtaatagttctacggtagagaatccgaagcagtatttgtatatccggacccgacccgattcgacccgacccgaaacaaaacggtcaaaatcagcagaaacacgttgaatcttcttcttcttcttcttcttcttcggctcagtgacgacgacgattcttttgacggtctttttctcaaagtattttggattgtcttccacgttttgatcgatcctttcctctccactcctcctcttctctgtagatgtaagtcttctccattttcgtcatccaaatttaagtctctcgtttctgttatcatctcaatttcgtcgcaatcaatctcaatcgtgtttcagattcattgaatcgactgcaaattttgtaattcaggtttagaaattgaatttaggacttgagagagcttagtgatcttctacaacgaactaatccatttgaaaaatctgaatcattcatgttttcttttgtcttttgtgaaatgatctatcagatttttcatacaatcactgtgcagattggtatgtagctggtatatatatactgtatatagctacacaattactgcaatatg

SEQ ID NO: 7426 - DNA, 3000 bp, Unknown
  misc_feature (1)..( 3000): cDNA_ID_2124777_gDNA_ID_1621144_Annot_ID_172948 3000 nt of promoter + ATG
tcccacgtaggtcactaaactccctttgatcgactttctgaatgctccattatagtgtcattaaagtttagttccattgagtaaagccatgtaccctccaagaagattcgaagtcacacagtcacacatgccttccagatgatccaaccagtatttgttacgtttttcgttggattctcaaaacagtacaagacaacattcaattcccgacgtctataaatgtcgttaatccattgttaaataatttaacaacgaagtaaccacaatcaattaagcatcgttagttgtttaactaaactagtttttcgtacttaagagtcgttcgtagttaaagacgtttaacccgtcgttaaattaatgatgcacgtatataagttttaccaacgtttatgtcaatgttaatttaccacattttggcgtcgcaaaatgacaattaaataaatcattgcaaattcataaagttttgcttaatgatatctactatttagcgacatatatgtttttttatagctaccacttatttttgttttcaaggacaacccctaacaacactctgtatgactgtatgtgattctgtaagatctcatgatctcatatcaaacttttttttttacatgtgatgaattctattattaaaatggaacaattatttacaattggttgggggcaaggagcttttatggccaaataaatgtaatcaccttagagaattagtacaaagaaacttgagtttactaagtgtgggaaaaccattaagagagcagatgtctacaaaccttttcgatatcatctagctagagaggaatgtctctgatgcttatgccaatctgccgaaagaccgctgtagaagttactgagacattgttgtgcaacctaatgtttctttctttccacatcaggaagataaaatttgtaatgactatgttcaatgattacaaaaataagaagagacatatttacatacatgagaaaaagaagattttcctggtttatttttgggatgaaatctcaatgtgtacgaatatttagttgtttgattaaaataaagatttctaattaagagaggaaattaacaataggctaatgatgatgtcttaatcttttttttttttttttttttgatgatgtcttattgttatgctggatgagttgggggactgcaaggtggcttcttataaggttcctttttctggggtcccctttttgacttgcttcgctttactcttgctttcatttggacaacaatttcattgctcctattttcatctccttctctattccctaatttatgttttagatgaatcaaacaaagcaaaaaagaattatgaatctttcatacaaaagaatcttcacataataacatccgaatattgtatgatctaactaaacctaaaattggttaacatacttagtctatgttattggttccggatcaagcaacgtaatgaaaacgaacgtgttaaaatgttttgactcaccgagcttccgatgctttggttgtttggtcgatatagcttttacttctccgaagaagaaagaagacaaaaggagcagagctgcgatgagaatcacgaagaatggtgcctttcctgtcattgtatatcttactgtccaaaaagcctataattttctaacttgttccatctatttatatagttaaaaatatccacctacccaacttgatttcacactaaaatgttgaaagaaattaaatctggcacataattgaaaactgttacttgattacatgtcctgtttgttatttttttttgttgtttcaatattcattttagatcttttcttactctgaacataataaaataaaatagaagatattttcttactgaaatatataattttgagatgcaaggtatactataaatagagaaaaaggtactgaaaatgttaaatttcttgattccgtactttttattttatttgatataaaaagaaagttgactttaatagagaaagatcataggaaattacacgaaggtttggcaaacaagtcatggtagagaaagtcaactagacgaatagttttgattgacaaattaaattaaagcctcactacagctgttgccatttcctcatatattcctagaaaaaatgttcaccttcacatgtgagtgcaccttatttcccggcaaaaagctctactacagtcacaacgacgaattcatttgagctctgatatacaatagccaccttactgcaaaactagacccaataaaccctaaagaacctctctattatttttttcgggcaaaaaccctagatacagcctagataagttcaatagattagatacatatacctagaaaaaaaatatcttataagaagagcgaaatatggaaattaaaggatgcgttaaatggtgttacttgatggaaataacaataattaaaacttgtggcggcacttttttgtaccttaattatatgcatctttaaggccttttgtcagtgattatgcatgtgataacatataggctatagaaggtggtatgctttattttgagatagggttagggttttaagatccctaacttaattatgtattaaaactgctcacacttagtgataaatgtgtcaactttctctcacgtggtggttttttttttttgtgactctgtttagctggtcttggtaatgtcattttatgcgtgtattgcatatttagtttataggtaaaaaattgtttattgcgtttcacatttaatgatgtttagtttcagtttgatttcacatgttgctctttggcttcagatttgtagtttcattttcacttacacttagcttgctttgattcgatttgctatattgttcactcactcttgtttcaaaattgttcatttttagtacatattcgacgaattctccggtgtggtatgagagagtcttagcttgttttgtgtttttttttaattagcacatgtcttctaactcatgttctgtttttaattagcgtcatgatgtcaaaagattcttgcttaaacgt

SEQ ID NO: 7427 - DNA, 3000 bp, Unknown
  misc_feature (1)..( 3000): cDNA_ID_3088608_gDNA_ID_1621145_Annot_ID_56722 3000 nt of promoter + ATG
ttactatgttgatgtttaattgtaaggtgtattgtaaagatgtgacactaagtttaattcatagtagaaggacgaaagtgaggaaaatggagaagaaagaaagtgaggaagaagaagaagagtatagtgaagaagcggatgttgaaagtaacaataacaacgtcaataaaaaattggcaatgaagatgactgaatacaagaataagaaacctatgaatgtgaagagaaatatgaaaacgttggtgttatcggccaattgaacaattcgcattattgaaaacaaaaatgatacagtagtacttttgcattatgaatgtttttaaagtaacataaaggaaacttaaaaaaaacatttctgttaaatagatagaaaaagttatacaataatacttttgcattattaatttattatcattatcatatatcaatgtatagctaattagctactgaaatgattactatgcaaaatatatattgaaataatcgataacatcaaagcatagtagcggtggtaaataacctagtatttttaaaaattgacaataaaaaaggtattctttaaaaaagacatagtaaaagagtatttttattaatactgaaatgtatatatagatttcatatctttatatagttgtttttcgtctaaccactatataaagatatgaaatctatatatacatttttgcattacttttttgaagataatgtttgaaatctgagctttaattcattaattaattcaaatgggtgggttttaccctgtttaattctgttcggatcctaaattacagaagtttaaggaataatgttatttgtatccaggatttaagaagtttaaggaatatgctaagtttaaaggaatataatctaataactttcagaagcataataaactgtaatccaaagtcgagccaaatttaaaagaatattatctaacttcaaatattttcgaatattttctgttatatgatctttcaaaattcttgcaatctctacaattatgcatcaaacaacctttgaatcctaatatcccgaaacaataattcgctcaatgacatcaatataatctcaaaatattgcagtttaaccaattaaggttaaaatcctttacaaacattacgtttccctcctaatacatcatatgatctaatattcctatattccaatttttcagtagatattctcatacttgcaggttacagaaaatctcaacaattactgtcattaacataattagctcatgaatctataattttaaaacgcaataagattttattccatttcagttagtaagtagaatattttcttatcattcctcactaattcgtaagtctaatgtgtaccagtatgtatataggtattgtgacctactcatttcaccatcattcacctcctctaatagttttttagctgccacatttgcataccttactgatgtccaaccttacaagacgtcctcgagagtgcaggtaaagactcttcatgcttggcgtcaatacacaagcaacataggtgaaacacttgaagttctgttctctgaagaaaatgcaagaaacaattacaacagttatatgttcgtttctaatcatgatatatagatagcatgtctacaatattaatattctgtttctttaatgcatggcaaaaacattcattgtaccgtgtggaaagatttggtgagcaagtacgctcacatgctaaccattggaaattgggtttttgttgagacttttagtctcaactatgccaatggaggttttcgcccaacgtcccatctctacaagatttcctttgtcaatggaacttcaataattccaagtcccccaaagtcaaattccaactatctgactttagccagttttcaaaagatccaaactagggagcttaatcccaccatgttggttggtaagttttcgttgtataacactaataactgttttttgaattaagttatgattcacagtatggatcttgattttatgtagatgtaatcagtcatattgtaattattggtgagttagaagaacttgaggcaagtaataaattcacaaccaaaattgattttgatatcagagatgaagcgtgagtttactcttctaaattttcgtactatatccaacaatttatcttatagtaattgttttagtaaattttaaaactaacattaaagttaactattataatgatgagcgcattggatttaccttgtggggtgcatttgctgaagaagtttatagatggtgtaacgaagctggtgctcgacctgttgtttgtgtgcttaggtttgtgaaaatcaaatcatacaaaggtaaactcaccaatccgttgtcttattttagatttgtataatgcaaaaatattaacacgtaaacattattctaatggcaggtgtacggaatttgtctaacgcttttgatgcatcaaaagtttttgtgaatcctcaatttcctgagatcgatgctttcctgaggacgtaagtttagtaatatgattctcaaaaaggatatctttatatgtaacacgtttgaattattaacaattgtcttttctaaattgactaccatctgatggtatactcttgacgtaccttgagagaatcccaaggatggagattgttgtttttaaaaagagtgatagtcgtcttgagtatccctcaaacacaattcttgtactccttaattctgttgatgtatgttttatatataacctaattgtctttatatgcacttaatctataatatatactcatttatgctaatacattgtatttactatatgtttgtatatatttaggttgggaaggcaaggttgatgtgtaatacatacgtaattgatatggattgggcttggtattacattagctgtcgttcttgcattaagaaagtcacacatatccattctggagtgatggtgtgaacaacaaaagaaaaaaaaaacagatgtgacacttgcaaaaatgtcgtcactaatatgattgctaggtacatgctttatgctaaa

SEQ ID NO: 7428 - DNA, 3000 bp, Unknown
  misc_feature (1)..( 3000): cDNA_ID_3050474_gDNA_ID_1621145_Annot_ID_173003 3000 nt of promoter + ATG
agagtgatcgtcgataagaacaaagatatacctattttgtgctgctgtcataggtgtgataggtccgcagagatccgcatgtatgagttcaagtagtcgtgaggctcgaaaagaagtagcttgagggaatattcttcttacttatttcccaagcgaacatgaggccaatgtttccttttcgactgtgatctttggtaacccgacaactaactctttgttcatcattcacctcatagtgtttaacccaacatgtcctaaccttgagtgccatattgatgaatcgtcgataagatttagttgtaaacacttcttagcttcggtttccatggtaactttgtaaagccgattctttgaccttatcgctttcaccaacaactttccatcacgatcatacaatgttagatagttttctttcatcctcacatcgcatcctgctttggtggcttgaccacgacttatgatattgctctttagatccggtatgtagtacacttctacttacaaagagtattgagcccttccctttgatatcaatacgagagttatctccaaatctcactttccctgtgattgactcgtcgattttagagaaataagaacggttttctgtcatgtgattccttgccccgttgtcaagataccacacattatctccatctgattgtgtttcaaaagtttgacattcttttcatttaaatagactacctcatgtatcatgagctcatccgcttcttgagtttcttcttcttgtttgcacatgcttcttgaagcttaagtaatctatctggacaattagaagcataatgccctatcttatcacacctgtaacacatgatctttgacttatctcttgtattacgaccacgtcctcttcctcttccaccaaatcgtcctctttgacctcttcctctactagcagttatcttgataggattgtgaattagtattaacttacatgagttttcttatgtcatcttgctcatctcctacatcaccaacttattcttcatatactttcatacggcccacaatatcctcaaatcttgtattattaaggtcaagaacttgtttgtatatatctctttcttggcaaaccgttaagaaatttcttaacgagtcttggtacttcaatctcaactcctagttccgcagattttgtagagagttccgaaagtcttccaacgaagttatcaatatgttctttccttcatctttattttctcaaactctgccatcaaggtttgtaaccttgcttctttgaccctctccactcctacatgtcgagtttttattgattcccatactttttttgttgtattaagattcccgacttgtagtgtcaaagtctctggtataggttgcaatatgaaacccctagccatgagattcttgtcaacatcatcagatcctggatttattacctcccacaccttatgtatactaagcgtaatctccatacgtatggcccaacccgtgtagttcgtagcattgagcataggacatgttattgatgatgagatattctcctttggttttgccacaactatgtcacccatgtttctagcttgaaacgttgatctctactaacaaatctgcaattgcactcaccaagaacccggtgtttcacggacgaagtaagcatatacacaaaaggtatcattttattcgtgagtttgtgacgaatgaacaagtggaggtagagcacgttcctagaaaaagaccaaaggcagatattctaaccaaggctctaggaaggatcaagtttaaagaaatgagggagctagttggagttcaagatgtgtcgaagtatggcttcaaacttaagagggtgaatgttgggttaagtttgaatatgacttgagcactaagtcattaaatccttgagagattaggactagaatatctaggagtgatctagaaaatatttaggagttatctaaatatacttctattaagattatgattgtttaagagatctctatataaggagatgtaagtatgttgcgtaacttatgagttgagagaattaagaacaagagagtttaagttttgagtagttttcttaaactaattaagaaagttattctttaatctttgtgttcttgacaatttcaaactataaattttaattgaatcaatttaattcgatatggctaatattctaatattgatgatgttaaaaacagaaaagaatgatgatttaatttactgtattatactgtgtggttaatggtatttttaatttatattaatattgattcaaataaccccccctcccccccggctataataactatctcgtgatatataataaaatattaaatgttgaagaacttaaaattttaactcataattattcatatgagtttctttaaagacttttacctataaaattaggacctactatatatattaacttggcacagaagttgccaaaaaaaattaaacgagatagttctattctaattctgcctatgttttcacgtccaacgatccggtgaaccgattaaaccggccagctatgtgttttgaaattctcatttgattttggaataaaatataaggttttaaactttattcagttatttttataactttttcagtaaactcatttgatgttttagatttagtgaaaacctcacaatgccagtcttaaaagaattatcaaatatgtattggtacaatgacccggtttaccggtttatctatttttgtcttggttaagtagattgtatttgaggatcaaaccttgtttcctttattgtcaatgaagcatatttctaatctaaggtaaagtttgttagatctaaaatggtattagagcttttcccagcttcattcatcttcttctgcaaattttcttctattctctgataatttctcttgattctcttttgtttctcaatctttgtttcattctctatcgtttgatcggagaatttctttgatcgcgtttcattccgatcattttttcattttctggttttgttactcttcgcg

SEQ ID NO: 7429 - DNA, 3000 bp, Unknown
  misc_feature (1)..( 3000): cDNA_ID_3088608_gDNA_ID_1621145_Annot_ID_172993 3000 nt of promoter + ATG
aaatcataagattctgtgtgaattttgtgattgaatcttagatcgacggattatgaaatttttttgggttcgaatgatttttgtttttacagacaacgtttgttgaccatcgaatatctgtatattaatatacaaaactgcataagcaattcaagatatagttctggccgatattaacaaaaaatttggcccatattacaataaaacatttttattgtaatcttatgagctgtggattatatctactttatataatcttatgagctgtgaaatatgtctttgtgtataaaattttagatggttaatgttgttttgtaaaagtttaggtgttacaaaaggaaaaatgacaatcatcattggtcaatattggttaacaatcggaagaccataattcaatgtttttttccttttacttttggggttttctacaactttctattagttatacaagtagtttaaaaaatttatagcattaaagaatttgattcgaaaaggttcaatatgtgtggaagttaaaccatgtatatgtgtgaaagtatcaataattgagtgaagatggtggcaacgctgatcttaaaacgcacaaatcttatgagaaaaaacaacaatgctgttattagaggttgcaggagatttgtttggaacaaattatttgctactctaaaataaattattttgaatggttattcagtagttttgacgaatgcaacatcaatttcttgtgtccaaaaagtaacacggtctaataacataaggaagtggtggtggcggcgggagttgagtgaacttacatgtgaaaccgtgcaagaaagctctcatgggaaaaatgtctagaccaataagttaaagttgtttacgttaaactctatgtggaacaactatgactaatgaggtaaaattttgtttggttcatttttttaaaactcttgttgtatatattttagctagatgatacatggccgggcaaaaggtatgggaacttgtgttgaaattgtgaaaaacaattgttctttttggaatacaatttcaataaaaacaggaattggtgagacgtaggataggtgataagtttaattgatgataatttctttacattatgaacagttgatgtcataatataggtaataaatagatttgctttccgtgtaaaaactgaagaagaacaagagaaatgtggatagattgcgacaagattaatagagggaacgagccattgtagtgaaaaaaaaaacgtttgattgtgacaccataagacaaacctggattatcagttaaggaaaagaaaagtgagaaaatagttatgtaatctcttaaaggcaacgtttggatcttgtatagttgaaatttaaatacgaggtttatggtattactatgttgatgtttaattgtaaggtgtattgtaaagatgtgacactaagtttaattcatagtagaaggacgaaagtgaggaaaatggagaagaaagaaagtgaggaagaagaagaagagtatagtgaagaagcggatgttgaaagtaacaataacaacgtcaataaaaaattggcaatgaagatgactgaatacaagaataagaaacctatgaatgtgaagagaaatatgaaaacgttggtgttatcggccaattgaacaattcgcattattgaaaacaaaaatgatacagtagtacttttgcattatgaatgtttttaaagtaacataaaggaaacttaaaaaaaacatttctgttaaatagatagaaaaagttatacaataatacttttgcattattaatttattatcattatcatatatcaatgtatagctaattagctactgaaatgattactatgcaaaatatatattgaaataatcgataacatcaaagcatagtagcggtggtaaataacctagtatttttaaaaattgacaataaaaaaggtattctttaaaaaagacatagtaaaagagtatttttattaatactgaaatgtatatatagatttcatatctttatatagttgtttttcgtctaaccactatataaagatatgaaatctatatatacatttttgcattacttttttgaagataatgtttgaaatctgagctttaattcattaattaattcaaatgggtgggttttaccctgtttaattctgttcggatcctaaattacagaagtttaaggaataatgttatttgtatccaggatttaagaagtttaaggaatatgctaagtttaaaggaatataatctaataactttcagaagcataataaactgtaatccaaagtcgagccaaatttaaaagaatattatctaacttcaaatattttcgaatattttctgttatatgatctttcaaaattcttgcaatctctacaattatgcatcaaacaacctttgaatcctaatatcccgaaacaataattcgctcaatgacatcaatataatctcaaaatattgcagtttaaccaattaaggttaaaatcctttacaaacattacgtttccctcctaatacatcatatgatctaatattcctatattccaatttttcagtagatattctcatacttgcaggttacagaaaatctcaacaattactgtcattaacataattagctcatgaatctataattttaaaacgcaataagattttattccatttcagttagtaagtagaatattttcttatcattcctcactaattcgtaagtctaatgtgtaccagtatgtatataggtattgtgacctactcatttcaccatcattcacctcctctaatagttttttagctgccacatttgcataccttactgatgtccaaccttacaagacgtcctcgagagtgcaggtaaagactcttcatgcttggcgtcaatacacaagcaacataggtgaaacacttgaagttctgttctctgaagaaaatgcaagaaacaattacaacagttatatgttcgtttctaatcatgatatatagatagcatgtctacaatattaatattctgtttcttta

SEQ ID NO: 7430 - DNA, 3000 bp, Unknown
  misc_feature (1)..( 3000): cDNA_ID_1817681_gDNA_ID_1621145_Annot_ID_56723 3000 nt of promoter + ATG
gtatgtcgttaaagcaagatagactacgagtcaaaaaatgttgctttcaagataaaggataatatataattatttgatatacaatatatattttatatatgattgatatatagattggtttatacgacttcttttgtagggggaatgaaatattatgtgttgccgttggcaagtattgtgaggattttgtaaacaagtggttttggagaatcagtttttgatcacctagaattacgagcccattgttgctgtcttgcaattttggagaatcagaaattatcatggtatttctttttctgatcaagtggacttggaatatatcatagtagaatgacctatgtgtttgagaatgtgcctattttcttctaggatctaatgtcataatgattgaacatggattttcacggctttttattgatcctaagttcaatgatcttgatataccatcctatatgtaagtgtcaattaaccgatattaaggtttttttaaaaaaaaattaactttgtagagttaattgttcacacattactcgcagtcgtggattccctgatcaagaagacgaagaggatgatttcatgatggagatcgttgaagagaactgaaattgcggtatactttaggatataattttctcagccgatgaaacttatgctctatttatgttttgaatttatatattaaggatcctaaaatttttattaatgttttaatacttaagttccaatttttaaatctgttgttttttatgtttaagaagggattagctaaacaatatgcatcattacttaactagcaaggattagctaaagtacacatcttatactatagaagatattaatacataccttttaagaagtactagaatcgatgataaagagttcattcttgatgtcatagtagaataatgtccttatcaacaaaacaattgaaagtaaacaattaaggaaaataattaattggttcaggatttgcaaatcaaatcttattgagaatcctataatatacattggttttatcttccatttagaaattatatagattactaggtttgatcgatattttgttaacaagtctcaacacaacatcatcatcgatgctactttgattttcaatcataaaaaaaatatgcaaattctcttttagattataattttggcccaaaatcaccgaagaggttgcgtgttactgaaacactaacccctcaaagtcaaattattcaatctaccgtaactaataacaattgttttgttcctcttaaatctgtttttgatagattgtttaaagatataagtaatatcccttcaaggagatatgaaaagagagtttgatcatcttctcacaatcagattttgggaatggaacaccacatttcatgggtatatttctaattcaccattctttttctactaatgtttatgcaactttatatacgtatagagttgtttggcagagagtggactcacaacattttcaaacaaggagaatgaccgacaaaggcaaagacactctgcttcagtattacaagacatcaacaacgtttatcatcaattctcacacctcttacacatccacacactttctcttattctgcaattaatagttcaacaggttagtttgacttcttcgagagccattcaatggaactgtaacattttatgtatagattataattaacaaaataaatatcatattctatgcaaagaaaaatttatggacatcctaattcatgtattaccaatcagccacgatcaattattaattttccatctagcaactttcatatcagaaacctacaagaagacttcagaaatgcttctctaactcctactgataaaggtaatatactaaaatattcatcattgaactatatgtttatggataataaacagtcccacacactttttcttattttacaattaataggcaaagctccaatgtgtacgcaaccagcctacaatgataatagcactgatgacgaaagcatgtaacatcttcaacgacaatatataactgacaatgaaactgatagtgaacaaaattactatcttagtgcttaagaggacgattgttctaaagagaattttgttctatcttactatcttacttaataacattcctaaaaaatgtggagacgaatattggtttcgctgacgaaaaatgtcgaattaatattttcacctgaagatactcttattgaatgtggagaaatagaacaaacagttccctctgtttcacaaccgaaaaagagaggcacaccatttggaaaacaacaaagtaaaaaggcagtagagaaaggtacaaaaataggtaaattttatagttaaaatcagcttatagctttctttaatatcattgtagttggttttcttatgtttaacttctacatgggataaaagctaaaaaaatttatactttattcgttctatttttctaaataatagtgtcgccaaacaatcttgttttagagccaaaaaagagaggtcgtcctaagcgaaaacatccaactaaaaaaggagcagctttagccaataaaattggtaagtgtcataacttttatttgaatattgtgttcttcagtttttaacattgattaaatctgaatactttgttattctctattgactgataagcagtttaaaacctgcaaatggtgattatgctaaatattcacaactttatattgtggatactaaaaatgaagttgataaaaaagctaatgttattgggtactcctcaaaccaatctacctatgttacatctaattaaataatgcgatattgttacatgtttgataagcatatctaactaatatttttttactcattgtagaaagggaaataatgcaacctcaacaacagccgagaaaaatctgaacaagcaactcattgatgttattattaagatattcaaccaagttaacccatatgtaaaaaaaatcagatatgctagagagaggattgagtctactaatgatgaaccgtttcatatgcgaattaatg

SEQ ID NO: 7431 - DNA, 3000 bp, Unknown
  misc_feature (1)..( 3000): cDNA_ID_1817677_gDNA_ID_1621145_Annot_ID_56724 3000 nt of promoter + ATG
gtgaagcagcaagaacaagcataaggcgaatggtttcttttcttgctaccggagtgaagacttcgtcataatctattccatgtctttgtatgtaacattttgctacaaccttgctttatgcttgttaatactaccatcagaattttgctttagtttaaacacccactttagtcctatagccttgactccgactggaagttctactaggtcccatgttttatttttggtaatagacatgatttcttctacacgagtctctccatacctttagctcttttgcttcaatgtaatcccatggttcttcactgattgtcatcaagagtttttcgacttcaagttcagcaaacaaaatatagtcatcttgatgattaggtctatgacgttgtctctctgatctccttaagatgacctcattagtctgttcatcttgatcgttatcgtttggaatgtcttcttcctcttcaactgaaccctcgttattctcatcggctccgttctcctctgtttcttgtactgagtcctcattttcaataccattgtttccaaagctgactttaaacgttcatgggctctcacttgtctcgttttttgtctcattccaagaccagtttttactctcatcaaaaacgacatccctactcacaataattctccgcctagatggatccaacaagcgataagctttagagccaggttctgttcccagatgaactaaccttctcgacctgtcatctagcttctttaactgtggactctcagtctatgcatatccgatacacccgaacacacgtaaatgttcaatatttggccttcttcccttgaatacctcatatggagtttgtttaaccagtgatcttattgcgactctattaaaaagattggtagcatgcctcactggttctccccatagatagtttggtacatccatgtgcttcatgatgcttatggtcatctctagcaaatttctattcctcctttcaacaactccgttttgttgtggtgagtaaggtgcagttatgtgtcttgtgattctggatttatcacaaatatcttgtgattccggatttatcacaaaaatcttgaaattcatgtgaagtgaactcaccacctctatctatacgaagtgttttgatctttgctcctgtttcttcttcaactagtgctttaaattttttgaatttgtcgaatgattgactcttttccttcaatagcactgtccacatataacgagagtgatcgtcgataagaacaaagatatacctattttgtgctgctgtcataggtgtgataggtccgcagagatccgcatgtatgagttcaagtagtcgtgaggctcgaaaagaagtagcttgagggaatattcttcttacttatttcccaagcgaacatgaggccaatgtttccttttcgactgtgatctttggtaacccgacaactaactctttgttcatcattcacctcatagtgtttaacccaacatgtcctaaccttgagtgccatattgatgaatcgtcgataagatttagttgtaaacacttcttagcttcggtttccatggtaactttgtaaagccgattctttgaccttatcgctttcaccaacaactttccatcacgatcatacaatgttagatagttttctttcatcctcacatcgcatcctgctttggtggcttgaccacgacttatgatattgctctttagatccggtatgtagtacacttctacttacaaagagtattgagcccttccctttgatatcaatacgagagttatctccaaatctcactttccctgtgattgactcgtcgattttagagaaataagaacggttttctgtcatgtgattccttgccccgttgtcaagataccacacattatctccatctgattgtgtttcaaaagtttgacattcttttcatttaaatagactacctcatgtatcatgagctcatccgcttcttgagtttcttcttcttgtttgcacatgcttcttgaagcttaagtaatctatctggacaattagaagcataatgccctatcttatcacacctgtaacacatgatctttgacttatctcttgtattacgaccacgtcctcttcctcttccaccaaatcgtcctctttgacctcttcctctactagcagttatcttgataggattgtgaattagtattaacttacatgagttttcttatgtcatcttgctcatctcctacatcaccaacttattcttcatatactttcatacggcccacaatatcctcaaatcttgtattattaaggtcaagaacttgtttgtatatatctctttcttggcaaaccgttaagaaatttcttaacgagtcttggtacttcaatctcaactcctagttccgcagattttgtagagagttccgaaagtcttccaacgaagttatcaatatgttctttccttcatctttattttctcaaactctgccatcaaggtttgtaaccttgcttctttgaccctctccactcctacatgtcgagtttttattgattcccatactttttttgttgtattaagattcccgacttgtagtgtcaaagtctctggtataggttgcaatatgaaacccctagccatgagattcttgtcaacatcatcagatcctggatttattacctcccacaccttatgtatactaagcgtaatctccatacgtatggcccaacccgtgtagttcgtagcattgagcataggacatgttattgatgatgagatattctcctttggttttgccacaactatgtcacccatgtttctagcttgaaacgttgatctctactaacaaatctgcaattgcactcaccaagaacccggtgtttcacggacgaagtaagcatatacacaaaaggtatcattttattcgtgagtttgtgacgaatgaacaagtggaggtagagcacgttcctagaaaaagaccaaaggcagatattctaaccaaggctctaggaaggatcaagtttaaagaa

SEQ ID NO: 7432 - DNA, 3000 bp, Unknown
  misc_feature (1)..( 3000): cDNA_ID_1817666_gDNA_ID_1621145_Annot_ID_56727 3000 nt of promoter + ATG
agttttaaaatacaagtccaagtttgattttatatacaaaacatctcaaaatattatataaatgatcataaattcaagggaagaatgtgtccagaaatcgttgtccacataggtatgttcatttaactctgttaagatgatcttctcgattgaattttgagataaaaaggtaaagaagaacgtgtccataaatcgttgtccacagaggtctgttcatttaactctgttaagatgatcttctcaattggattttgaagttttaaaatacaagtccaagtttgattttatatacaaaacatctcaaaatataacatagatgatcaaaaattcaagggaagaacgtgtccagaagtcgttgtccacataggtctgttcatttaactctgttaagatgatcttctcgattggattttgagatgaaaaaggtaaagaagaacgtgtccaaaaatcgttgtccacaaaggtctgttcatttaactcagttaagatgatcttctcgattttgcaccaattttttaacatttatatcttaaacacaaacgtagaaatcaatctaacatctgtgaatgaaaattagtctcagatctaagctaaaacctccatcaatttcactagcaacaatgttcttcaataagtgaatcaaccatcaaaaaacttataaaccttttatgatgaacacataagaaaaccagactttctgaaaagatacaacccaaatataatcatgaatcaaattcacagaacatgaactaagcaacgagttccatcaattagtgattcaaccattgctatcaaacgattcgaagtccactacgaggctttaatctccaattcaagagaataatctcgaatatgaaattggagaagcaagacaaagaaatcaaagagcaagtaatcagattaattttgcaacaaacagcaaaaacataaaacgaaaaccaaaccccaaatccaattcaagcattcaacgagtcatgtaaccaaatcagccagataggacagattctcaaattgatggtctgaaaaaattctccttcaaatcagatcaaaacagacgcggaaaatttaaaaagctgaatctcaatctctctttctcataaaagctgatgatttgttgaagagggaagaaagaaaaaggaaagaaatctatttttttggcttgatttttgtttatttttggagaaagtaagagaaagagagagaaaggataggataaagagagatagagcgatatctgattaaagggtaaatgagtcaaattattcattcaaagtgccttctctttagaaagtgcctaatcacggaaatgtttttaaaaaagtgccttagagtgtaacattctcttaaaaacaaagagaaaaattgtttttttaagttttgagattagatctcaaaggaactaccattctgggtttgatccagtttgtatgcgtgtggataccagtagaggcacaatacttggagtgctaaaccaacctcgaattaatatgattcatatttccgctgcataatatccatgtatattcaaatcatatgatctacatttaattctttgtttacacagttccttgcaattgaatttgttgttagtatttataaatcgttataaaacggtacaaattcctttcaatggtatcaaagcctatgtttttaatattgaatttgaatctagtttaatccatattttgatatagatgaataattgtaatttgtttttaacttgtttaaatttatgaaatttaattagtaaagcatagaagaacaaaattatacaattcacttgaacttgttcgtttatcataattagattacgatgttaagatttagtgaatttcttaattgataactagaactcgtttctgtacattagatacaaataaatactaattaaattgatatgatagagaacatatatgtctctattcgcttttgttaatggttatttgagtacgagtacaaataaataattgatatggttatccacaaacgaaatcgatgacttttgtttcgttacacgttcacgccttcattgatgataatgggtattttttaaccatagttgttttgctgtgtatttgattaatttattcaggtcaacatgtttcggtattaatcaattgatatatgatatctacttaattatattatattcacatatacatataaaatctcgtagatgggatgtatatgtagaattatagtaaatatacgattttgatttggaatagttccttatgaaacattttgttagcataattatgattataatatattgacttatgatttatggtcttttaaaaagaaaaagtcaatattagatagatcctaatttgattaggataagtttagttataatatattctaatttgattagagttactaaagtttaatcaagattaaattttaaataattaataattttaatttgattaaaattaattagatggtttataatttaattaaatatatattggatatgtattatttatactttatttctattggatataaatttaaatataaaatggatttataaaattaatactcatctaatatcaagtaagttgatgtcccccctccaattttattaattgttaaaacttggattgttgtatggtggatctgccaaagcagcgctctgtaattgtttaagagtgagacagatggtaacggttaccatatgaaataaaactggtttacttgactaagctatcaaaacggttttgggctaagagacatagagttggataatacataagatatcatccacaaccaagaattatattagatataattagcaaggagttgcttacctaaataactagatattttgagggtggagccaaaactcacttggattctagtgaaatatggatcttggatcattgtactcattagaggaaatttgttttgagtatagtgttagtttttttaattgttgagaattctaaaatttatgaacatcatattaatttatgcttttctttttcgacagttatg

SEQ ID NO: 7433 - DNA, 2950 bp, Unknown
  misc_feature (1)..( 2950): cDNA_ID_2154856_gDNA_ID_1621145_Annot_ID_172989 3000 nt of promoter + ATG
gaattcctccacgccaacatctcccagatttcaacactcccaatcagtaagcatttgttaaagattgtctcctgaaggaaaatgttttgttggcatctgaaatcgttaaaggttatcataaagattcaatctcgactcgaagtgcgataaagatcgacatatccaaggcatttgatttggtgcagtggccattcctcctcgccactctctctactttgaatcttccatcaaaatttatcaaatggattgagctctgcatatctacggcctcattctcgatccaaataaatggtgaattatccggcttgtttcgcagcgcaaggggtttaaggcaaggttgttccttatctccatatatgtttgttatatgcatgaactttctttcacatatgctcgacaaggctgcagtggaacgaaaataggctaccatccaaaatgccagaatctccaattgacacacttgtgttttgtagatgatttgttggttgttacagatggatgaaaaagctcaatagaaggaactcttaatatctttcgacaatttgcagaattttcagggctgcaaactagtcttgagaaatcaactctttatatggcaggagtaaaggagagtgatatggaagtcattctacaagctttttctttcgcttctggtgaactacccgtcagatatctggcttaccattgttaacaaagagaatgactaggaatgactacactcggctcatagagaaaatcagagacaaaattggtaaatggactaccaggcatttatcttttgcaggtcagctgcagcttattagttctgtgattcagaaccttaccaacttctggatgtctgcgttttggttgccaactgcgtgcattaaagagattaatagcttgtgttctgctttcttatggtccggacccaaactaagtactaaaaaggcaaaagtggtttggagtgaggtatgcacaccgaaatgtgagggaggactcggtctgcgttctctaatagaaacgaacaaggtcagctgtttaaagctcatccggagaattacatcatcaacatccttttcgtctcttaaagagaactcgactttagggtcatggatgtggaaaaagttactcaaatatcgagagttagctgcggggtttatccaaactgaggttcagaatggacgatctacttctttttggtttgataactggtcacaccttgggcgtttgattgaacgtacgggacaacgaggttgcattgatatgggattcactcttcatgccacagtttctgaagcagtattgcgacataagaaaaggcgacacagaattgataccttgaatccaatagaaacagccttaaacgatattcgttccaaaggacacatagaagcagaggatatagtgcgttggaaggggaaggggaacatttttaaaacaagattcagtactaaagaaacttgagctgctactcgtgactcaagacctctagcagagtggtataaaggcatatggttctctcatgtcacggctaaatgttcactccttgcttggcttgcacagaaaaatcaattaagtatcggtgacagaatgctttatttgaatgtttggtcgggtctcactcataaactaatcccctcacaattcttaaccagctggaacactattattaagactctcacagacacatctcttgatagagaaagcttgtttttgatgagattttttttcagcttgtagtgcattcactatggaaagaaagaaatggtcgcagacatggagaagctcctatctcttcacttcagctcattcgactactcgataagcaagttcgaaacaggatctcttccattagagaacagggagacgggagatatgacggttgtattgcaaagtggtttggttcaagataacaaattcactttttgcttgtttcaaaatttcctaccaaaaacttgtatattaatcatacgctgcagctgcatgtgatgtaaccacgttttttcgaataaattttgcattttatatataaaaagaaggatattttttaattctaataatttttatacaaaatatatactattaattgagaatcattacaaattttacaaccgtgtgagaggtaatttattagtagcttaacactaacttaaatattttgtccatgggcaaaaaagacaattaacatttgaaataaaacgcagatcttgggtgggtaatttctggtatccatccctttatgaatcttaaccctttctatatgttctattgggttctacgtaataggcttaatgaaaatctcaaatggcgtttatcttcaattttcgattgcattatttaagttaactatatttaaaattttcgattacaataattatcatctactataaaaaaagatgcaattttgaaatcactaaaatttcggtgcaagttaatatttgatttaccaaaacagattgaaaatataaggaatatttgatttattaacagcctgctccttaattactattattattccttaactaatcgaaattctttaaatatagaagatccattcattttaaattcaaattagaaaacagacatacatttcctgtacaagttaatatacatgcccattaattatcatttactataagaaaacaatgcaattttaaataaccttaagaaataagaaatcaattcactaaaattccgttgcaacttcatatacgatttaccataacagatttaaactataaggaatatctgaataattcaagcatataccttattatgttttcttcgaaaaatatttttttgcatcgtatattcccaaacccgacaatgagaacctaccatgtcgaattagtataaatatagggtaaagaatgaatacggacgtcaaacctttcaaaaatgaataaaaattcaagttaaaattgtgcattcgtggacacaatacacgaaatactcaggtgaaacaatg

SEQ ID NO: 7434 - DNA, 3000 bp, Unknown
  misc_feature (1)..( 3000): cDNA_ID_1817658_gDNA_ID_1621145_Annot_ID_56729 3000 nt of promoter + ATG
cctataaagtttaggagattgttaagaccaaattacccttaataattttgaatagcaaagaataaaatccaaatttgaaatcaaaattgaggccaaattagacaaaatttcaatttgtacttcccttttaataataaagggatatcttgtttcattaaatttgtaaggactaaacatataattaggaagttgactaaggatttttcaacccagaatccttactaaaaatgtatatatggataactaaatttaaatacatctttcttcaatatattttcttattttacatttttataaaaaaaattaatataagactcgtaaattttaaaaatatcagtcaatgagataggtattgtgattaaatggctattgtacttaaagatgaagtaataataaatttggaaagattaataatcaattattttatttttttacaaatttaataaaatagaaatttatatttttatactttttatattatttagtgacaaaatatttagaaaactttctatattttcaaattttctttaattttcatatattgttttttccattttacaaaaaatctaaaaaatagaagataataataatttcataaatgaagtcattatcctaataaggttttcgatctactaattccctattgagaatctctaaaagccaacaagaaaactactcaaatatgctcataaaagagcaaaacatgtttaaagtagaaatcaatgtaggaaacaagaagagaatagagtttagaatgttcttcttaagagggagctccctaggggtttagcttccatgaacaagtaagcataaagggtaaagaaaattatcaaaagttaggtctaaacaatgaactttaaaatctatatataagtttctaaaaccgtgcaaggacttcttcaaaaataaggagaagttttggggccaatttggatatatttaaaacttcaataagttgcgaaattgaattgccgtcagatattggtgtcccttgacactaggggtggtgtcgattgacacctacgcaaatttacgtctccagattgcttttgcatcataagttctctgttttgatccagaatgttccataatctcaaaatgcatcccaaacatgtaaagacctgaaaaagactataaaagagtctagaaataacaaaaaaactctaaaaaccagtattttcacgcccggtccgaccggttgaaccgtgacccgaacatttttttggtttgggtttagtgctaaaacctgacgggtgtgggttttaaaaattctcttgattttggaataaaatatgggattttagactttattcaatcatttgtagaaattttttcagttcttaaactcatttgatgttctagattttgatgaagacttcacaatgccgctttaaaaaatgaatcgaatggtgagtgagacacgcgatattagttgtgtgaattcacgatgttttattaatttatttccgtcattggtgatcttctagtatatttgttacggtattagacatttagttggatttacaaaatttaatcactttattattattgtttggtataaaggattttgtattttcattcattctgtaacgcccgtgaaccggaaaatcggttagggtttgtatataaaacatccggtttaatcggttggattaattagaaaccctatagtgtgcctataaaagaaaaaaactcgaaattagtgctttagttatccacttttcgttttataaaggagaaaaagtcagagaaagagaagaaccagaatcgttagggtttgggaggaaacgttttcgacatatcaaatctttgtaaaaggtaacgaaatttggtagggttattcccaagtcttttatagttattatccagtttatagaagttgttttggattaaaattggttgagttattcgcagtttcgtgagacacgttttttcagacgcgaattaggaccagcggggattgtaactgcgatcgtagtctcatatggtttccgatcggcacgagtttttgtgggaagcgttgtgatgtgtaaggctagcgtttcaccggagggatttaataattaacggttagtttgtattttagggtttcatctttgagactgtttgtttttgtttttcatgtacagtttgcttcaaaggttgcttttagttgtgacatgttgtaggacgtttctgaactgtttcagacgcaaggagagtctctcctgggtttaattgttattggaataattttgttaaggtgagtgcgtgagcatgagcttatctgagcgaataggttgtatgttttgttttgtgtgatgatatgtcggtgtggtaaatgtgttttgagtgaattgttcgatgattggtttgtttgtgttgtatttgtgattataccgttttatttgcttgtgtgtatagctcgtagatgggaggatcgcctcactaaatatttatgataatacttacgcatctcattgtattgttgatgcaggtaaagataaagtgtgatcgtggtatcatggcaaggaagagaggatgatctaggaactcgtttggtttacttttatgttttggttattggaacaggttagggttgtgttaggattgttagtcattcttggttttgttggttgaattatttgtttattcataaaatagtttttgtgacttgcggtttaattgttgctttattggttggtttaattagatatttatgggaatatttaattatgtttaaaaaaaatgggtcgggttgtttcaatttggtataagagcgatcacaattctaggatgtgtagaaaaattaattgatgaattattttcttgatgattgatgtgggatgagctaggatgttagcatactaaggtttgattatggagtgtttagtcaattgtgtgttgttggaggcctaccatcatcttctccgaaccttaaatgaaattccacgataagttctttgtgatatattcgtttgttctagtttcttaaccttttgtacctgagtagcgcagatg

SEQ ID NO: 7435 - DNA, 1588 bp, Unknown
  misc_feature (1)..( 1588): cDNA_ID_1817788_gDNA_ID_1621146_Annot_ID_56733 3000 nt of promoter + ATG
gaattctgtcttgctttaccagagtttgccttgcctgaatctggagtgttgtaactcgctgatgacttctctgatgcactgtgggatcacgaaagatatcatcgagatgtttggtttgatgattgatgaaggaactggaatcgacgaagttactctttctactgtcctcaaggctttatcactctctttaccagaaagtttacatagctgcacgcttgtacattgctgtgccatcaaatctggttatgcagctgatgttgcagtctcgtgctctcttattgatgcgtatacaaagagtggtcagaatgaagtatctcggaaggtgtttgatgagcttgatacacctaacatcttctgcttgacttcgatcatcaatggctatgctagaaatggcatgggaacagactgtgttaaaatgctgagagagatggatcgaatgaatctcataccagacgaagttacaatattgtctgtactatcagggtgcagtcattctgggcttgttgaagaaggcgagctgatttttgactcattggaatcgaagtacggaatttcgccaggaaggaaactctatgcatgcatggtggatttgctagggcgtgctggtttggtggaaaaagctgaaaggctgcttcttcaggcacgaggagatgcagactgcgttgcatggagctcattactgcagagctgcaggatccatagaaacgaaacaataggaagaagagcagcggaagtcttgatgaatcttgaacctgagaatttcgctgtttacattcaggtttcaaaattttactttgagatcggtgattttgaaatctccagacaaatcagagagatcgctgcttcacgagagctcatgagggagattggttacagttcagtcgttgtgaaaaactaagaaggcaacatttgcaggacagtgtttttgcttcagcttcatgaaaaagaaaagcgaatccaattgcaaagttcacttcttttttctacatatctgaaatgggttctttcgcttgaagccagaccacatgattgacactctacagagacaacacaagaggaatatgagattctttatttgtcaggttggtgcaacaaactcattgacctcttctattttatgtcttttaatatactaatagaatatagaatgtctgttcgtcgttattcaacaccgcatcatgtctaaaattctaaaaatagcatcttgaggtagaaaagctgagagattttctgggacttctttcttttttttttttttttttttttaatttcaaatctcatgggacatcattttgatcatgaacaagttgaccacaaaggttttgtgtagaggttttggagtaaagcaaagaagtgaaaaagcacatgacttgtgctttaagcatagatgtatagaaaaacaaggccttatcttcatgtacttttaagccaagccaataaaccccacaaaccccattaattactctgcatataaattcaacccgaaaccaatcatctctaccaaagaaataaggaatctcattagtaggcactggatttaataatcaacaggaatcttctcttggcgttttgattgaagcatatgatg

SEQ ID NO: 7436 - DNA, 3000 bp, Unknown
  misc_feature (1)..( 3000): cDNA_ID_1808041_gDNA_ID_1621146_Annot_ID_56734 3000 nt of promoter + ATG
tttttttttttaatttcaaatctcatgggacatcattttgatcatgaacaagttgaccacaaaggttttgtgtagaggttttggagtaaagcaaagaagtgaaaaagcacatgacttgtgctttaagcatagatgtatagaaaaacaaggccttatcttcatgtacttttaagccaagccaataaaccccacaaaccccattaattactctgcatataaattcaacccgaaaccaatcatctctaccaaagaaataaggaatctcattagtaggcactggatttaataatcaacaggaatcttctcttggcgttttgattgaagcatatgatggataagctcttcattctttctcttctaggtctgttattggtaactgcttatggagctgcagggaagatggtgtacacagatcttgacattcttgacgagcttgagaactttgatgtactggtagatgatgatgatgatacaaagctcttggattggccatcattcacaagccggcattctggtaaaaatctggtgaatgttgatacattcggtgcagctggagatggagtttctgatgatactcaggtttgcttattccataaaaatgacaggttatctagatacctaaaacgctatcagttctatgtctggaatgaaacaaatccccaaacttgaaatcatggggaaaatttctaaacaaattgtttgcattgtagacttggcctatagatatttacggaggtctagttagatatttttctgcatctgatctgtgcaatgctcttcccaaatcaggcattcgtaagcgcatggagcaaagcctgcagtacatcaaaatctgtgtttctggttccagaaggacgtcgatatttagtaaacgcaacaaagttcaatggtccatgtgaacaaaagttgatcattcaggtcaagttatcttcagtaggaaaacagaaactagaccataactatatatacaagtatgtcttatacaattcagaaacttgtctttgtttacagattgacggaacaatagtggcaccagatgagcccagcaattgggactcaaagttccagagaatttggctcgagttttcaaagctcaaaggggtcgtgtttcaagggaaaggagttatagatggttcaggcagcaaatggtgggctgcttcttgcaagaaaaacaagtctaatgtaaaatcttctatacccaaatctatctttctttatcacaaaagataagtgcctcgagttttcgaatagaatcttacacatctttcttgctcttttacagccttgcaaaagcgcaccaactgtaagaaaccattaccttcatcatttaccagttattattccttacaaatggctgcttatttggtttcgttcaacaatctgtttttgttttcccctgcaggcactaactatagaatctagttcaggtgtgaaagtaagtggcttgacaatccagaacagccagcagatgaatttcatcatagcaaggtcagattcagttcgagtctccaaggttatggtctcttctccaggagatagtcccaacactgatggaatccatatcactggatctaccaatgttatccttcaagactgtaaaatcggcacaggttttttttcttttgaccaaacctttatgcaaatgaaacattttacacttcgactacggttgtaataatcccttaagactggattaaacaggggatgattgtgtctcgattgtgaatgccagctcgaatataaagatgaagaacatctattgtggacctggacatggaatcaggtacatcatcaaatttctagattacatctgttccaaatcaaattataattagttggaatttcttgcagtattggaagtcttgggaaggataatacgacaggcattgtaacacaagttgtgttggacactgccttattgagagaaacaactaatggactcagaataaaaacatatcaggtacacaaaaaaaaaaaagcttcactatttagtaaaaacttcgatttggctagatccacaacaattttatttcattgtttctcattcgaacagggaggttctggttacgttcagggtattcgattcacaaacgtagagatgcaagacgtcgcaaacccgatactcattgatcagttctactgtgattctccaactacatgtcaaaaccaggtttccttataatacaacctcgtgattgagattattcaatcaaaatgaaactcaaagatgaaaactcagatatgtttttgttcttttttttggtataaatgcagacctcggcggttaaaatcagccagataatgtaccggaacataaccgggacaaccaaaagtgcgaaagccatcaaatttgcgtgcagcgacacagtcccttgcagccacatagtcctcaacaatgtgaatcttgaaggcaacgacggtcaagtcgaagcttactgtaattcagccgaaggttttgggtatggagtgattcatccatcagcggactgtctctactcgcacgacgacaagggcttggaccagactcacaagtcggaggaagccgagactggccacgacgagctttgatggtgatgttcaaactgttgttgtagtgagagatgatatgtaatatagttttctgaagcatatgatacagtaaaaaatgatattgtttttgtgtttataatcaaccatagttaaggttgttgttaacagcatttgtccaccttttacatcaaatgattttttttttcttttcatagaaagtcatatgcttcatctattgagcaatggccatcactttgaaaacttacgcttataccataaaccgggttctatacgtaaccaaatttcaatttctgatgggttaataataaaccgggtttataaattgggttatgattacacagtataccagaagctaacaaaaagctcaacgattcgtctcaaagtttcacactttcgtgaaattcttgttctcgaatctcgtttcatttgatacatttgaagaaatcggca

SEQ ID NO: 7437 - DNA, 3000 bp, Unknown
  misc_feature (1)..( 3000): cDNA_ID_1817695_gDNA_ID_1621146_Annot_ID_173056 3000 nt of promoter + ATG
gagctcctctgttcatgcctaaagaaacaaacaagaacgcatagattcgatctaaatgagaccaagatcatcaaatccatcgacaagtaaccacaaaatccgaaaaactcggagatcattgatccgtatgaaagttaacagagacaatgaaaacagaacgatctcgatcattatcaagataactatgacagagaagcaatggctctacaaatggatcggatcgcatttagatacctctaagagagaagatagaacgtgaggaggacatgaaagagcgagagagcagcgaagaaactcttcttgatgccatggctaactttttttgttcttcttctctttctcacggtgatggtctcttttgtattggtgtgagaactctgtttatggaagcacacgagtaatgatttcgcatttaacgaacataagaaagaaccatttcagggataaaaatatcacattcgttccccacttgtcgtctacacaagagtcaaatcaaaactcgtgtcgacactaataatactacaatatcattttaatcattcatttctatatattattttagaattattttacttagtacttagtagtaccataccataatcttcggagttatagttgtagttgtagttttagtatcatagatattacgctaataaaagacatagtaatacactaatactagtacaatattcaaatatgtttttatttcattatatttctgtcatttattggattttttttttctgtgacaaatttacatatataatcactagtacataaactggaatattttacagaaatatatttaaaattaacatcatagaaaataacgatttttaagtgtgaatagagattataataagaaaaaagtgtgaatggagatttaaaaagtgtggtacggcattgaaggcgtaagagaaaagtattacgtcctgattattttgaagagatttgagtggttcacctaccacactaaaaataggtgattattttgcttatttatcgttattctatacaaatattagtaggataatttactagtaattatggtataagatagtgtcaactttgtgtgttggcattaaagattacgtttttaattgttattatgtgtttgtatagagataagatcatatattagtcatcattctatactaataatatttcttgttatcactaagatatgatcttgatgacaatgttacacagttacaatacgtataactcagtttggactttggatccaaccttacaaaaacagaacaattcgatggacaaggctatattttagccataatctccttattactaggtagtttcaagtttttcaagatttatatactatgtaattgttctgtgttaaaaagtgttggttttttatagcttttttttttgttgacacaaagcttttttaaaaaaacaaatgacgacaaatttatacaaaactgacagaaactggtttagttagctatggaaacttatatgagcgttaaaaaaatgctaatgcacattgattatcacgttttcatagttagaagtacgaaaaacctttaaaaaaatttgggatttccaaacatcttttcatgcataaccaaatatatatattttcatagtgcatagacattatcgatacgtaaacgtatttctttttgtttctttatagaaaattcattttagcatttacttgtttatctctaccaacttttcttttaatagatagataaaaagaagggattattgtgtcatgacttttttttctccataatgttttcgtataagattcgactatatatacagtaatagaccgtccgttcgaaattattaacacgaactaggaacaaacgtatgaaattgaaacatcattatcaaatgttcggtacttcgtatattatagaagtagctagctagattactaggatgatccaaaatacctcataaacactacactttgatagggaaaaaatatagttaacataaacaaatatcgtctctacaaagtaatgtattttttgctaaaaaaaaaggaaggtatatgtcaattgaaaaataatcaaaccaaatgtaaaaaaaaaagtatatgctaaaaaaaaaatgtacatgctgcattatgttgttttttgcgaaaaataggtcctgaaatgggctactattattagtgggccaaaccttgcgatccaattccctaatgacggtatagggcgtgcactggtggaagactagctattgatttatatatgtttggagtttggactaaaataaatagaaatatctgtattccaattatatataaaaaattctcatcgtctttgatatatagaaagtttttaaaatttcagtttcacagatgttaccagttctagttttataagcttatgctaattatctgatcaatgcaaacaaaagttgacaataataaaatgaagtctttttttttccgcaaaataaaatgaagtcaaatatggtatattcctactataaatatagactaagactcgtgaataatactcgaatcagtctctgaggttttgctggaaaaaaaaaccgaagagctcaaaacagagtgcgtttgtttctgggaatcttgaagcctctcacttgcgaagacgaagcttgcttgttaggtagttatcttcttcttcttcttcgtttcaattcctttttcgttcatctgaaatgtgaaatcatgtgacgtgacgattgggttaacgatcgaatttcgtatatgattcttttctagtttctttaatcagcaagtcttgttgttttctttcaatcgagactgattctagatgttcttaaggatcttgttcgatgaaatttacatgaatctgtattctagaagatgaactttgcatgaatcatccatatcgacgaactgatcttgttgttgttatggattaagtttcttgagatacaagaaaggcttcaatgaccaatctgatctgttttgatgaacacaaatctttatctttgaacaatggattaggtcaatttcacacc

SEQ ID NO: 7438 - DNA, 3000 bp, Unknown
  misc_feature (1)..( 3000): cDNA_ID_2150435_gDNA_ID_1621146_Annot_ID_173054 3000 nt of promoter + ATG
catgacatttaaaccaagacacagactcgggtgatctttcaagaggtcctgcatgcgtgcactgaaagtagccatacccatcctacaaagataaaaataacattagaatcaattctcacatgtgtctttgttctttagactgtttaagagcaaaccaaacacaccttcgcgctatcacctcatgaaagagtcttagaaactcttgatattttgcaggttccgcttcctccaatgcgaccttcacagcattgacgtatgcctttccatcttccaaagatgacgccggtgatttacttcctccagccatggtgtgaaattgacctaatccattgttcaaagataaagatttgtgttcatcaaaacagatcagattggtcattgaagcctttcttgtatctcaagaaacttaatccataacaacaacaagatcagttcgtcgatatggatgattcatgcaaagttcatcttctagaatacagattcatgtaaatttcatcgaacaagatccttaagaacatctagaatcagtctcgattgaaagaaaacaacaagacttgctgattaaagaaactagaaaagaatcatatacgaaattcgatcgttaacccaatcgtcacgtcacatgatttcacatttcagatgaacgaaaaaggaattgaaacgaagaagaagaagaagataactacctaacaagcaagcttcgtcttcgcaagtgagaggcttcaagattcccagaaacaaacgcactctgttttgagctcttcggtttttttttccagcaaaacctcagagactgattcgagtattattcacgagtcttagtctatatttatagtaggaatataccatatttgacttcattttattttgcggaaaaaaaaagacttcattttattattgtcaacttttgtttgcattgatcagataattagcataagcttataaaactagaactggtaacatctgtgaaactgaaattttaaaaactttctatatatcaaagacgatgagaattttttatatataattggaatacagatatttctatttattttagtccaaactccaaacatatataaatcaatagctagtcttccaccagtgcacgccctataccgtcattagggaattggatcgcaaggtttggcccactaataatagtagcccatttcaggacctatttttcgcaaaaaacaacataatgcagcatgtacattttttttttagcatatacttttttttttacatttggtttgattatttttcaattgacatataccttcctttttttttagcaaaaaatacattactttgtagagacgatatttgtttatgttaactatattttttccctatcaaagtgtagtgtttatgaggtattttggatcatcctagtaatctagctagctacttctataatatacgaagtaccgaacatttgataatgatgtttcaatttcatacgtttgttcctagttcgtgttaataatttcgaacggacggtctattactgtatatatagtcgaatcttatacgaaaacattatggagaaaaaaaagtcatgacacaataatcccttctttttatctatctattaaaagaaaagttggtagagataaacaagtaaatgctaaaatgaattttctataaagaaacaaaaagaaatacgtttacgtatcgataatgtctatgcactatgaaaatatatatatttggttatgcatgaaaagatgtttggaaatcccaaatttttttaaaggtttttcgtacttctaactatgaaaacgtgataatcaatgtgcattagcatttttttaacgctcatataagtttccatagctaactaaaccagtttctgtcagttttgtataaatttgtcgtcatttgtttttttaaaaaagctttgtgtcaacaaaaaaaaaagctataaaaaaccaacactttttaacacagaacaattacatagtatataaatcttgaaaaacttgaaactacctagtaataaggagattatggctaaaatatagccttgtccatcgaattgttctgtttttgtaaggttggatccaaagtccaaactgagttatacgtattgtaactgtgtaacattgtcatcaagatcatatcttagtgataacaagaaatattattagtatagaatgatgactaatatatgatcttatctctatacaaacacataataacaattaaaaacgtaatctttaatgccaacacacaaagttgacactatcttataccataattactagtaaattatcctactaatatttgtatagaataacgataaataagcaaaataatcacctatttttagtgtggtaggtgaaccactcaaatctcttcaaaataatcaggacgtaatacttttctcttacgccttcaatgccgtaccacactttttaaatctccattcacacttttttcttattataatctctattcacacttaaaaatcgttattttctatgatgttaattttaaatatatttctgtaaaatattccagtttatgtactagtgattatatatgtaaatttgtcacagaaaaaaaaaatccaataaatgacagaaatataatgaaataaaaacatatttgaatattgtactagtattagtgtattactatgtcttttattagcgtaatatctatgatactaaaactacaactacaactataactccgaagattatggtatggtactactaagtactaagtaaaataattctaaaataatatatagaaatgaatgattaaaatgatattgtagtattattagtgtcgacacgagttttgatttgactcttgtgtagacgacaagtggggaacgaatgtgatatttttatccctgaaatggttctttcttatgttcgttaaatgcgaaatcattactcgtgtgcttccataaacagagttctcacaccaatacaaaagagaccatcaccgtgagaaagagaagaagaacaaaaaaagttagccatg

SEQ ID NO: 7439 - DNA, 3000 bp, Unknown
  misc_feature (1)..( 3000): cDNA_ID_1817703_gDNA_ID_1621146_Annot_ID_173053 3000 nt of promoter + ATG
catgttcgtctgccgagcccacgtgctgattgtcccgggtgaataccaatggatccatgcatgcgatccccattaaaccatgtgaaaggagggtctccaatgattcgagggaatcgtatgccgcttcttcccgtggaaatgttccgccttccaagctggttttgcctccaaaaagtatcactagcagcagcaagctgtttttgcctccaaaaagtagcaaacctcgccttccaattaactgaatcacccgcttctgtcacaacaaaattattaacttcctccaagcacttctgcttccacaagtcattgtctgatgccagataccgcatttctgtacaaacacaagccatatttccaatactcacaccaggaagcaactctagtatcttcagctttagctctgttggtaagcgcatcaaacacggtggaggttccaagccagctttatcgcaaataccaatcaacaacgggataacaaggcgatcttttaccattctccagaacatgaacacttcacggtagatactcgaagagccttcttcgtcagatgtagaagtatccataaccaagtcgataacaggaacaaacctacgcttatcaagattcatatgcactcgcccactagatccacctacagttccgtaaactacaaccacagggcctaaattctgaaacttcacagaaactgactcgattgtatttgtatccttagacttaatcagctcaggtagagtatacctcagggatactgtaagtaactcctttgaaaagttaaacttgtcagagccatgattcaacagcacgaatccagattctaacataacagcatgtactgacaaagccaaagtagtcaactcactagtatcaccagatttctcaagcagtatatttttcaagaagaatggttcacttagccttttgcttccagctgcagcgagctccatgtcaagctgctcaacatccatcggctctggaccctccatacccgaaatatctccctctggatcttctacggaggtattaggattagatttcgcttgatcggggacaacatcaacctctgcgaacccaatcgaatcatgaacactcgtctgattactctccgattgagaagctacggtttcagaatctctcaatttccaattcgaagattcgccagcctcgagagagaagtaaattaggtcaccggatattaaaccaagagatcggagcgtatcctccggcgaaggcgtgatgagctcgtctttacgattgagcgagagatgaacggaggaaggcaccgtggggttgatccgtcgccggagatcatggagagtgtctgcatcggccaattcaagttttagggtttctctcgtctcgtgatgtctcaatcgtagcttcattatcgggctactacgatcttcttcttcgcctcacaaagtagagtcatgaaatgtgttgcgtacacatacagataaaaggctgaggcggttaccagttatgggccgtatttgggcctataaacaacttattatagtatatggggttttcgtggataaaggatttatgtgtcaatggaagattgatgagattgagtgagaacctatgaattggacatctcataaaacatgaagttaatagaccaaatggttcgagtttctgttaaaaatggttaccaattgtacaatcactaaccaaatctggctctagcatttgcaacaccgttagtaacataactttcaatgagcaacagcgatattattacctcaaactaatttgtagttatggtttggtatgtgtgttagcgcttttgattataaaaaactaaaaatattaaaatctagaaaaggttacaaataataccttcttgaatgtcaatcggattctgacttttttctatgtcacataaattaaattttgtatttgcggccaaatatattaaatggtacaaattcagaacatcatatattcattattaccatataaataaataacatcaaagaaattttttatctcgctacagttttcaccccataaaaaaaatgcaagcggaattgagcaagcccttacgaacttgtatccaacattattatcttcatatggtaattcatttgtgtgttgtcctatagtaaaacgtgtaagactgccttcaataaactgaagcatatcaacaatgttttccatcaaaacgaatttcggtttttaaaactcctcgtgttcatccaaacaataatttcggaggaaagaaatcatgacaagatgtcaagatcttaccaagtccaaatagttaccttgtgagaaataaaaattctacaaagtatagaatgagttactctaatgtattttgatgataaattcatactttagagataataaatatatagaaatcaattcctataaatctgaaaaaatagtagtaataaataccataaataactatttgatattatttttggttatcacaggtggtaactagtttgaaaaatggaacataaatactcacaacaacctaccattttcaaaaatgaggtggcgaatccacataaaacaaacacaatttcacatccaaacattattttgcagattttgactgattactaataacaaaattaaatgttttaaatatagttgactaatagactagaaaacatatgggattagcgtgggatgcgtacaataaaaacaagaagatccatccagattagatgtaattatacaaatcaataaaataaatcacgcatacgaatacaaaatacagtacaaagacccaccaccaaattcgaccgttgctcacaacgttccaagaaaaaaatccccaagtattttcttctttattcaaaaaagtttcgatttttattttcaattatcccaatcctctttcttcttcaactacacttacttaccgttggatctctccgacttaagtaacaaataaaaccctaaattcttcttcccgatctaaacccatttcttgaatttctcatctgaatcacaaagtctcgatcttgaaactcaacaaca

SEQ ID NO: 7440 - DNA, 3000 bp, Unknown
  misc_feature (1)..( 3000): cDNA_ID_1817711_gDNA_ID_1621146_Annot_ID_173050 3000 nt of promoter + ATG
aacgtcgtatcccggaacagtctactccgacgaaagattcaaaatgttaaagaatccgaaaccttcaaaaagagtgagagagagagatttgaatttgcatttaccgggagaggcgaatcagtggctttaaatttcccttgccgtctcttagcatcgacgggattaagagccgccgcaacaactttaatcaaaacctgatcttctttaatctccggcacaacaatgttactctccagcttcagaacatcaactccgccgtagtcactatacacccacgccttcatctctttcggaatcgaagcatccgccgtgacattgaccgccgctgaagcgctctgagagctcgccgagattttcaagaatttcttgctgactgtttgcacgcaagatccgaatctaactctgttgatttggtaaaccggcgattttgttgtgagagaacaataatgaagaagaggcgtctcacggcggagtacgggagttgtggcggtggttgttgcaagcgctgcgttcatttttcagtctgccactagttttgtctaaaaggcttatctctttcgctttcctctgtttttaaaatactctgtttcgtggctttctttgattggttgatattttcttgtggttgtcattttaatgtttatatcacaaaaattgtggcccataatcgtttttgatctggtgctgattttgtgattcatctttgtttcatttcttttagaactacagaagtctagaacaatcacaaaacacttcggtttttgaacattacaatgtacaatttttacgtaagaagatacaatcgacattaatgggcctaaactttaaattgggctttatgaataagcccaacagttgagaaaacgcagtactaaaagtcgatcatctaggcacgatgagattaaccatagaaaccgcgcacaacgaagcacgatcagtacacgtgttaaattatgattgggtccttggtagagattaaagatccaccgtccatttccccagaactagaaaaaagagaagggagaaaactttctccgagctcgattgtttttggaaatcgtcaatcagatatttctcgttcgtctccgccttcgatttatccaaaggtaagctattgataaaaaaaactaaatccctgatatttgattttgaatctcttatactcatacattgctgttcatgtgttgttgtcttgatttcaaatctgcccagctttttgtaataatgatgcatgcactatgtttaatgcttgagttcgatttccctttgtttcgggttttgcctcattgttataactcggtcgaaagtcatctcctttacatgaaatttctgttgttaagattatatggaatgtccttcattgttctgctttctaattcttgtgtcaatcttatctaaatcttataaatcagcatttgcattagaagatttgatctattttaaattggttaagaagtgaaatgattgattgtcaatgcaggctcttgttattgaaaatggcagattccaccaaagcagggttgaagaagccagctttcactaaggttgatcagctgcgtcctgggactagcggacacaatgtcaatgtgaagattgtcagcacgaaaatggtgttacagaaaggtcgtgctgatggtcctcaagctcgccagttgcggatttctgaatgcattgttggtgacgagacaggagtgatcgtctttaccgcaagaaatgaccaaggtactttacttcagtcaataaatcatttgaaaaacaaaacgttcatataacggtttgtgtacttgattctagtaatgttacagggtagctagtaatatcttgatttggttttgtgtgtagtggacttaatgaaagagggatcaactgtaactctacgcaatgcgaaaatcgacatgtataaaggatcaatgaggctagctgtagacaagtggggtcgtgttgaagtcacagagcctgcgagcttcaaagtgaaagaagacaccaacatgtcccttatcgagtatgagctcgtaaacgtcgttgaatgagtgacaaattcctcgaaataccactaggagaaacgccctcaagaataaacaagtcaaatccgtaaccgtttatgttagcgtcaagaaaagagttaaaccctgatcagctgatgtcttgcactaagctatgtaagagtgatgatggctctaaaagttgaatgcagagcttttggcttaggttatgacttcgtgataccttttcttttgtaatgtcatcatacacgctaaggcttttgtgctacattattactctctttgtctttgcctcgtttcaaaaaatccatattcttagtgaagtaaacagtaactgcaagcctctgttgatcaacgaccataatgattatctttctattttggggttatatataaaaatagaagtttaaccaaaatgcaactcgagatgggcttgaatcactttgttaatgattgtggagaagaaatgttgtcgtgtgaagtgatgggacttcaaatgtgtgtcatcattgcgtcatgactgatggcttcttggtttcctttgtcttttaatatgtttatcttcttacatttttatatgtttgtccttgtcacgtatcggtaatgaaacttcaaacttgatataataaacgaataataggtatgaatactaaaatagttagtgaagaaacagtttctaccaacaaaaagtaatgtatcttttcatgagtgttaagtgggcaatgtttagtgcgtttagtcctttttagtctttagagctgtttccttatctcttcctcttaatcaaaattttctaatacgatttattcagagattttaatagagtaaaatgtgacatttcggtattgattgattcatagattaaaaactatataagccttggttccaacttccaacttccaacttagaaatgtgtatatacacacatttgcatcgataataactcaccaacactctctctgtctccatcgaatgtttcctctaactctcaacaaaa

SEQ ID NO: 7441 - DNA, 3000 bp, Unknown
  misc_feature (1)..( 3000): cDNA_ID_1029685_gDNA_ID_1621146_Annot_ID_173049 3000 nt of promoter + ATG
gtagcgagttcatagaaaactggatccagatctgtgcaccggccaagaacaggatcaagcaggattgtaaagacctaagctttgaagatcagtgcaccaactgtgagaaggtacgtaagtcgtaacaagacaagacaagacacaatctttgctctgttttttctaacttttaaagtagaaaactgagattgtctctcatgtgtgagcaggaagccgtgaacgtgtccttggggaatcttttgtcttacccattcgtgagagaaagagtggtgaagaacaagcttgccataagaggagctcactatgatttcgtaaaaggaacgtttgatctttgggaacttgacttcaagactacccctgcctttgccttgtcttaaaagattcctcctactcaaatattttctctatgttgtttctaattatgttcttataatcttcttctgttgcttctgtaatgtcatctttgctacttctattccaatagaaatgaataaagctttaaagagcatttacttttatttccaccctcattaatacaaagagaagataacacttgctatgcttatacacatagatagataaaggctactacactcaagccagccccttaaggaatgggataaacaacgaccttccctgtggcatggttcgtttctaagtatgaaaaagcatcagcaacgcgtgagaatgggaacggtcctttgggatcaaccacaggcttcaccttcccactctcaatatatgggttaagtttcttcaaaacatcgccattagatgtaacaacgaatcgaaaaccaggaggcgtgacagctccagtcaatgccacaactttccctccttccttaatcaccttcactgccttatcacacatcccttttaacaacacaaaagatgctctaatcagaacgttttgttgcaacaaattagatatgtgttaatggtgttgtgttttgtttgtttaccaatggcgtcaaagacaacatcgtacttgtcaggcaagtcttctatattctcctttgtgtaatcaatagctaaatcagcacctaagcttctcactagctctagcttttctgtactcgcagttgcagctacttttgaagctccatacacgtgcttcgccaactatatcgaacacacatatgagtaatcaatcaacaacaattaatctctgattcttagattacaaggaaccaactattacctgaatcacaagactccctactcctccggcaccattaagaacaagaattgactttccggctgagaattcagtcctaactaaaccttcatcagcggtttctatcgccaacggaagccctgcagcttgcgcaaaatcgatgtttttaggttttaaagctaataacttctcttccacggccgtgtactccgctaaagaaccaaactgctttggaccttccaatgctttctcgctcacgttagcataaacttcatctccttctttcaaatccttcaccgcacttcccactttcaccactactccggcaacgtcgtatcccggaacagtctactccgacgaaagattcaaaatgttaaagaatccgaaaccttcaaaaagagtgagagagagagatttgaatttgcatttaccgggagaggcgaatcagtggctttaaatttcccttgccgtctcttagcatcgacgggattaagagccgccgcaacaactttaatcaaaacctgatcttctttaatctccggcacaacaatgttactctccagcttcagaacatcaactccgccgtagtcactatacacccacgccttcatctctttcggaatcgaagcatccgccgtgacattgaccgccgctgaagcgctctgagagctcgccgagattttcaagaatttcttgctgactgtttgcacgcaagatccgaatctaactctgttgatttggtaaaccggcgattttgttgtgagagaacaataatgaagaagaggcgtctcacggcggagtacgggagttgtggcggtggttgttgcaagcgctgcgttcatttttcagtctgccactagttttgtctaaaaggcttatctctttcgctttcctctgtttttaaaatactctgtttcgtggctttctttgattggttgatattttcttgtggttgtcattttaatgtttatatcacaaaaattgtggcccataatcgtttttgatctggtgctgattttgtgattcatctttgtttcatttcttttagaactacagaagtctagaacaatcacaaaacacttcggtttttgaacattacaatgtacaatttttacgtaagaagatacaatcgacattaatgggcctaaactttaaattgggctttatgaataagcccaacagttgagaaaacgcagtactaaaagtcgatcatctaggcacgatgagattaaccatagaaaccgcgcacaacgaagcacgatcagtacacgtgttaaattatgattgggtccttggtagagattaaagatccaccgtccatttccccagaactagaaaaaagagaagggagaaaactttctccgagctcgattgtttttggaaatcgtcaatcagatatttctcgttcgtctccgccttcgatttatccaaaggtaagctattgataaaaaaaactaaatccctgatatttgattttgaatctcttatactcatacattgctgttcatgtgttgttgtcttgatttcaaatctgcccagctttttgtaataatgatgcatgcactatgtttaatgcttgagttcgatttccctttgtttcgggttttgcctcattgttataactcggtcgaaagtcatctcctttacatgaaatttctgttgttaagattatatggaatgtccttcattgttctgctttctaattcttgtgtcaatcttatctaaatcttataaatcagcatttgcattagaagatttgatctattttaaattggttaagaagtgaaatgattgattgtcaatgcaggctcttgttattgaaa

SEQ ID NO: 7442 - DNA, 3000 bp, Unknown
  misc_feature (1)..( 3000): cDNA_ID_1807842_gDNA_ID_1621146_Annot_ID_173047 3000 nt of promoter + ATG
ttgtgttaggtcatttagttgaagtgatcgaaagcctaatatatcggtcagtggaaaagtaaaagagaataaaaatcacttccctaagtgagattgaaactcttttagagatgattttgatcatgaggaattgaatccagttgttcaggaaatggaaagaagagtaattttagagggatcctttcatctatcaatttttctgagtgtgagaaatggtgtattatgggagtcaagttttgtataatgttcttgtgtatttgtgagtatcctctagattgggctattctaagcatgagggctatgctttgctgccttacatattgtggcccacatgttgtggcgatgacactcacctacagtggttaattgacctagtttgctaggatgggaggtacgtctttgttggtggagaggtgtgtataatcaattttattgagacataatatttcgtcactatgtcaataaatctgtaataataaaaattttgtgacgattttgtgactaactgttaacggttgcaatacattcgtcacaaaattgttttctcggattgtttcatccgtggcaaagcgcgttgcgctcttaatctcttacctgcttgcggaaattcacccccaaaatatcattaaattcaatacaatgtgttaaacacgtatagtatatcgttagtattatttataggcttgcttataagtaaatttcgttacctatttatatacagataagccatacaaaatcttcactaatttacctaataattaattatttaccgcactatcatctactaagctttaaatgtgttaatttcttcatggaatcgagaagactttaagtatatgcagtttgcttataaacgcggccttgtaattttatgcatatgacatcttatcgtgcatgatctcagaaacagattaattggacatatagtaatgtgaatataaaacctaataaagaaaaaaaaatcaaatggtcacatttattgaaaataagatggtgacatgataatacaaagaagtttatctatttgtctatttagcgacctgtttatttaattcgtttgggcttcgttcaattccgcaggctatctttcacccgaagcaactaaactatagtattaaaagtatatatggaatagcttgtaattaggttttataattgctgctaattattactattatcgttattgaatattcaactgaatcgggccatgattagcgatgaggtacatgacaatgaaacatgcatgttcctcaaattccaattgatatgatggaagaaaacaatacaatgcccgacaaatttgaaaatataaattttaaaacaatgttaacaaaggaaataatataagaagaaaatgccaaaatagtggtttttgacgaaaatgtatgagttctaagaaccaatgaaaaataaaataagaagttatctttatagtaacgggaaattcaactaaaacatgttttgatgagatttaagagtttcgattcgagtttaattttattcctatttaaaacttagaaaattctacactattttctctaagttttctactttacactaactctttctatcaatcttcagcaatttattgattgtctcttttatccccctatactgaatatatgagcgatagttgactggtactaagatgtatttagacataaaactgactttgaatatgagaactggcccacctcctttgattatagatccacccctgtatatatgtttttttaataaagcaaccacgtctccgttccatgcatgtaaaacactcatctacaaatgttttaaatacaagacctttttcttacaataataaaacacatatcttatgattggtaacccttagaaaaaggaaaattaatggtgccaaaaaaaggtatgccaaaaacgttttagtgatatgaaaaagaaaaaaaaatgcaaattctatcaaatttggttaaaaaataattggaatttctaatgcaataaaaatcatgtcattgttattacttcaaatatcccaaattcagaaattattcatccttatatttatttatttcgtaaaaaataatctatagtaataagttcatcatagaaatagtctgatatccaagacagaagatcaatacaatcatagtaaaacttagagtgtatacttaaaatttagagagtcaaaattcatcactgtttaataataataatattaaccatgtaatcatctagttggtattcattgacgaaaaaacaaaagtaattgaaatcaaaatcaagaccgatacagaacatggagacacggaagaaaaaatgatgaatccattgttggtgtctattttcctttgttccctcaaaatattctaatgttggtggggttttttccgccatgcaaaaaacgtattgcattttattaaaaaaaaaatccctttttttttctctttactaacccgaaaatttatgtttggatagcaaaaacattccttttttacagttagaaataaataaataaaatcgtcaaatttgttaggaatttttcttctaaaaaaacaagcatacaattccgggtaatgagaaaatgtcacagatcttcggctataaatagaggagtagctagagagcatcttcttatatcaactaaactttgtattcatttccaagtatcactctaaatcatctttttcgaattcgcctcccaaggtccgtctagaaaactaaatcatcttttcgtttttgtatagatcatatcattatgatgatctcgatctctttttctgtccactcgtctacatgtgaccgctattatagttttcgatatccggttttttatgttaactccttcatatagctagattcaacgcatgtttttttatttgtaaagccggaattaattcgaccagtttcttgtatttgtttcttagagtctcttaggaatcggacatctaataatactcaactcaatcagataatcattttcttatctaaattctttgtgttattgtgttattggaacaaaaagat

SEQ ID NO: 7443 - DNA, 3000 bp, Unknown
  misc_feature (1)..( 3000): cDNA_ID_3078948_gDNA_ID_1621146_Annot_ID_173039 3000 nt of promoter + ATG
acagcctccagaggtcagttttatttccatcaaccagaggaccctaggaggacaaatcaatatttaaagttatgtttctatttgttgttgtaggtcgagtccaagagatctaggaatgttaaaactaagtcagtgtctgagacttatccagagaacagagaagaattaaagaagcaattaaaactttggagagcttcagataagaaatctccatggtatgattatcctcctaaagttaaggtaagatcacaaaccaacgagaaattctcatttcttaacctggcgttacggttgatccatgaaaaacatgtggtgtggccatattattgtgaaatgcataatattaatttttactttttattttataagaacacatgcgtttttcagactcatcatagtgcttgtaacttacattctcgattttacagacgttaacataattggaaatgccgttaattttgtactaacagcaataaacacaagacacaatataaatatataataaatagaaaaaaataaagaagcctccatctgaacgtttatttcttactaccatgacaataaaatctttgattcagaataatttcttttatttttttgttgttaagagagtcaattatccccttattattaaaagggaagtacaaattgaaattttgtctaatttggcctcaattttgattttaattttggattttgttctgtggtattcaaaatcattaagggtaatttggtcttaacaatcttctaaactttatatgatctgattgaatctaaaccgttcaataaaattaattcccttcaatctaaaccgttcaacaaaaataagtgaaataatgttatttttttatctttactttaaagacatataattataaataacataattaatatagtctttattttgccaaaaaagtgtataacctgtcaaatagttaaaaaaacacttataatcataaacaattttataccaattttgtgaatcttacatttttgtaaatattttactttcactaaaattacatacacatttttaaacacattttaacacatttctcttatcactaaataacaaccaaaaaaatcccaattattatttagttatgtttgattaaaaagtttatatttataaatttaagatatcaaattcattcaaatatttagtataagaaccaaataaaccgattgcccgcggtaaaccgcgggttaaatcctagtttattgtgaaagcccgttacgttgacgacttaaaatacaagcacgatgatgagtgatctaatcatttgtttgtgtaaatttctagaagctgcaaataaaatgatatagatttttgaaaatacctaaaatgctgatgattatgattagttgattactatggtctatgagatttctttttttttttttttggttaggtggtctacgggaatccttaaaataaacgaattgatttcttaatattgattatagttacatgaaatgaaaactatgggaacttcctgtcaaaattggtggaactagataaaaaaataaattctaaacaaatttcttatatcttttatgtttgaaggtgacaaacgaaaaggatctttaccatttgaacatgaaatttacaataggattacctcctgaagcagtcttcgatatactcactacttatgagaacccatcatacttcacaatgatgaaaaagcgccaaactctggtatttatttcttacttcctattattgtattgtttgatttgcgaactaataatagccgtacttgcgaatgtgatatttcttatgaaggaacacgtatcaagtaaagtttttagcgatcttggaccgacagagaagcacgtgagggtggaaaaagctgctccctggaggttcctttggtggtctggatctatcccggtacatctaactttcaatgagagccggaaagatttcagcgtaagaatttttctctatatataccacaaaaataaaagtttctaaagatatttatgcgcatatcaagtataattttttttttaattttgtttatgttgcttactgtggacagacactatatatgattcctaaaaagaacgtgatgttcatgaaaacgttctatggtaagtggcaaatagagccatggtacgtagataacatgcgcttttgcaagccgaggctcccaaagaatcgagaagaatatagacaatgtaccggtggaaaaggattgattggctcgagagtgacattggaccagtattttcagccttcttcttatcttaacctgccaccactttcttggtacatccgtagggccaccgtcaagaccaccaaggctctaatcgaagatcttcaaattcaggccgccgttatcagaagcgtttgaaactctttccaatccgatatttgctagttataccatttttatacaaacattaacctcaaatattggaatactgtaaaaacaatttcacgttctgtcaagaagaaagaaagaatcactttatataattccgaacatcggaatactaattggtaaaaaacccaagaatttaagcaagtctacccaaaatatttagaagttaattaattattatgcatgcataatagattcttttgtgagtatatactaatgcctcaactttatataggaacagaacgttcaaatcttgtcaactgtgaaaaaagtattttcttattttttcttgtgaaaaattgttgtggttgtaaattaaagcgaactatatacatcaaaggattgaaacgaagggacaagaggatgagttaggattcatgtagatgttgcatgtacgtcaacaactcatgaaaatcgagccgtccactttgttttgccttgtacgtaaatcataaacatttttacgtgcgttttctttcagtttctatttcctattgtatattgtctaaatctaaatcaagcttttaccttagttggatcgtcattttctcttgcctggctctaattagggtagtatcgtttatggactaaacgattatacaaaatg

SEQ ID NO: 7444 - DNA, 3000 bp, Unknown
  misc_feature (1)..( 3000): cDNA_ID_1817746_gDNA_ID_1621146_Annot_ID_173035 3000 nt of promoter + ATG
attgatagtagtccttgagagtgtgatatttttctgatgaaggaatacaaatcaagaaaggttttaaagaaagatggacggaggcagatcgtgaaggtggagcaagctttggcatgggacttcctttggtggtctggagctatcccgatagaactaattgtggatgaaaaccaaaaagaatttacagtaagaagaagcttttctcgacccttcacaattatctttgatatataagcattactaattttgttttgtattgataaagtttaaattgcgtttttcttgcttgttgtggacaggcaaaatataaaaaagagaaaatgatgttcatgaaagtattcgaaggtaactataaagtggagccactatatgtagattcagtacgcttgtgcaataataaggagccaaagagttttcaagaatacaaaacatgtagtggcggacaaggaaggattgcatcgaaagtaacaatggaccaatactttcagccatatcctccttttaaatctaccaccattttcttggttcatccgtgatataaccatcaggaccaccataaccctgctcaaaatgcttcaacatgcgagtgtcgtgttgcgagactaagtctagataacgactttataaagacttacaagcaagaaacatggaaaactataacttgaatacgcatatgtatcttttttttgtttgatcaacgaatacgcatataggcataagcatcttaattttttttttttttaattccagttgactttaggacctgaattaccttaggtctaacgcgatgctctccattccatactccatgccttgcataacaaaatgtgttgaatgaagtatttcactacctaaacgttaccagcctaccagtaataaagataccccatggaaaaactctctcgtcctttgttgaacaaaacttttgatgatctaaccgacataagtctagaattaatattattaacaataagttgatattccaataaaaatcagatatgagatcaggaaaatatagtttaaatttcaaaaaaaaaaaaaaggcaactatgttttgctgaacagtaataaatccaaaagagaatgctcatctcactgcctccaaccctaataagttgttaagtactaaaatgcttaagcttaatgttctctacatggtttagaaagatataacatcgcttaccgttaaccttcttccattccttggatctgaagtcttatgatcatgtttctcacaatattgtagtcagcataatcttctgattcttcgtctttattttgggtaaagtgatggattctctggtcctcgggttatatataacaaatgtggacactggcggcagacctaaaagacagaacacgccattgacaagaccattgaactcgtaggcatgagggacattagtaagaagacccgcagttatagcacccacgttctcatcaagattttgaggctggtgtgaggagaataagaagaattcatcttgcacaaatctaaaatgactttgaatccaaatcaccggatattctcctcaaatcttctttcttatacgtcaagaactcacgataatggagttgtgcacttctttgttgcacggtaagtaaacacatatacgtacaccattttttcagttacatgttgtattatatttcgcctaaatatgaatcaagcctttatctaagattcctaaaacttccatagataccagctttgtgtcgtcattttcctttgattagattaggttaagtttcgtctgtggacttaatatatcaaagagaattatgagtgtatttcctggatttggtggctggatcaatcagaatattcaacaacgtcctgaggtcagtttcattccatcaatattcaaagaacctgaatcttataaattatttttgttgttgtaggctgaatctgggagatctgagaatgttaaatctagtccagtgtcagagaaagacactaatctaaaaccttggtatgatgaacctggtaaggtaagagcaaatatatcagcaaaaaatataaaaaatactatatcggttaaatatagaaattagattatgtttcttgttgtagactacagctatggaacctggggatgtaaagtctaagccactgcatgaagttcatgaaagagaaaatgaagttcatgaaagtgtttgagggtagctggaaagtcgagccactatacgtagatcaggaacgcttttgcaggtctaggtcggtgaatagtcaagaagagtacaaaaaatgtagcggcggacgaggaagaattgcatcgatggtgacaatggagcttatcttttagccttctacccttcttaatctgccaccggtttcttggatcatccgtgggatcaccatcaaaatcaccaaaatgttgctagaagatcttagaaaatatgttatcatgatccacaaaagtgatgttaccacttgattagattttttttgtaaaaacacataaaaatgaaaagtctcattattttgcatatgaatccagataggaaaaaaataaaacaactaattacattcatttgaatgaacaaaataaaacagacataaccaatactatctacttatatacaaatgtatgtccaactcgactctcctattcctgaaaaataagtcgattggaaaaataagttcaatgatgaaaattattttttcgtcaataaaggatatttagtccatgctgtgaaaaaaatggaaatatttacaaagatttgagaagttggaaaacagcataatgctcatgagataataacaccttcgaagtctttttcctttatgtagctctcgcttgtacgtcaagactcacagaaatcgaactgtccactttatttttttcttgctacgtaaatttaacgtacactcccccaccaccactccctagctcaatgttctttcaatttcataaccaagctgtaatctcaaattcctcaattttctttgattagataagtatcatttgtggaccaagctttcatagtgaaatg

SEQ ID NO: 7445 - DNA, 3000 bp, Unknown
  misc_feature (1)..( 3000): cDNA_ID_1817754_gDNA_ID_1621146_Annot_ID_173033 3000 nt of promoter + ATG
gtgaaggtgaagaaagctgtggcatgggacttcctttggttctctggatctctccccattaatttaattgtcaacgaaaacaaaaaagaccttgaagtaagaagcttctctacacccctaaaactaatgaacgttttgtcttgtattggtgaaacttaacttgggtttctctttcttattgtcaacaggtaaaatataagaaagaaaaaatgatgttcatgaaagtgttcgaaggtagctggaaaatagaaccactatatgtagatgcagatcgcttatgcaagaacatgaaacctaagagtcgagaagaatacaaaaaatgtagtggcggacaaggaaaaattgcaccaaaagtgactatggaccaatattttcagccatatcctcttttaaatctgccgccgttttcttggtatattcgtaacatcaccatcaagaccaccaaaactctgctcaaaatgcttcaagatagggccaccatactgcgagagataccgtatacttaggagttagaacaaactcgatggtctttgtatattctatcacgttccatcctatttccatagtccagtccatgccatacatgatgacatgcgttgcatgcgggtcaaataaatcaaagattacttcatttcctactaaatttgaactttgtgacatacgaatatttaagctaactttgtgcttaccattaaatcagagaaatgtattcttatatttttggaatctcatatttttgctcgtctgacctcaatctgcaacactaatagacaaagttcaatgtgtggaacaaatgaataactgtcctcctaattctgacggatatgcattaaaggatctttatttcatggtataaaaaaatggaaaagttctcacgagataatacctacggtgccttctttctatattagtttttgcctgtacgtcaagaactcacaaaatccgagctgcccacttcatttcgcggtaggtaaacataacgtacactacccccatcactaacctctcgatattttctcgattccataaacaagtttcaatctcatattcctcaaactataatatatacaagaatggacagtcattagctcttgttctgattaggtaagtatcgttcatggactaaaaatttcagagagaaatgagtgtaattctggattagtggctggatttaatcaaaatatgcaacagtctcctaaggtcagtttcatttccatcaatcaaagagcccaaaagtcaaatataagctaaattatatggttaatatatcttattaaatgtcatggactaaatatagaaattagagtatatatgtatatgtttgttgttgtaggccgagttcaagaaatctgagaataatagatctaagtcagtgtcagagatgaatactaataatgtcgacgatgaggtgatggagcaaggaaaactttggagagatgcagagaagaaatatccatggtatgatgcccctcctaaagtcaaggtaagaccaaattgctaacaatattttctctcttattagaggaattacttgagttataagataaagatcccaaaaaatttcttataatttttatggttgaaggtgacaacaaaaaagggtctttgccatatgtacatagaattgacatttggattgcctccacgatcagtcttcgagcttttcactaatccagacaacttaccactcgtcagtgacaagtcttggcgccaacttctggttttctttttctcatatcattgtgtgaattaaatgtggtatatgcatattattcttacatagcaagacttggaagtgtactcttttttgttttatgaaggtaaacaaaaaaaggaaggttttgaagagggatggaccaaggcagatagtggaggtagataaagttgtggcctgggatttcctgtggtggtctggaggtatgccgataaatataaatgcggttgaaaatgagaaagatcttagggtaagaagcttctctgtatccttcgcaaaaatcaatgtttttgttttgtattgttgaaacttaacttgggtttctcttgcatgttgtggatagggaaaatataagaaacagaaaatgaagttcatgaaagtgttcgagggtagctataaagtggagccaatttatgtagatttcgagcgcttgtgcaatcagaaggagccaaagagtccagaagaatacaaaaaatgtagcggtgggcaaggaaagattgcatcaaaagtgacaatggaccaaatattttcagccatatcctatttttaatttgccgccgttcttggtacattcgtaggaccaccatcaagaccaccacgactctgctcaaaatgcttcaagatatgggtgccaagatgcgagtagacccgtacgaaagttctaattagcacaagggtgaattaggagatttgttcctaattgttacggttgtctttgtcgtcgtttctagatttagttttcgtatgtgtatataaagtttggatatacttttcttcgttttttagtttgtataaaatctataccaaaatgactataatgtttgtctctatgtaaatcaataaatttatatgaaaaatgtaatgatatgctctacatcaggtttcttcgaattcaacacaaaattgtacattaataaaaatgggggccaaatccatattatgccattttggcacaattctgaaacgttggtcaatttgtaattcctcgtttccaagtttccaacgcaagaattatatatggttatacggttttgtatctctatttcggtttatggtattaaagttgctattttattttttcctagctaaggtaggtctcgtctgtacgtaaataactcacgagaattgagctgcccgctgcattgtttggccgtacgtaaaacttaacgtacaccattctctcaaaattgcagacattttagctaaatattcttcaaatcatattatatacaattgcattgtcattatcatttgtggactatataaaatttgatagagaaataatg

SEQ ID NO: 7446 - DNA, 3000 bp, Unknown
  misc_feature (1)..( 3000): cDNA_ID_3050526_gDNA_ID_1621146_Annot_ID_173032 3000 nt of promoter + ATG
gtgccaagatgcgagtagacccgtacgaaagttctaattagcacaagggtgaattaggagatttgttcctaattgttacggttgtctttgtcgtcgtttctagatttagttttcgtatgtgtatataaagtttggatatacttttcttcgttttttagtttgtataaaatctataccaaaatgactataatgtttgtctctatgtaaatcaataaatttatatgaaaaatgtaatgatatgctctacatcaggtttcttcgaattcaacacaaaattgtacattaataaaaatgggggccaaatccatattatgccattttggcacaattctgaaacgttggtcaatttgtaattcctcgtttccaagtttccaacgcaagaattatatatggttatacggttttgtatctctatttcggtttatggtattaaagttgctattttattttttcctagctaaggtaggtctcgtctgtacgtaaataactcacgagaattgagctgcccgctgcattgtttggccgtacgtaaaacttaacgtacaccattctctcaaaattgcagacattttagctaaatattcttcaaatcatattatatacaattgcattgtcattatcatttgtggactatataaaatttgatagagaaataatgggtgtatttcctgcgtttggagcatggatcaatcagaattctcaacagcctcttgaggtcaaatcaattaaaaaaaatattattaccccatcgtataaactaaatcatatatgattctctttgttattgtaggaagatcccaagagctctgagcatgttgaatctaagtcggcatcagagatggataatggtcctgctaagatgaaaaaatactatgacgaagatgagtgggagaggcaagataaactttggacagctgcagagaagaagcatccatggaaagatgcccctcctaaggttaaggtagtaatagcaaaatcagctaacaaaatctcaagaacattttaaggaatttgtagaattcaaaataagattgacaaaacaccttttttttgtttgattgaaggtgacaacaaaaaagggtatatgccatatgcacatagaattgacattggggttgcctcctgatggagtcttcgaacttttcactaatccacataacggaccaaacaccgaaccacttctggttttatttcttatcattgaatgattcaaatgtggtattaattgtagcaatacttgaaagtgtactctttttgttaattatgaagaaaagcaaatcaagaaaggttttgaaggacgatggaccgaggcagatcgcgaaggtgaagaaagctgtggcctggaacttcagtgggaggtctattgctatccccataagtctaattgtcgatgaaaacagaagagatcttacagtaagaagcttctctataacccctaacaataatcaagatcttttgttttgtataggcaaaatttaacttcggtttttcttgcttattgtggacaggcgaaatataaaaaagagaaaatgatgttcatgaaagtattcgagggtagctataaagtggagcctgtatacgtagattcagtacgcttatgcaagaacaagaagccgaagagtgtagatgaatacaagaaatgtagtggcggacaaggaaagattgcatcgaaagtgacaatggaccaatattttcagccatatcctccttttaatctaccgccattttcttggttcattcgtgatatcaccatcaagaataccaagagtgtgctagagagacttcaaagttggagtttcagtattcgaaatccgggtgtaatcatgtcaaccaacaaacatggaaaaacagaagtttctcctaaacagtaatcggaaagtcatttttgatttcgagtgcttagaagttagaatcaatcttataaaagtcgattatttactatcaaaaacacattgcagtaacataattatttacgatcaatgccattaaccatttaagtttttggaacatattgatgaaacaaaaattaatttcttttattatatttttgggagagagatagtaaaaaatataatcgctcatgtctttttccatattattattttgcaagatattgatgctagaatttagaatattttggcacaaagccaaaaatagaattttcatcttgcttccatataaaaaatgaataaatcttcttaataagcttgtatttcaattttcaaaacaaaagttgtatttctatgaaacataaaataaggtagagcgaacccgcaatttctcttcatctcttagtagcaatggctcgaactcgaagggagccgggttcgagcaactctccaacgatgcaacggcgatgagaaagcgttttgaggtcgttttcttatcaatagggaatggattggtgtgttattccgtttgggaatctatcaagttagtacaatacgagaaacttccaagttcctagagtaccatgaaatgataccatgtcgcaaacccttcaatgaatgaattcatatgaaaagtttgtgtttagtttgtttaatgctttgaattaacaaagatctatggttgtcatgttaacgtaaacataacgcgaaagatatgtttatggtgttgaagttcctagatcacgttcatattactatactaaattactaattatgcggagttacaccaaaagggatcacatagaaaaaaatgagaaggagcgtaatccgcaaacttatcaaacctttgatctcctctttcctcaggtaggtctctcctatacgtcaatcactcacgagaattgagctgcccacttcattttttagccgtgcgtaaaacttaacgtacatcattctctcaagattatagctaagattctttaaaccatatcatatacaagctctatagctaagattctttaaaccatatcatatacaagctttgtatcatcattttctattgtcgacaattcgtaatttagcttgtggactaatctttcaaataaaaatg

SEQ ID NO: 7447 - DNA, 3000 bp, Unknown
  misc_feature (1)..( 3000): cDNA_ID_1817772_gDNA_ID_1621146_Annot_ID_173030 3000 nt of promoter + ATG
gaagaagttactatttaatattgtatcatacaaaagcgacaggtaatgcaaggaataaaagactaatgcgtctgaaaccaagatttttaaaattgagagaacattctttgttgtttttctttcttttctttttataaagaaagaacactaaagatattctttgtgatgtgtaagtgcaaggaagagagttgaactttggaacaaaaatctggaataaagtgggattttgtacaatttactctttcccaataaaattcaaaagatttatggagtgggctttaccaatcattgactcctttatattcccattactcactgttttacacacaatacgttctaattatatggtttaaagttcattgacaaaaaataaaaaaattggtttaaagttttaaacaacgtagggatagggattagtaaatagtaacgcacatttttgtgttcttttcatgccatttttgttttctttcactaaactgtgtctctttaaatagttgaatgttacctgtggttgattttgatttatcttttttttcccttcactaaattgtgccttctatctacagtatctatatcaacgctagccgcaaaggattttttttcttttaagaaaatctttcattccctcactaatcctagtgggcttataggtccattaacattcctcatgtagctcttgcttgtacgtcaagaaagaagtcacaagaattgagcttcctagttttttttttctctgccgtaagtaaacgtaccctacacacttcaccttcgcttattatttcagtttcttactatattttgtctaaatcttaatccaacttttatctacggtccctgaaaccatctctttgtcttttggcatatttccctccttaagtcaactatctctttgtctctatatcatctttctctcggacactctctttggatcgtcattttctctctatcgactaaattttaagagtggaatgggtatatttcctggatttggtggcttgatcaaccataacactcaagagcctcctaaggtcagtttcatttccatcaatatgagaactctaggaagttaaatataagtacgaatacaatatcggtcaattttagagattattagataatgcataattatatatgtttgttgttgtaggctgagaatgtgaaatctaagtcaaggtcagaaataaaaaatactgatcacgaagagagaaatgagatgaaggagcaactaaaactttggagacatgcagagaagaaagaacaatgggaagatgtccctgctaaggtgaaggtggaaacagaagatggtctttgccatgtggacatggtatttacattaggattgcctcctcaagcagcctacgacgttttgactaatcccgacaaccaatcatactcaagaataattaaccaacgccacgaacttctggtttttcttttatgttcttatcattgtatgattcaaatgagtataagagtattattatattaacaatttttgagaatgtgatatttttttcttacgaaggataacgtatcaagaaatgtgttgacggataatggatcgagccagacggtggaggcagagaaagctgtggcctggaagtttctttcatggtcgggaactatcccgataagtctagatttcgtcgaaaaccgtaagaatctttctgtaaggaacttatttctatctatcaagagaatataatcaatctttttgttcattattaattattggaaaaattaatctcgtgcttgttgtcgtaggcagtatatatgaaaaggaaaatgatgttcatgaaaagttttgagggtagttggaaagtggagccaatatacgtagattcaaaacgtttgtgcaagcaaatgaagccaaaaagtcgagaagaataccataaatgtagtggtggacaaggaaagattgcgtcgaaggtgaaaatgaaccagacctttcagccttcttttccttttaatctgccaccgctttcttggtacatccgtgatatcaccatcaagattactaaggctctgatacaagatcttcaagatatgggcgccaagctccgaggcgtttgaaatgccctcaaacattcgataggtttctaaatcactatagtataaatccgaagaggacaaatactaatctttataatcacttcattcatcttaacaagtgtattctttataccgaataaaaaaaatgagtatcgtgttaaatgttaatattaacaagtaaatattgggaaaaaaaaactgtattattttagcatcttttgaagggacatctgcaaaataaaaatctaaacctatagtcgtttcaactaaaaaaatctgattaaatttgaactggtaattaagcatattctaaaaatgaaaagtaaaaaacacctaaagctattaattcgcaaacatatgtgtaaagtaaacgtgattcgcaaacatttttaaatctgttatactcaaattttaatcaaacgtttttttagaaaccctcacaattatttatgaaactgctacattttggatttgagttttgcaattttctctcatatgatattaaaaggtcaatgaacatattttttaacaccagtcaaaaatagtttgggaaaattcacgtggactatacatacttttcattcttcttgtaattacggatataagttcatgaactcggatttcacgtaggacacagcagaaacattcctcatgtacctgtcgcttgtacgacaagaaagaagtcacgagacatgagctgccctgtttctcctttttttttatggtaacgtatggtacaatccaccttcggtattctctcaatttcatattacatttttgtctaaatctgaatccatcttttttatctaaggtccctgaaaccttaaattgtgccgttgacttcttttcctctgtaagtcaactctctgtttgtctctacatacatccatccatctatctttggatcgtcattttctctttgtggactaaagtttaagagagaacatg

SEQ ID NO: 7448 - DNA, 3000 bp, Unknown
  misc_feature (1)..( 3000): cDNA_ID_3050534_gDNA_ID_1621146_Annot_ID_173026 3000 nt of promoter + ATG
cagagtgctatggagggtataagctttttgtcattaacatacaaatatagtcggattaactaatttcggaacttctaatgcgttatttgcatttgtgttgatctatatggctaatcttggatatgtataatgatgtgtaggtttggccatttcaagattttggaccacttggaccaaccccaacttagcatatgagttagcttggtcattaggccgatgagatcaccgaggcatattggtagtgtggttaatcgctgttgccgagtgagtctggctcttgattgactatgagatgcaggatcatcataccatccacaaagatgggagaatctaaacgctcaggaaaagtgagtatatggtttagactttagagcaagtaacattatgtattttggtctgtcactctatctgagagtggcctctgtatcaaaaagttaaaacaaagatctattgtggacctggacatggaatcggtatatcatcaaattcctagataatatccttttcaaaccaaattataattctctttttgcaaaatctttggaatgatcgcagcattgaaagtcttgggaaggataacacgacaggcattgtaacacaagttgtcttggacactgcgttgttgagagagacaactaatggactcagaatcaaaacataccaggtaaacaactaaaagcttgatcaaatctttaataaaacttcgatttggtttgatccgcatcaattttttctcttacgagcagggaggttctggttacgttcagggtattcgattcacaaacgtagagatgcaagatgttgcaaaccctatactcatcgatcagttctactgtgattcttcaactacatgttaaaaccaggtttccttataatatacaatacaaacttgtaattgtgattcttatatcgaaccaatactcagttatgttctcttcccttttttggtataaatgcagacctccgcggttaaaatcagccatataatgtaccggaacataaccaaaagtgcgaaagccatcaaatttgcgtgcagcgacacagtcccttgcagccacattgtcctcaacaatgtgaatcttgaaggcaaagacggtcaagtcgaagcgtactgtaattcagctgaaggatttgggtatggagtctactcgcacaacgacaaaggcttggaccagactcacaagtcagaggaagccgagactggccacgatgagctttgatggtgatgttcaaagtgttgttgtagtgagggatgataggtaaaatagtttaatgaagcatatggtacagtaaaatgatcttatgtttgtgttcataatcaaccataactaaggttgttgttaacagcatttgtccaccttttgtatcaaatatttttctttccccatacaaattcatgtgcaagtattttttcaacataaatttttgaacttggaagtttattgtttatgaaactgaaatacgtattgatatcggaaactaagttatatagtagatgtttagataagttagttaattgtcttagactttgggattagaggaacaagaacaacacatcacatggggactccaaaggtcgcaattgatatgaattgtttgatatgtctgtcacgtgtgaaaaactcttcctttcttcacaattatcattttctatatatatatatatatatatttgtcaaacaattattttctaattaatattcccaatttgtgtgtagctgtaaacatcaatgaccaatgccaacccattttatttactctttcaataacaactcaacaactacatcacctaagaataagatatagtcttggcttgcaatttgcctgtaatgtgaaatcaaatgatcgattatatggtataataatataatgataacatattaattccctcatatggtatgaatagtgaattggttttgtctatatccataagaatgaaaataaagaaataatttccttaaaacaaagaaataaccaaactatatgctataatggacccggagaatctaagtcgtgcgagaataatgattttgtttaccattaaaaacaaataattgttcatgctcattccatttccaaattattctgaacaaacaagatagagagagtgcaagttgtaagaagcagattttttttggtttttctctaaaaccaaactaaggagatctctaagttgtggcagagaagaaagcttctaaggtaaaatcacaaactctccactttttccaatatcttattgactcatattgcatttgctttcaagttctgataaatctctaaaaggtttatgacttttagaattactctttttgatatttaaacacattgttcatatgactatgcagatccagatcattgttttttttccagcttttgaaactaaacattcacaaatccaaccctacatcatattccttgtgacaacattgttgtttttttgttgtctatatgtttttcaagtaatacaagtatagaaaaagctttatctacaatattttcatcctgaaaagaagccaaaagcaaatttgttacaacattcttgataaaataacacgtcattagagaattaacaaagttttgaagcagagggaggaatgttcaatactagaaaattaagaccaaaaagtcaacatcacttttataagagaaaaaaacgagtacaactgtaacatttacttcgactttatctacgagagtattgaacaagtgggatgcaattgacaacctaaatcatggctcatagttacaaattatatatgactaatcattttccttttctcttaaagttgtttatagtttagacaataataataggagatgaagagaatgtgatgctactaactcttatttaaatgaggaatataaacaagatctggtcctgacattgttatgaatcttcaaactcaggacacaaaccaagatctcgtgtagaggaaaaaaaacctttcctccatgtttaagttttgagcttctggttggtttcaagtcctgtggagaaaa

SEQ ID NO: 7449 - DNA, 3000 bp, Unknown
  misc_feature (1)..( 3000): cDNA_ID_3050534_gDNA_ID_1621146_Annot_ID_56735 3000 nt of promoter + ATG
tggacatggaatcggtatatcatcaaattcctagataatatccttttcaaaccaaattataattctctttttgcaaaatctttggaatgatcgcagcattgaaagtcttgggaaggataacacgacaggcattgtaacacaagttgtcttggacactgcgttgttgagagagacaactaatggactcagaatcaaaacataccaggtaaacaactaaaagcttgatcaaatctttaataaaacttcgatttggtttgatccgcatcaattttttctcttacgagcagggaggttctggttacgttcagggtattcgattcacaaacgtagagatgcaagatgttgcaaaccctatactcatcgatcagttctactgtgattcttcaactacatgttaaaaccaggtttccttataatatacaatacaaacttgtaattgtgattcttatatcgaaccaatactcagttatgttctcttcccttttttggtataaatgcagacctccgcggttaaaatcagccatataatgtaccggaacataaccaaaagtgcgaaagccatcaaatttgcgtgcagcgacacagtcccttgcagccacattgtcctcaacaatgtgaatcttgaaggcaaagacggtcaagtcgaagcgtactgtaattcagctgaaggatttgggtatggagtctactcgcacaacgacaaaggcttggaccagactcacaagtcagaggaagccgagactggccacgatgagctttgatggtgatgttcaaagtgttgttgtagtgagggatgataggtaaaatagtttaatgaagcatatggtacagtaaaatgatcttatgtttgtgttcataatcaaccataactaaggttgttgttaacagcatttgtccaccttttgtatcaaatatttttctttccccatacaaattcatgtgcaagtattttttcaacataaatttttgaacttggaagtttattgtttatgaaactgaaatacgtattgatatcggaaactaagttatatagtagatgtttagataagttagttaattgtcttagactttgggattagaggaacaagaacaacacatcacatggggactccaaaggtcgcaattgatatgaattgtttgatatgtctgtcacgtgtgaaaaactcttcctttcttcacaattatcattttctatatatatatatatatatatttgtcaaacaattattttctaattaatattcccaatttgtgtgtagctgtaaacatcaatgaccaatgccaacccattttatttactctttcaataacaactcaacaactacatcacctaagaataagatatagtcttggcttgcaatttgcctgtaatgtgaaatcaaatgatcgattatatggtataataatataatgataacatattaattccctcatatggtatgaatagtgaattggttttgtctatatccataagaatgaaaataaagaaataatttccttaaaacaaagaaataaccaaactatatgctataatggacccggagaatctaagtcgtgcgagaataatgattttgtttaccattaaaaacaaataattgttcatgctcattccatttccaaattattctgaacaaacaagatagagagagtgcaagttgtaagaagcagattttttttggtttttctctaaaaccaaactaaggagatctctaagttgtggcagagaagaaagcttctaaggtaaaatcacaaactctccactttttccaatatcttattgactcatattgcatttgctttcaagttctgataaatctctaaaaggtttatgacttttagaattactctttttgatatttaaacacattgttcatatgactatgcagatccagatcattgttttttttccagcttttgaaactaaacattcacaaatccaaccctacatcatattccttgtgacaacattgttgtttttttgttgtctatatgtttttcaagtaatacaagtatagaaaaagctttatctacaatattttcatcctgaaaagaagccaaaagcaaatttgttacaacattcttgataaaataacacgtcattagagaattaacaaagttttgaagcagagggaggaatgttcaatactagaaaattaagaccaaaaagtcaacatcacttttataagagaaaaaaacgagtacaactgtaacatttacttcgactttatctacgagagtattgaacaagtgggatgcaattgacaacctaaatcatggctcatagttacaaattatatatgactaatcattttccttttctcttaaagttgtttatagtttagacaataataataggagatgaagagaatgtgatgctactaactcttatttaaatgaggaatataaacaagatctggtcctgacattgttatgaatcttcaaactcaggacacaaaccaagatctcgtgtagaggaaaaaaaacctttcctccatgtttaagttttgagcttctggttggtttcaagtcctgtggagaaaaatgtcaccatttttgaagttctttctctttctctatgattatctttcaccttcctctttctttctggtaaatcatttcatctctctctgttttacatactcttgatgattcttgatttcacaatttatttaatcctttttttttcttggttttgtggggtttaaggtccaaagaaataccttaggagcatcattagatactacagatggggttgtgagaagtggcataattggagagattatatacatttggaagcagacaagaatctttgtctttataccaatcttgaaatgcttagtgacaatatgtttggtaatgtcccttttgttgttcatagaaagagtttatatgagcatagtagtagtgtttgtgaaattacttagacgaacacctgagaaagtacacaagtgggaacctataaacgatgatgaccttgagcttgccaatacaaactaccca

SEQ ID NO: 7450 - DNA, 3000 bp, Unknown; identical to SEQ ID NO: 7447
  misc_feature (1)..( 3000): cDNA_ID_1817772_gDNA_ID_1621146_Annot_ID_56738 3000 nt of promoter + ATG

SEQ ID NO: 7451 - DNA, 3000 bp, Unknown
  misc_feature (1)..( 3000): cDNA_ID_1817765_gDNA_ID_1621146_Annot_ID_56741 3000 nt of promoter + ATG
tagaatttcttgattattctggagatttgtaatgttcaagctctttacaagtttcccaaaagggatcctctgtttttaccactaacggaaactacaccttccaatagaaaaaaaaaatgcatcaaatctctcatatagttccttccacgttttgattgaagcttgtcctatatacgtgtgtgatcttctattgatttttttcttctcacctttcacacgtgtggaacttctctgcaagtaatagaagaagaaaaaaaaggtcaataatattccagaaagtcaaagacatttcttaatattcaatatgtaacaaaagcaaatgaatggactgaaacattgcatgagttggatcaacaatcaacacacgtctaaaggtatataatctgatgtggtgtttgacaattaaaaaggtcacttttcatatatatacccaaataaaagtttaacaatccttgctccataagtaagaataagaacttccactttacattaaattgattagttgagaataaataaagactcttgcttacctcatgtttttttttttttttttaattcgtgaccttgtttctgtttttgtgattcttgattatctcagccaaaagattatctccagccacttctctcatcttccttaccaattggtctctcctaatcttccgtttctgcaaaataaacccacattgaatcttaaccaacgaacttcaagaataatagaacagaacatacagtaaggaaactggattacatacccgaaaatcatcgtaagttcggatgatcaagttcattcttgaaggatccattgatgtagacaacattgacatcaaggaagcaaaactaacccacggcgagcttggtctcgaagcaaaaccacctctactcactgaaaaaaatacaccaaccaatcctttagcactatgtaatcaccaataccaagagaccttaaagaaagaaagtgtttataacctctcagtctaggagacctaaaactgacgatataactcggaagaatacacgaattcatgttacaactccaaatcacatagtttctaggattgtgtaaatcatccacaccagaatcaaactcagcagaactcggatacgattgtttagagccggagatgattatctcaggtttccctaagattacacggcataacagaagatatcgtaaaccttcttcatcttgctctgtagctgaagccctgcaaaaatagctttcactgttacatcatcaccaccacacacaataagaaaaacaaacctagttaaactcatgttgattataaatcaaaatcaattcaaaatttctcagaaactagctataatccgagttattagctcaaaattacgacgaaaatcagtagagagatctcaggcttacgcaagtagagaacacttggaaggaaccaaatggattccaattccatgagaaccaccatcattttcaaattttccaacatcacgattgctaaatccgtaagagatgattctttgaatctcatctctagaaccagcgtaccaaccatatttcacattagcatctccgccgtgtttcctcgcaacagcgtcagtgaaaatcctaaacgccaaaaacttggctctcgtcgtgattcctcgttccgaagagtttttactaatcgtaacgatcgtcgtgtcgctagaaacaacacccattcccgagagtaaacacgtcttgataacgtcgtgctctgggtttccttcgccgagaaggatcagtgaagaggaagagaaagaagatccggcgtgagaaacagaagaatcagcatcgtcggagattgaatcgaatatttcgccattatcaaggttggtgacggacgtttggtcctcaatttcgacctgcgccgccattatcacccccaaaaaagaaaaaacagagtctagaagaaagtgcgagagagaaagagaagtattcttggggagaaggaaaaaaaaaaagtggagaatgaagaagaaagcaagtgttctttttttttacaggtgaaagaaaaagggtcagaatcgtcgttctccgtataaacggtttttgttaagcggtgccgttacttttctgcttgcacgacaagatttttgttttcttcttaaatgactatattacccctatactaagatcacgttacttgccacgctaaggaaattatggcttggcgttgttgttatcatttttaacgacgtgtcatctaattgaggattagtttgtttttaagcttatagattgaaaacaaaatatcttcgtaatgaacatttacgatatggaaaattaatataaatacatggttgaatttgattggagaagaagaaaaagaaagataggatgatcagataaatatagcaattttaggtattaaatttggtaaatgtgataggtgttccatttaaagctatgccttgctcgggtggctaaagttttgttttacttctttgataggaaaaatatcataaaatcggaacagtagtacacgcccttgataaaggtccatctattccattgtaatgggctttattatcatgtccttaataaaggcccatctagatttcacatcatcgtggtagaaagttcttcaatgagattacccgggtcgggtcgcaaaaggtccgattaaactttaaaagatttcgttgaatttacgcggtaacccgagaatcaaggtgtgtcgtcccaaaagaaacaatacgatgaggaaaaaaaaaaaaaacagagacgacgacgacgtgccttcgactattatcatcatcatcatctatgatcatggcgattttttgttagattcgtttttattttatttttcctgggaaaaggaaagtttgagggagagagaagagacctttagaaattaaagtctgtacattttctcctctctctccaccttgtttctcaaggtcctgggaattttataaaccctagtttttgccttagaaaaaatccatcattaaattaaattaaactaagctagttttttccttagaaaaaaaaaaatg

SEQ ID NO: 7452 - DNA, 3000 bp, Unknown
  misc_feature (1)..( 3000): cDNA_ID_1817762_gDNA_ID_1621146_Annot_ID_56742 3000 nt of promoter + ATG
ccaaaaaacagaacaagtctcattaactaaaactttacagtcataagatagatttaacgaaaaggaggatttcattattgcctgagcttcatattcatcatctagaagaatatttgctgactttatatctctgtgaatgattttcggatgacctgtaaaataaaacaaggatatgatttttggcttctgtttaaactatgaagtgcataaccaaagcacacaactaagaaaatgtgaaggcattacttacagtcttcgtgaagatatgccaaccctttggctgatcctatagcgatccggactctcttagaccactctaaaactggcaaaccctttcctaaagcgtaaagcgagtcagtctaacacgtaaagctaaaaaaaagtcttatctataacgaaaatggtaacaagtcactcaccatgcaaatgatgctccaaggtttgattagaaacatactcatagataagcaatctatgctggtctgaaatgcagtaaccaaccagagagaccaaatggcgatgatgaacgcggctgatgatctcaacctctgctttgaattcacggtcaccttgtccacttccagctttaagctgcttaaccgcaacaactttaccatcctgcaatgtacctttatagacacatccaaatccgccttctccaagaatgtttttgcgagcaaagccttgtgttatctcagcaagctcttcgtaactgaaatgagtctggccacttccgagtatagcagagtcaggtgtgccacttgattgcatttgatgatgaggataaccaccaccagctgtaccataactgtttcccatagaggattgttgttgctgtgaattgttatacattgaaccattaggaccagaggagtatcctttacctggatcttgaccgtataagaatccatctacatcaaaagcaaagatagtcagagagatgattcaagcacatagaagatgatcagagagagataaaggtgagatttttaaacctgatttaacagagaaattgggatgtggcaagtactgtgagtgattatagctatcaatgtttctctttttctttcttctcactaagaacacaacgcctataagcgccatgattgcgaaaccggctacagccataccaaccatagtcttcccttgatagccgccaccaccgccaccgccatctccattgccttggtttggagtaggagttcctttactaggggatgtgagagatggagacaccacaggtccactagaaggagttttgggtggtactgtggggaatgggctcggcggagcgttgggattagccggaggagaagtggctggtcctgatggttgtattgggggaggattggtagggtctaatggtgaagctggcggtgaatttgtaggatctgatgctggtggagctggaggagattgtaacggtggtgattccgggtttgtgggtcctacattcggcgacggcgacgatggaggaggcgattgaagatcttgagacggaggagggttgttgtcattggattcatttggtggagcaggtggtgtttcggaatcttctggaggagaaggagattcgtttgacgtcggtggcggcggagaaggggttgaatcaacgggtggagaagaatcggaaggtggaggtggagaatctgttagcggaggaagaatcgaaggtaaaggaggaagctgtgaatctggaggaggagtggatggttctgacagcggcggtgttgatgatgaatcagctggtggactaggaggagaggaatcaacaggtggaagagctgagttttctgatggagtctctggtggaggagcggtatcagctggtggtgctggtggtgaagaactcggcgactcgcctaagtctgacatttttttttttctaaggaaaaaactagcttagtttaatttaatttaatgatggattttttctaaggcaaaaactagggtttataaaattcccaggaccttgagaaacaaggtggagagagaggagaaaatgtacagactttaatttctaaaggtctcttctctctccctcaaactttccttttcccaggaaaaataaaataaaaacgaatctaacaaaaaatcgccatgatcatagatgatgatgatgataatagtcgaaggcacgtcgtcgtcgtctctgttttttttttttttcctcatcgtattgtttcttttgggacgacacaccttgattctcgggttaccgcgtaaattcaacgaaatcttttaaagtttaatcggaccttttgcgacccgacccgggtaatctcattgaagaactttctaccacgatgatgtgaaatctagatgggcctttattaaggacatgataataaagcccattacaatggaatagatggacctttatcaagggcgtgtactactgttccgattttatgatatttttcctatcaaagaagtaaaacaaaactttagccacccgagcaaggcatagctttaaatggaacacctatcacatttaccaaatttaatacctaaaattgctatatttatctgatcatcctatctttctttttcttcttctccaatcaaattcaaccatgtatttatattaattttccatatcgtaaatgttcattacgaagatattttgttttcaatctataagcttaaaaacaaactaatcctcaattagatgacacgtcgttaaaaatgataacaacaacgccaagccataatttccttagcgtggcaagtaacgtgatcttagtataggggtaatatagtcatttaagaagaaaacaaaaatcttgtcgtgcaagcagaaaagtaacggcaccgcttaacaaaaaccgtttatacggagaacgacgattctgaccctttttctttcacctgtaaaaaaaaagaacacttgctttcttcttcattctccactttttttttttccttctccccaagaatacttctctttctctctcgcactttcttctagactctgttttttcttttttgggggtgata

SEQ ID NO: 7453 - DNA, 3000 bp, Unknown; identical to SEQ ID NO: 7445
  misc_feature (1)..( 3000): cDNA_ID_1817754_gDNA_ID_1621146_Annot_ID_56745 3000 nt of promoter + ATG

SEQ ID NO: 7454 - DNA, 3000 bp, Unknown; identical to SEQ ID NO: 7444
  misc_feature (1)..( 3000): cDNA_ID_1817746_gDNA_ID_1621146_Annot_ID_56747 3000 nt of promoter + ATG

SEQ ID NO: 7455 - DNA, 3000 bp, Unknown
  misc_feature (1)..( 3000): cDNA_ID_1817742_gDNA_ID_1621146_Annot_ID_56748 3000 nt of promoter + ATG
gagtggagcggtccatatttgatcccgacggatcatctttagaaaaagaaattccgatcaaagcaatccgactagtaagtcaagttgactaatcctgattccgcgagggcacgcatcagtcttcaatttatcgacctctcgactactaaatacatacaaaataagggaaataacttctttgtttattcaatacgtaaaactcacgagaatgaagctgcctactactttgtttctccacacgtaaaacctaacgtacaccattatttcagttttatattgaaattttctaaatttgaaccaaacttttattactcaatccacaatatatacaaacgtactattttatgctcttgttctgtctgattaggtaaacatcgtttgtggaccaaaacttcagagcaaaatgagggtattttctggatttgatggctggataaatcagaacattcaagaacctcctaaggtcagtttcatttccatcattcttagaactcgacaagtcaaattagtataaactattataaattatgttcgttattgtagggtgagtccaaaagatttgtggatgttaatactaattcagagtcagagaaagatagtaataatcaagaactagtctatgacaaagaggaaatgaagaagcaatatgaactttggagtgcttcagagaagaagcatccatggtatgatgcccctccgaaggtcaaggtaacaaaagcaaatagcctaacaacatctcaatacttattttagaaagaattactaggagaatcctagtaaaaaaaaagaaaagaaaatttacttatcttattacggaagttagcatattctctagggttaaacttggctctaaaaccatgccaatattgtgaacttgaaagtattgagtttattgatgtatgttaatagtattaacacaagagataatactaggagtgacctcgaaaatatgttaacttccctaagaaaatgagttcaatttcttttcttttttttactagctaggattcctaaaacgaattggtagattcaacatccgagaaacaattctcgcaaaaaaaaaaaaacggaggaaaggattctcggattttatgtatatttggcttgaaagggtctgagaaatcaactgcactttagatggccttgtttttgaaaaaaaaaaagaaattggcaaggaaactacctaggcttgacgaaagctcttttctaaagaacaacaatcttaatttgttttgtttattttgaaggtgacaacaaaaaagggactatgccatatgaacatagaactgacattaggctggaatcctaatggagtcttcgaacttttcactaatccaaatgatggcccactcttcttcgatatgaacaagcatgggcgtcaacttctggattttgttccctatcattgtatgtttcgaatgtggtattattgatagtagtccttgagagtgtgatatttttctgatgaaggaatacaaatcaagaaaggttttaaagaaagatggacggaggcagatcgtgaaggtggagcaagctttggcatgggacttcctttggtggtctggagctatcccgatagaactaattgtggatgaaaaccaaaaagaatttacagtaagaagaagcttttctcgacccttcacaattatctttgatatataagcattactaattttgttttgtattgataaagtttaaattgcgtttttcttgcttgttgtggacaggcaaaatataaaaaagagaaaatgatgttcatgaaagtattcgaaggtaactataaagtggagccactatatgtagattcagtacgcttgtgcaataataaggagccaaagagttttcaagaatacaaaacatgtagtggcggacaaggaaggattgcatcgaaagtaacaatggaccaatactttcagccatatcctccttttaaatctaccaccattttcttggttcatccgtgatataaccatcaggaccaccataaccctgctcaaaatgcttcaacatgcgagtgtcgtgttgcgagactaagtctagataacgactttataaagacttacaagcaagaaacatggaaaactataacttgaatacgcatatgtatcttttttttgtttgatcaacgaatacgcatataggcataagcatcttaattttttttttttttaattccagttgactttaggacctgaattaccttaggtctaacgcgatgctctccattccatactccatgccttgcataacaaaatgtgttgaatgaagtatttcactacctaaacgttaccagcctaccagtaataaagataccccatggaaaaactctctcgtcctttgttgaacaaaacttttgatgatctaaccgacataagtctagaattaatattattaacaataagttgatattccaataaaaatcagatatgagatcaggaaaatatagtttaaatttcaaaaaaaaaaaaaaggcaactatgttttgctgaacagtaataaatccaaaagagaatgctcatctcactgcctccaaccctaataagttgttaagtactaaaatgcttaagcttaatgttctctacatggtttagaaagatataacatcgcttaccgttaaccttcttccattccttggatctgaagtcttatgatcatgtttctcacaatattgtagtcagcataatcttctgattcttcgtctttattttgggtaaagtgatggattctctggtcctcgggttatatataacaaatgtggacactggcggcagacctaaaagacagaacacgccattgacaagaccattgaactcgtaggcatgagggacattagtaagaagacccgcagttatagcacccacgttctcatcaagattttgaggctggtgtgaggagaataagaagaattcatcttgcacaaatctaaaatgactttgaatccaaatcaccggatattctcctcaaatcttctttcttatacgtcaagaactcacgataatg

SEQ ID NO: 7456 - DNA, 3000 bp, Unknown
  misc_feature (1)..( 3000): cDNA_ID_1817738_gDNA_ID_1621146_Annot_ID_56749 3000 nt of promoter + ATG
aaagggtctttgtcatatgaacatagaaatgacattgggcttgactcctgatggagtctacgaacttttatggacatgaatggccgcccgcttctggttttttcctatatcattgtatgttttgaatgtggtgttatttatagtagtacttgagagtgtgatattttctgatgaaggcaaccaaatcaagaaaggttttgaagaaggatggaccgaggcagattgtgagattgaagaaagctgtggcatgggactttctatggtggtctggagaatttccgataaatctaattgtcgatgtaaacaaaaaagatcttacagtaagaagcttctctaacccctgacaataatcaatatttctgtatgtttgttctgataaacatcactatctttattttgtattggtaaaatttaacttagatatgttttgcttgttgaggacaggcaaaatataaaaaagagaaaatgatgttcatgaaagttttcgaaggtaactggaagatagagccactatatgtagattcagtacgtttgtgcaagcaaagggagccgaagagtctacaagaatacaaaaaatgtagtggcggacaaggaagggttggatcgaaagtaacaatggaccaatattttcagccatatcctccttttaatctgccaccaatttcttggttcattcgtgatatcaccatcaggaccacaaaaaccctgctcaaaatgcttcaacatgcgagtgttgtactacgagagtgagtctctagataacgatgttataaagacatcaagcaacaaagatgaaaaacgctaacctaaatggtcacacataagtatgttgtaagttctaacaaagctctttaccaatatatcttatacaacgtcaaagcatgtaaacggttcaaccggatgagtcgcgacgtgaatgagtcacgacgtgaatgagtcacgacgtgaatgagtcacgacgtgaatggtacggaaactgcttcttgtcaaaagcatgtttttaatgatcacaaaaatgtttcatctcaacaccctttgatctctatatactcaaataaaaccaactgaaattaaggacaaaactcttaattcccaaataaataaaaataaatagagttcaaaaacaacgaagaattctaaataacccaaaaacctataacctataaaccaattgtagtgatgtccaaaaaaaaaaaaaagtcaaaattttttaaaggtaacttcaatcatgggatgatagcttcttttgtgagtagacggaaataagtttttaaatcttctgaatattgaaaataaatgattccatttaatttttctaaattgtgaaataatttgacttgaagggacaagaggaaaatttagaatttaggattcatgtaggagccctgtacgtcagaaactcataaaatttgagctgcacgttttagttttcccttgtgccttcttatacgtttctttcgagttctctttcattttctattactctgattaggataatatagttttggactaaactttgagaaacaaaatgagtgtaactcctagatttagtgggtcgatcaatcctcatgttgaagagcctcatgaggtcagtttcatttctataatcacagaactcaaggaagtcaaatcaaatgtagaatagtgtttgttgttgtaggtcgagtccaagagccctgcatctaattctgtgtgggcggtagatcctaaatattatgacttagctgaggtaaagaaggaatcaagactttggagagctgctgagaaaaaacatccatggtatgatgctccagctaaggtgaaggtaaagaccaaatttgcaaacaaaatctcaataccttttagttttttattgcctttaagaggagttactaacattaagagaaaatatctaaaaagtttgttacatttttggatgttttaaggtgacaacaaaaaagtgtctttgccatttgaacatagaattcaaattgggattgcctcctgaagcagtctatgagatgttcactaatccaaacaactttcctttcttcaaagaggataaggccgggcgccaacgtttggtatgtcattttaatatagttgtaaactgagtattagttaattgaagcaagaattgagagtgtggtcttttttctaatgaaggaaaacaaatcaacaaaggttttgaagaaggatggaccaaggcagaccacggaggtggaaaaagctttgtcctggaactttcttgggtgttcagtagatatcccaatacatcttataattcacgaaaaccataagaatctaacagtaagaaagcttacagatatcctctaagaaaatcagttgtttaatttgttcagttttggatgtattaactagtgtttgatcaataaatcttgcatataggcaaaatatacgacaaagaaaatgatgttaatgaaagtgttcaagggtagctggaaagttgagccagattacgtagatcaggaacgcttgtgcaagtcaaggtcgccaaaaagtcgagaagaatacaaaatatgtagcggtggacaaggaaaagttgggtcaaaagttacaatggagcagatttttgagccttcttctcttcttaatcgaccaccggtttcttggatcattcgtgggatcaccatcagaaccaccaagattctgctcgaagatcttagaaaagcgggtaccactttacgagaagtttgaaaagccccaaaatcgaaataaacaaaacaatataaaacttatctcggtaaacagtttattcaaaagggaattctaataggggaaaatataaaattcataattttttagtactacaaaaccatatcaagtatatttttaggtatcttgtttatgtgaatatttttgttgtttttttggtaaaaaggttaccattaaactaataaaataaactgaacaagcctttgggacagctaatgtggatacttgacactcgtcattcaatatactcaaacaatatcataaagatctcaagcagctaacatg

SEQ ID NO: 7457 - DNA, 1588 bp, Unknown; identical to SEQ ID NO: 7435
  misc_feature (1)..( 1588): cDNA_ID_3050538_gDNA_ID_1621146_Annot_ID_173025 3000 nt of promoter + ATG

SEQ ID NO: 7458 - DNA, 3000 bp, Unknown
  misc_feature (1)..( 3000): cDNA_ID_1817735_gDNA_ID_1621146_Annot_ID_56750 3000 nt of promoter + ATG
gaatattatgtaaaattattcggaaaaaaactgttttacatctagtgcaacttgtgtttgatcagtttttgagattaatttacaaatataaagaaagaataagagactaataattattttgaaccaaaccagacggccatacagcctgcatatcttctatcaccagccaatccatggatagaggatattctgtttcgggtttgtttgtcaagtgtgcgagttaggtgggatgaggggagaggcattcatcgatcacagtaattccccgctacaccctctcaaacgcaatggaaagaaagaaaggacgaggtcttgaccgtcataatattttacattcgagttaggtatagttcaattaattctctaaatagtgacattttcgtcattcattactcaaacaaaactcataaatatttcaagcaacaaacattgcaagaaaactacaaactggttcccacggcaagctaattaaatccaaggtagccaatgattgaaatatcaggaaaataggaggctttaagtttggtactgatggaagtatggaacttcgggacgaaatattaagcaaatgtatattttatcagcattcacgaaactatttagtatttattctatagttaaataaataaaaatcaatttgaccatatgcgaatcaacttgaagagaaaaaaaaaaatctatcaaagcgactaatgagtcgagttgacatattctgattccatgaaagcatgcgccagactctaatctatcaacctcttgaccactaaatccataagaaataagtgaaataacttctttgtttcttcaatacgtaaaactcacgagaatggagctgcatggccatttcttttgtttctccttacgtaaaacataacgtacatgcaccattatctcagtttcatcttgattttttttttctttctaaatcagaatcaagctttaatctaagattcatcgaaccataatagattaatagatactgttttgatcctcatttgcatttgctctgatcaggtgagtgagtatccgtttgtggtaacgaaattcagaaagaaatgagtgtatttcctggatttggtggctggatcaatcagaacatccaacagcctcctaaggtcactttcatttccatcaatatatcagagaacctgaaaatataacaaaataaactctgtttgttgttgtaggctgagtccaggagatctaagaatgttaaatctaattcagtgtcagagaaagatactaataatgaggaaggactaaattatgacgaagaggaaaccaagaggcaaaatgaactatggaaagctgcagagaagaagcatccatggtatgatgcacctcctaaggtgaaggtaacaatagcaaatcagataacaaaatctcaatacttggatcttttaaggaattggtgaagaaaagagcttaaaatttttcttatatttttgatgtttcaaggttacaacaaaaaagggtctttgtcatatgaacatagaaatgacattgggcttgactcctgatggagtctacgaacttttatggacatgaatggccgcccgcttctggttttttcctatatcattgtatgttttgaatgtggtgttatttatagtagtacttgagagtgtgatattttctgatgaaggcaaccaaatcaagaaaggttttgaagaaggatggaccgaggcagattgtgagattgaagaaagctgtggcatgggactttctatggtggtctggagaatttccgataaatctaattgtcgatgtaaacaaaaaagatcttacagtaagaagcttctctaacccctgacaataatcaatatttctgtatgtttgttctgataaacatcactatctttattttgtattggtaaaatttaacttagatatgttttgcttgttgaggacaggcaaaatataaaaaagagaaaatgatgttcatgaaagttttcgaaggtaactggaagatagagccactatatgtagattcagtacgtttgtgcaagcaaagggagccgaagagtctacaagaatacaaaaaatgtagtggcggacaaggaagggttggatcgaaagtaacaatggaccaatattttcagccatatcctccttttaatctgccaccaatttcttggttcattcgtgatatcaccatcaggaccacaaaaaccctgctcaaaatgcttcaacatgcgagtgttgtactacgagagtgagtctctagataacgatgttataaagacatcaagcaacaaagatgaaaaacgctaacctaaatggtcacacataagtatgttgtaagttctaacaaagctctttaccaatatatcttatacaacgtcaaagcatgtaaacggttcaaccggatgagtcgcgacgtgaatgagtcacgacgtgaatgagtcacgacgtgaatgagtcacgacgtgaatggtacggaaactgcttcttgtcaaaagcatgtttttaatgatcacaaaaatgtttcatctcaacaccctttgatctctatatactcaaataaaaccaactgaaattaaggacaaaactcttaattcccaaataaataaaaataaatagagttcaaaaacaacgaagaattctaaataacccaaaaacctataacctataaaccaattgtagtgatgtccaaaaaaaaaaaaaagtcaaaattttttaaaggtaacttcaatcatgggatgatagcttcttttgtgagtagacggaaataagtttttaaatcttctgaatattgaaaataaatgattccatttaatttttctaaattgtgaaataatttgacttgaagggacaagaggaaaatttagaatttaggattcatgtaggagccctgtacgtcagaaactcataaaatttgagctgcacgttttagttttcccttgtgccttcttatacgtttctttcgagttctctttcattttctattactctgattaggataatatagttttggactaaactttgagaaacaaaatg

SEQ ID NO: 7459 - DNA, 3000 bp, Unknown
  misc_feature (1)..( 3000): cDNA_ID_1817733_gDNA_ID_1621146_Annot_ID_56751 3000 nt of promoter + ATG
gaacatcggaatactaattggtaaaaaacccaagaatttaagcaagtctacccaaaatatttagaagttaattaattattatgcatgcataatagattcttttgtgagtatatactaatgcctcaactttatataggaacagaacgttcaaatcttgtcaactgtgaaaaaagtattttcttattttttcttgtgaaaaattgttgtggttgtaaattaaagcgaactatatacatcaaaggattgaaacgaagggacaagaggatgagttaggattcatgtagatgttgcatgtacgtcaacaactcatgaaaatcgagccgtccactttgttttgccttgtacgtaaatcataaacatttttacgtgcgttttctttcagtttctatttcctattgtatattgtctaaatctaaatcaagcttttaccttagttggatcgtcattttctcttgcctggctctaattagggtagtatcgtttatggactaaacgattatacaaaatgagtgtgcttcctggatttggtagctggatcaatcagaatgttgaagagcctcctgaggtcagttgcaagtccattaatcagggaaaccgagtaagtaaaatcaatatagaatactgttttttgttgtaggccgagtccaaaagccctaaatctgaagctgtgtgggcggtagatactaaatattacgacttagatgaagtgaggagagaaggagaaatttggagagctgcagaggaaaagcatccatggtatgatgctcctgctaaggtgaaggtaagaccagaccaacaaacaaagtctcattagatttgttttgcctttaagaagaattgctagagttttgtttttgaaaacatatcttaattcattacattttttatgtttgaaggtgacaacaaaaaatggtctttgccatatgaacatagaatttaaactgggattacctcctgaaggagtctacgagatgttcactaatccaaacaactatccagtcttcaaaaaggacaaggccgggcgccaacgtctggtgtttttttctttcttttcattgagtaatgtttcaaattgagtattgactatacagaaatgattgggagtgtgggtttttcccctatgaaggaaaacaaatcaagaaaagttttgaagaaaaatggaccgaggcagaccacggagatggaaaaagatttgtactggaacttccttttcatatccagagcaatcccgatacatctagttatcgatgaaaatcataagaatctcacagtaaaagtctttgtatatctcttaaaaataaattggtaattttgtccagtttagggtaaattaatttgtgtttggctttctcttgcttaggcaaaatataggacaaagaatatgatgtttttgaaagtgttggagggtagctggaaagtggtgccagactttgtagatcaggaacgcttgtgcaagtcaaggttgccgaaaagtcgagaagaatacaaaagatgtagtggtggacaaggaaaggttgggtccaaggtgaccatggagcagatctttaagccttctcctcttcttaatctgccaccggtttcttggataatccgtgggattaccatcaaaaccaccaagattctgctcgaagatattcgaaaagcaggtaccactttacgaacagtttgaaaatccccaaatttggaatggaccggttatattctgtgataaacacattataaagggaatcgaaacagtgaaactggaaaaatagaaatttacataaacgaaatcaaatatattgttaggtatctctaatttggattttatttttggtaaaggattctaaatggataaaatgtttctccatcgaaaattttgaatcttacaaaacaaaagcaaaaatattgaaccaagcctttgggacagataatgcgaatattttacattctttttttttttgaatattatgtaaaattattcggaaaaaaactgttttacatctagtgcaacttgtgtttgatcagtttttgagattaatttacaaatataaagaaagaataagagactaataattattttgaaccaaaccagacggccatacagcctgcatatcttctatcaccagccaatccatggatagaggatattctgtttcgggtttgtttgtcaagtgtgcgagttaggtgggatgaggggagaggcattcatcgatcacagtaattccccgctacaccctctcaaacgcaatggaaagaaagaaaggacgaggtcttgaccgtcataatattttacattcgagttaggtatagttcaattaattctctaaatagtgacattttcgtcattcattactcaaacaaaactcataaatatttcaagcaacaaacattgcaagaaaactacaaactggttcccacggcaagctaattaaatccaaggtagccaatgattgaaatatcaggaaaataggaggctttaagtttggtactgatggaagtatggaacttcgggacgaaatattaagcaaatgtatattttatcagcattcacgaaactatttagtatttattctatagttaaataaataaaaatcaatttgaccatatgcgaatcaacttgaagagaaaaaaaaaaatctatcaaagcgactaatgagtcgagttgacatattctgattccatgaaagcatgcgccagactctaatctatcaacctcttgaccactaaatccataagaaataagtgaaataacttctttgtttcttcaatacgtaaaactcacgagaatggagctgcatggccatttcttttgtttctccttacgtaaaacataacgtacatgcaccattatctcagtttcatcttgattttttttttctttctaaatcagaatcaagctttaatctaagattcatcgaaccataatagattaatagatactgttttgatcctcatttgcatttgctctgatcaggtgagtgagtatccgtttgtggtaacgaaattcagaaagaaatg

SEQ ID NO: 7460 - DNA, 3000 bp, Unknown; identical to SEQ ID NO: 7443
  misc_feature (1)..( 3000): cDNA_ID_1817729_gDNA_ID_1621146_Annot_ID_56752 3000 nt of promoter + ATG

SEQ ID NO: 7461 - DNA, 3000 bp, Unknown; identical to SEQ ID NO: 7442
  misc_feature (1)..( 3000): cDNA_ID_1807842_gDNA_ID_1621146_Annot_ID_56759 3000 nt of promoter + ATG

SEQ ID NO: 7462 - DNA, 3000 bp, Unknown; identical to SEQ ID NO: 7441
  misc_feature (1)..( 3000): cDNA_ID_1029685_gDNA_ID_1621146_Annot_ID_56761 3000 nt of promoter + ATG

SEQ ID NO: 7463 - DNA, 3000 bp, Unknown; identical to SEQ ID NO: 7440
  misc_feature (1)..( 3000): cDNA_ID_1817711_gDNA_ID_1621146_Annot_ID_56762 3000 nt of promoter + ATG

SEQ ID NO: 7464 - DNA, 3000 bp, Unknown; identical to SEQ ID NO: 7439
  misc_feature (1)..( 3000): cDNA_ID_1817703_gDNA_ID_1621146_Annot_ID_56765 3000 nt of promoter + ATG

SEQ ID NO: 7465 - DNA, 3000 bp, Unknown
  misc_feature (1)..( 3000): cDNA_ID_1817699_gDNA_ID_1621146_Annot_ID_56766 3000 nt of promoter + ATG
ttcctccagccatggtgtgaaattgacctaatccattgttcaaagataaagatttgtgttcatcaaaacagatcagattggtcattgaagcctttcttgtatctcaagaaacttaatccataacaacaacaagatcagttcgtcgatatggatgattcatgcaaagttcatcttctagaatacagattcatgtaaatttcatcgaacaagatccttaagaacatctagaatcagtctcgattgaaagaaaacaacaagacttgctgattaaagaaactagaaaagaatcatatacgaaattcgatcgttaacccaatcgtcacgtcacatgatttcacatttcagatgaacgaaaaaggaattgaaacgaagaagaagaagaagataactacctaacaagcaagcttcgtcttcgcaagtgagaggcttcaagattcccagaaacaaacgcactctgttttgagctcttcggtttttttttccagcaaaacctcagagactgattcgagtattattcacgagtcttagtctatatttatagtaggaatataccatatttgacttcattttattttgcggaaaaaaaaagacttcattttattattgtcaacttttgtttgcattgatcagataattagcataagcttataaaactagaactggtaacatctgtgaaactgaaattttaaaaactttctatatatcaaagacgatgagaattttttatatataattggaatacagatatttctatttattttagtccaaactccaaacatatataaatcaatagctagtcttccaccagtgcacgccctataccgtcattagggaattggatcgcaaggtttggcccactaataatagtagcccatttcaggacctatttttcgcaaaaaacaacataatgcagcatgtacattttttttttagcatatacttttttttttacatttggtttgattatttttcaattgacatataccttcctttttttttagcaaaaaatacattactttgtagagacgatatttgtttatgttaactatattttttccctatcaaagtgtagtgtttatgaggtattttggatcatcctagtaatctagctagctacttctataatatacgaagtaccgaacatttgataatgatgtttcaatttcatacgtttgttcctagttcgtgttaataatttcgaacggacggtctattactgtatatatagtcgaatcttatacgaaaacattatggagaaaaaaaagtcatgacacaataatcccttctttttatctatctattaaaagaaaagttggtagagataaacaagtaaatgctaaaatgaattttctataaagaaacaaaaagaaatacgtttacgtatcgataatgtctatgcactatgaaaatatatatatttggttatgcatgaaaagatgtttggaaatcccaaatttttttaaaggtttttcgtacttctaactatgaaaacgtgataatcaatgtgcattagcatttttttaacgctcatataagtttccatagctaactaaaccagtttctgtcagttttgtataaatttgtcgtcatttgtttttttaaaaaagctttgtgtcaacaaaaaaaaaagctataaaaaaccaacactttttaacacagaacaattacatagtatataaatcttgaaaaacttgaaactacctagtaataaggagattatggctaaaatatagccttgtccatcgaattgttctgtttttgtaaggttggatccaaagtccaaactgagttatacgtattgtaactgtgtaacattgtcatcaagatcatatcttagtgataacaagaaatattattagtatagaatgatgactaatatatgatcttatctctatacaaacacataataacaattaaaaacgtaatctttaatgccaacacacaaagttgacactatcttataccataattactagtaaattatcctactaatatttgtatagaataacgataaataagcaaaataatcacctatttttagtgtggtaggtgaaccactcaaatctcttcaaaataatcaggacgtaatacttttctcttacgccttcaatgccgtaccacactttttaaatctccattcacacttttttcttattataatctctattcacacttaaaaatcgttattttctatgatgttaattttaaatatatttctgtaaaatattccagtttatgtactagtgattatatatgtaaatttgtcacagaaaaaaaaaatccaataaatgacagaaatataatgaaataaaaacatatttgaatattgtactagtattagtgtattactatgtcttttattagcgtaatatctatgatactaaaactacaactacaactataactccgaagattatggtatggtactactaagtactaagtaaaataattctaaaataatatatagaaatgaatgattaaaatgatattgtagtattattagtgtcgacacgagttttgatttgactcttgtgtagacgacaagtggggaacgaatgtgatatttttatccctgaaatggttctttcttatgttcgttaaatgcgaaatcattactcgtgtgcttccataaacagagttctcacaccaatacaaaagagaccatcaccgtgagaaagagaagaagaacaaaaaaagttagccatggcatcaagaagagtttcttcgctgctctctcgctctttcatgtcctcctcacgttctatcttctctcttagaggtatctaaatgcgatccgatccatttgtagagccattgcttctctgtcatagttatcttgataatgatcgagatcgttctgttttcattgtctctgttaactttcatacggatcaatgatctccgagtttttcggattttgtggttacttgtcgatggatttgatgatcttggtctcatttagatcgaatctatgcgttcttgtttgtttctttaggcatg

SEQ ID NO: 7466 - DNA, 3000 bp, Unknown; identical to SEQ ID NO: 7437
  misc_feature (1)..( 3000): cDNA_ID_1817695_gDNA_ID_1621146_Annot_ID_56767 3000 nt of promoter + ATG

SEQ ID NO: 7467 - DNA, 3000 bp, Unknown
  misc_feature (1)..( 3000): cDNA_ID_1817868_gDNA_ID_1621147_Annot_ID_56772 3000 nt of promoter + ATG
ttgctcattcaacctcgctcgtcgtcgtcgtcgtctccacttcgatttttcaatcagtaatattggtggttcagagatgatgatgatgaatcttttaaggagatcagcgatagccatcggccgccaatcaaaatcgaaactggcgtcgttttcctccgctacacaaccttgttccggaatcccaaaatcggtaaggctttcgtattccatctcactctgccggcatttctatataatattggctaaaagctattggttcttctactacatagacacggattgtttaggatcttgtgaaaattgaggtcgtttttttcagtgtctctagtcctgtttgaattgaatctctctagtgtccttgatctggggaaaacttacagtgttacttttgttatatatcagtccaagagggtttttagcaactcatttctttcaaaggtattttcttccctttacttgttaaatatttgcttcgacaacattttctttgctctttacacccttttgggcttatatgttagtctcatacctctcatcgtttttcttatgcaggactctactggagctaatggtcagcagtgataattgtgtaatcaaacttcaaatcctagtgttgatgtgtaccttgttgttctgacaattgtctgttatacaggactattgtttcgcttccgaaacccgcaagcaagtatatgtacggaagctcgtccaaagaacatcaactcatcttactttaccagatcttttgcatcaagaacttcaaaagaacctgggaatcagcagaataaggtgtttcttcctacaagtttctacttaatgtctacgttatgtgtttgccatttatcacaacgcaagccgtcaaaagcgacagacagcttctgtcatctaataatgatgcttgctttgccaattgttttacaggctaagaaagaggtgacgactgtggaggatccttttgattctcctacataccacatcccggagaagccggtgacctttacagaaggtgcgtcctacagtcttgttattctggctgggcttggtgtcgctggagctgctggctacggtgtgtttaaagagctcatttttcaaccaaaagagtgaggcttcagaaatctaatttgatttatctgctcagacacttggatttgagtaatctaaagacaccattatgtattctaggtacaaggtctttgacaaagccttgaagagaattcaagatgatggtcaggtaattagaaactaactctacagattgatcatagcggaggggtggtgtatgaaacaaaagcatctgtttataaaatgaaacaatttctgtgactgtgattgtcttgttaactaggtgagggttaggattggatcccccatcaaaggctatggacaagaaactagaaaccgagctgctcgtcaacgtatacccaacagagtatttacagatgaagacggagtggagcatgttgaggtatttcattgtagaacctctattgcgcttggattcacattcttgctatataaattgtctagagttttgcaggtttaacatgatcaaaattgaatatgcttcaggtaaacttctacatccgtgggcctcaaggagcagggaaagtgtacacggagatgtttaaagacaaggcagagaaggaatggaaatacacgtacctgatcgtagagattttaacaccttccccagccaaattgatgctggagtcttatttgcctgcctaaagcactcgtatttatgactcagcagatccggaaaacattcagaaacggcttagattgttttagttggggtgttggagaaaagagagagaattgtgttacacatgagctgtaggaatgacttcttatcaagcaactgtttgctaattgaaaaacaagtctaaactgtgtttatgatcctcttggggatgtctaggattttgaaccgaattcaagtttgaggcttgataatatttttatgcgtaaacatgaaacagagacatggagaatgcatatatcatgaagcatcaagtatacaatagaggcaatcatggatcaaacggtgtttatggtatcagtaagacagcggagaatgcaaccgggaccaactctctctctgagtttccccgagccatcaaggctacaaacatctcgactacaagggccaatcaaattacataatcacggaaaaaacaaggatagatacaagcaaacctaacactcgagcaataatttgagtaatagaaacaagaaaccagaaatcgaaacgaaacggaacgaaacacaagatttcctaattaatcttgtgtttaattaagaaaagaaaacacaaaaaagttgaaaggtttagtggtgcatccacgtagcaagacattttaggtgtacgtcgaccatattgttggccgtttatagagcatcatccactctcctcgacgagcaagatcatgccgcctctggattcttctcattcatcggtgttcctgcgatcccctccgtagcaccctccgcctcctcagcgccttccccgtgtaaattaccgttctgcatgtttagaaatttgacgtggaaattgttgcaatgtaactttctgtgatacttggctattgttgcaatgtaattttcattgaagtcagtcaccaatgaccattgaacagatgttttaaaatgtccacgtaagcaattgttgtttggaacgattttcggttagcattcgtgccttttttacctcaataaaaggccgtggcattaactcacttgtcttgagacgttatgtcgttaaaaccaagcccaaagttaatttcggcccaaatcgttttcaactttcccgccgtcttttaactttttagatttttggtgatggttttggggggaaagaaaacagaaaatataaaaataaaatttccgcactcccgactcttggtgtggtaggcaattctgaatcgcgaggtttagttctccggctgaatcagagaacgacgagtcggaaaaattcgaaactctagaactgaataaatg

SEQ ID NO: 7468 - DNA, 3000 bp, Unknown
  misc_feature (1)..( 3000): cDNA_ID_1817865_gDNA_ID_1621147_Annot_ID_56773 3000 nt of promoter + ATG
cgatttgggccgaaattaactttgggcttggttttaacgacataacgtctcaagacaagtgagttaatgccacggccttttattgaggtaaaaaaggcacgaatgctaaccgaaaatcgttccaaacaacaattgcttacgtggacattttaaaacatctgttcaatggtcattggtgactgacttcaatgaaaattacattgcaacaatagccaagtatcacagaaagttacattgcaacaatttccacgtcaaatttctaaacatgcagaacggtaatttacacggggaaggcgctgaggaggcggagggtgctacggaggggatcgcaggaacaccgatgaatgagaagaatccagaggcggcatgatcttgctcgtcgaggagagtggatgatgctctataaacggccaacaatatggtcgacgtacacctaaaatgtcttgctacgtggatgcaccactaaacctttcaacttttttgtgttttcttttcttaattaaacacaagattaattaggaaatcttgtgtttcgttccgtttcgtttcgatttctggtttcttgtttctattactcaaattattgctcgagtgttaggtttgcttgtatctatccttgttttttccgtgattatgtaatttgattggcccttgtagtcgagatgtttgtagccttgatggctcggggaaactcagagagagagttggtcccggttgcattctccgctgtcttactgataccataaacaccgtttgatccatgattgcctctattgtatacttgatgcttcatgatatatgcattctccatgtctctgtttcatgtttacgcataaaaatattatcaagcctcaaacttgaattcggttcaaaatcctagacatccccaagaggatcataaacacagtttagacttgtttttcaattagcaaacagttgcttgataagaagtcattcctacagctcatgtgtaacacaattctctctcttttctccaacaccccaactaaaacaatctaagccgtttctgaatgttttccggatctgctgagtcataaatacgagtgctttaggcaggcaaataagactccagcatcaatttggctggggaaggtgttaaaatctctacgatcaggtacgtgtatttccattccttctctgccttgtctttaaacatctccgtgtacactttccctgctccttgaggcccacggatgtagaagtttacctgaagcatattcaattttgatcatgttaaacctgcaaaactctagacaatttatatagcaagaatgtgaatccaagcgcaatagaggttctacaatgaaatacctcaacatgctccactccgtcttcatctgtaaatactctgttgggtatacgttgacgagcagctcggtttctagtttcttgtccatagcctttgatgggggatccaatcctaaccctcacctagttaacaagacaatcacagtcacagaaattgtttcattttataaacagatgcttttgtttcatacaccacccctccgctatgatcaatctgtagagttagtttctaattacctgaccatcatcttgaattctcttcaaggctttgtcaaagaccttgtacctagaatacataatggtgtctttagattactcaaatccaagtgtctgagcagataaatcaaattagatttctgaagcctcactcttttggttgaaaaatgagctctttaaacacaccgtagccagcagctccagcgacaccaagcccagccagaataacaagactgtaggacgcaccttctgtaaaggtcaccggcttctccgggatgtggtatgtaggagaatcaaaaggatcctccacagtcgtcacctctttcttagcctgtaaaacaattggcaaagcaagcatcattattagatgacagaagctgtctgtcgcttttgacggcttgcgttgtgataaatggcaaacacataacgtagacattaagtagaaacttgtaggaagaaacaccttattctgctgattcccaggttcttttgaagttcttgatgcaaaagatctggtaaagtaagatgagttgatgttctttggacgagcttccgtacatatacttgcttgcgggtttcggaagcgaaacaatagtcctgtataacagacaattgtcagaacaacaaggtacacatcaacactaggatttgaagtttgattacacaattatcactgctgaccattagctccagtagagtcctgcataagaaaaacgatgagaggtatgagactaacatataagcccaaaagggtgtaaagagcaaagaaaatgttgtcgaagcaaatatttaacaagtaaagggaagaaaatacctttgaaagaaatgagttgctaaaaaccctcttggactgatatataacaaaagtaacactgtaagttttccccagatcaaggacactagagagattcaattcaaacaggactagagacactgaaaaaaacgacctcaattttcacaagatcctaaacaatccgtgtctatgtagtagaagaaccaatagcttttagccaatattatatagaaatgccggcagagtgagatggaatacgaaagccttaccgattttgggattccggaacaaggttgtgtagcggaggaaaacgacgccagtttcgattttgattggcggccgatggctatcgctgatctccttaaaagattcatcatcatcatctctgaaccaccaatattactgattgaaaaatcgaagtggagacgacgacgacgacgagcgaggttgaatgagcaaggcaaagccgctcgccgttgctggggttttatcgtagacacgtgacgcgcacgtgcaagctatttccttgggcttgggcttagactcatgagataaagcaaataaaacccaaatgggctttttagaaaagaaacccaaataacagagtatctcttcttcttcttcgtgcaacaacctaaccatggaaattgcaatttgcaaac

SEQ ID NO: 7469 - DNA, 3000 bp, Unknown
  misc_feature (1)..( 3000): cDNA_ID_1817861_gDNA_ID_1621147_Annot_ID_56775 3000 nt of promoter + ATG
cgtgtttgtgtgtcttggtgatgttaggcaaaagcacaactgtcaagacacgctacacagtcatgtcacgggagacgctgcacaaataccctgaactagcaaccgagggttccccaaccatcaaacagaggcttgagattgcaaacgatgcggttgtgcagatggcatatgaagcgagcttggtttgcatcaaggaatggggaagggcagtggaagatatcactcatcttgtctacgtttcctccagtgagttccgtttgcccggaggtgatctttacctctcggcacagctgggccttagcaacgaggttcagagagtgatgctgtattttcttggatgctatggaggtttgagtgggctgcgcgtggccaaagacattgctgagaacaacccagggagccgtgtgttgctcaccacctctgagactaccgttctggggttccgcccacccaacaaagctcgtccttacaacttagtcggggctgcactctttggagatggagcagctgccctgatcatcggagcagaccctacagagtcggaatctcctttcatggagcttcactgtgctatgcagcagttcctgccccaaacacagggggtgatcgacgggcggctgtcagaagagggcataaccttcaagctaggaagagacctccctcagaagatcgaagacaacgtggaggagttctgcaagaagctagtggcaaaggctggctctggtgcgttggagttgaatgaccttttctgggcagttcatcctggtggaccagccatcctgagcgggctggagacaaagctgaagctgaagccggaaaagctggaatgcagcagaagggcgttgatggattatgggaacgtaagcagcaacaccatcttctacataatggacaaagtcagagatgagcttgagaagaaaggcacagagggagaagagtggggtctgggcttagctttcggaccgggaatcactttcgaaggctttctcatgaggaacctctaaatgtatatgaactggacatttctcaacaaataaaatatacaggaaccgatgctaacacacatacatcatgtaatggttgcattagttttgttctttaatggtaaatcacagaaatacatcaatacagtaagtttatatacataattgaagtattcttcaatggcatcttacttcatgcatccaaaaagtaatttcaaccttacataattcagatgtcgttttctctggctttcaaagattcactcgattctagcaaaggaacatacgtaacatagtgtgacacactagtctatatatacatttttgcaatatttttaacaaataaatcatagagttgagacttatttacaactcaatgctattgacattttattattatcaattaattaatattcctaattattaggatttccttatctaatatatctccatcaattctaattatttaaaaaaagagaaattttaggacattattaatattatactttattaaaccttaccaataaaaaatatatactttattaaaggtaaatattttagttatttaaagtttattaaatattttcacggaaaaaacgtttagaatatttataatatggaaaatctataaaattaaataaacatttgaaagaaaactttttaattgatttaaattataaatcttttaataaagtattattaaaacaaaaaataaaaaataatgtttaattacaccgaactggattagatggtataatgggtttagaatattataatatatgaactttagaacaattaaataaccatttgaaagaaaactttttaattgatttttgaattataaatcttttaataaaagtattattaaaacaaaaaataaaaaataatatttaatttcaccgaactggattagatggtataatgggtttagaatattgtaatatatgaactttagaacaattaaataaccatttgaaagaaaactttttaattgatttttgaattataaatcttttaataaaagtattattaaaacaaaaaataaaaaataatgtttaatttcaccgaatggtatagatggtaggacgggtttagaatattataatatatgaactttagaacaattaaataaccatttgaaagaaaacttttatattgatttgaattatatatcttttcgattaaagtattattaaacaaaaatgacaaaataatatttaattttattgatcgggtttagatggttaggacgggtttgagtcgatagaaatacaagacgatatatcatgggtgaaatccataagatatgtttgatattcactgaacgagattagattgtaggacgggtttgagtcgatagtaatacgagacggtataccacgggcgaaatcatatatataacaatcaaaatacaattatattatcttaaacactatacaaaacaaacaatattaacaaaataaatataatttaaatttaaattatttagttataatctaaattttaacttaatggacggtatgttattgttcctatatctttaaatagtaaaaatcaaacaagtaattatacagtaaataatatataaaaataagagttgtacatttagaaaatataaaacattaaatcatatatattttaatctactaaacaaattaaatttataccgcgggataaaaactagtattatatgttagcgaatcctactaaactatgacaacaaatatacatgcgagtcgtatacagaattgattctcacatttaagctgtcaacaaaacattcaacaagtcttaagcaagccattaaagaagggacctgaacaatttaatatatatggttaactatttaagtatcatgtccccacttgtccattacgtgattactacaaaagttcacataaaagttcctttttatatatataggaaagggaagaagatctcaataacacaaaaccttttaaactagtaaaatacacagattttaggatgagccaatgtgttccaaactgtcacatcg

SEQ ID NO: 7470 - DNA, 3000 bp, Unknown
  misc_feature (1)..( 3000): cDNA_ID_1817857_gDNA_ID_1621147_Annot_ID_56776 3000 nt of promoter + ATG
gtttcacctcaacatcaatgggctcgcacgataacacaatcgacgatcatgactccgtctgccacagccgcccacaggcaagtcatcatatatattaacttgttctagttattgatgtctctagctttataagtaaatgataataattaaggaaaaacgatagatggaggacgaagaagagaagaaagccggaggaaaatcatcagtttcaaccaagagaagcagagctgctgctattcataaccaatccgaacgtgtaatgattcactcaaccattattttatttttcaaaaaaagttttatgttattcgtctactgttacacatgcatgaccccctgcgttttatccttggttgattttattacagaagaggagagataaaatcaatcaaaggatgaagactttgcaaaaactggttcccaattccagcaaggtacgcaagtcgttttacataaactagtgtacgtggctaaataaaagtcatatgcgtacgtatagtaaaaaaatagatgctagctaggtatacatgaaaatagaggggataatatgaaaaagggtggtggaccaaagtgaagtgaatgcatctaaagaaatggacctcatacgatgattctactccacacacttatgttcatcaatctcttatttgcttgtcccctaaaaacttattttacatcactttattacttggtccggttggtccattcatatacacctttaattattatatgccttgtggctgtcgactcaaaaatcaacacaatctacattacacacatgctccgtaacattggtttggttaattatagtagataccaaagaggcttgatatataaatcgttaattttggaactatagacggataaagcatctatgttggatgaagtgatagagtatttgaagcaacttcaagcacaagtgagcatgatgagcagaatgaatatgccttctatgatgcttcctatggccatgcagcaacaacaacaactacaaatgtctctcatgtccaatcccatgggtttagggatgggcatggggatgcccggtctcggtctcctcgaccttaattctatgaaccgagctgctgcaagcgctcctaatatccatgccaacatgatgccaaacccatttttgcccatgaattgtccatcgtgggatgcttcttccaatgactctcgatttcagtctcctctcatccccgatcctatgtctgcctttcttgcatgctctactcaggttgaccctttttctatatatagatatacaacttgggtctaaacaatgcttcagtaccatttatatttttatatatttggaattgcagccaacgacgatggaagcgtatagcaggatggctacattatatcagcaaatgcaacaacaacttcctcctccttcgaatccaaaatgattattactcaaacacctctatatagtttacgtctatatatgtgttagtcacatacatacatatatatattccatcataattatttatttatatgtataggcttctcatgaattatgatattatacgtattacgtactttaaaaatatgtggtcgtaattggatagagaaaaataaataatggttatgtttgagtgaattagtaacatcactccacgtctccaccacatccacaaatgaactccaaattttctagatcaatatacgaacagtagataatccttcgttttcacgaatttaattatgtgactgaggataagtgaaaagtggaaatggagtagacacaatagcatatgctttgtctgcaaaattccacaataatttgttgataatgttattgaatttatttataatgctacaagaaacaaaaagaaagcgaatgtttattttttaaaggtgctgtaaaatgattgggtgttaacaggtcaacttggccccgaccattaccacacgtttgtgagtgaacaagtcatattattattaataacgaaaagtgactcgaaaattcatgagaaaaatgccaaactcaactactcaagtaagtataagtatactgtttacactatatagtaatcaatcgtcaccacaaattaagccctatatttgtcgttttactaataaacgaacgtacaaatacaatatatcactcaactttgatttagtttgagatgttgtgtgtacttaattacataaatgaatttgtgcatgcgacaagtattttcggacatatccatatatatacattttcttgcaatgtataatacgatacgaagagggagaaaatgacataagaggaaaagaaatcaaatcatataactccaaaggtcgacaccagttggtttgacagttaagtatgatatatacactcccaaaaatatgaaaacggtggttgccatgttcgtacaaaagttaagaataatatatatgctattttttttaatctattattcacacataaatgtatttttttaacaccaaatgtaaactatttaaatttcaaaatacatagtgtgttgagcagatatattgaaatttgtagtgtaaaatgcaaaaagttgaaagctaaaatttgcagatgcataatgtgtagtattgatttgtttttcgtcaaaactgaaaaagaaaaagttgaaatttgagatgatgtgatacatatgtcacatgcatgtgtgtgtgtgtgataggtttaaaaagaaagtaaaagtcaaatgttggttaatgcgagattcctttcacaccaacaaggcaaatacatgagatgagatggtcactgtagctaagagaaatagaaaacgagtatcgccgacgcaaaaaaggcttggccgagacaaaaaggcccaattttactactgtctaagaagaagagcatcgagaatttacaatgggctcaagcccaggcccgttttaaatagactcctattgattggttagcaagtaagaccggttccaatttccggttgggtattgagttggtttaagttattagccgttcgtcgtcttcctctggagaaagaaaaaagagaggaaaca

SEQ ID NO: 7471 - DNA, 3000 bp, Unknown
  misc_feature (1)..( 3000): cDNA_ID_1817855_gDNA_ID_1621147_Annot_ID_56777 3000 nt of promoter + ATG
gagatttgggatgattcttcttcggagcaggatgattcgactttggattccggatcggatcctgaggctccgctttggccatggattgcacctccgatgtccgcttccggaagtagctaccgaagaagagtacagcgatcaacgcaccgagaataaccgatgcaatgcccactacaaggacagaatccatctttcgagtttgataactagaaagtctaaaatcaaatcactcaagaggatcgacgactgatcaacgatgaaaaatggtgcagcgagacgttaaaggcggtgtttctagagcttagcttatggagaggagagtgatctccgcatacacgtaaccgggtcgggtcgggtttgtaactacttctaattttattagaaatatgggccttaacctcactgatccattaatttcaaagcccattttaaaattcagctctttacaaaaatagaaagaaaaaaaggcccaccgttggtgttcgaacccattaatttcaaagcccatttataacttcagctctttacaaaaacaacagaaaaaacactatcgcccaccgtggggctcgaacccacgaccacaaggttaagagccttgcgctctaccaactgagctagacgggctacattctgtgatgtcgataataatggtaataatctttgtatacggcaaaggtattttcttgcttgttttaggcttagaactttccttgttattgaattatatcaatttacggtcatatatgaacttttggatttacacgactggttaacaattacacacacaaatatcaagaagtaagaagaaatttaaggcaaaatgatcaaaacacacacacaggctcagcttaaggacgtctggctcggtacctagcagcagcgtagtgctcgatgaaggcaagggcattactagttgtttcctccacattcttcacttttcctttaatcgtagccttaagtttgctcatcctacgtcccgggaactggctcacgcaagtctcggcgtctgtaagagctgtgcttgtccacgtctgcaggttatttatatgccagtgtagatccccttggctctttccctgtctcctgctgactctgtctagctccgctatggctagactcaactggttcacgctgtctcttatttggtccaagcagtcgtgaaccgacgcgtagtattggggcctcaacgtcgtctccaagttcttaacctcttttaacaagaacgcctttgtgtacttagctctatataggctggctttgagcgcaaatcgggccagatcccgtggattttgcaccgcgcgtgaacgcacgtaacgagacatcgaccggacgcatagtttcgggtataaggttgttcggcaccatgagtgcacgtaagccttcgtgtcgtagtcttttgatgacgtggcggttgccgagaagatgatgagagggaacagggagagtaatacaaagaacaatttgttgttagccgccatggcgaattagagaattaactgagaggatatgtagcttaatcggtggatggtataatatttacatgtctttgtgtgtgtcccttatatatactgtatgcatcattttgcatggcacgtgaataagaatgagctggatttaagatcacttgacttggatttgtttttgtttgttaattcaattgatgagcagctagagtttgaaggaaggttacaagaaggccggtaaagcaagtaccatatatcataattaaattaattataagtgtattcgtataaaatcaattttgaacgtgattaaagatatttattctagctaggcatttgaccagatgaattaaagtatctaacgtctcataccaaaacctgttgtatatagaacaggcaggatctacgttatgaaacataatcttatataatgtgaatattatatgtgtatattcacacgcgtaatggagagggtttaactgttgacccaaagggtgcggcggagaagacgaaaaggaagaagctcgtggccaacaagatccttttttatagcaccttcccttcactctttaagcaaatctgcacacacttttattctctccgaccacacatttaaactcgatgcgtgtctcctcgattctccaagacataccactcctgcaattttaaataattagaaaagtagtacggttcctattcaatattgggtttgtactacatgtgttactaatggttttatggtgagttcgtttttgccactcataaaatcatctatttacgttcatgtaaaatataggttagatttttaatatgcaagaagacaaaattcatattttgatcttaacctccatcaatcaacatttttttttgcacttagatttctaatagaatcttttttcagtaaaaaaaaaatttagaatatatttttttttatgttaaccttaaacggtaaaaaaaagataaaatgcaaagaagattggagtatccgctctgaaatccatgatgaattgatgatagtatttaagtacgaaaattaagcattgataattaggctagacagtatcaagatatataactcaaaaaaaaaaagattttttttaatagcttttttcaaaggttttatgagagttctagaactcgtcttcatttaacctaatagacttttggtctcctaggttatttggatatataaattactcaatatatcagatgttttgaggtttagcacagtaattaacaaaactattatttaataaaaacaatcaagtaaagtaattaaaacaattaaagagtaatattaaacgttacgcattaaactctcaaacaacccaaattacttgaaaaaatggagcaactttttacataattgattattttttttgtgcaaccattacataattaattttaaacaaaaaatttcaaaaattttacatcggagccaaactaaaacttttctgaatcattcatgtttatgtaagtttttaaaaaaaaatgatttctaattttcttcacaattccaaatttttatttgagtatg

SEQ ID NO: 7472 - DNA, 3000 bp, Unknown
  misc_feature (1)..( 3000): cDNA_ID_1817848_gDNA_ID_1621147_Annot_ID_56779 3000 nt of promoter + ATG
ctagaaaaggcatagcttaatacaaaaaacaaatacctgcaaaatcttcatcgctactgttaacagtttcttctcttggtgggattttatttaaatcaaacaaaaattcatctccatcatcactataaacagttttttctggaatttcatttaaatcaaacaaaaattcattctcttcacttagaagtgacatactcaaataaaaatttggaattgtgaagaaaattagaaatcatttttttttaaaaacttacataaacatgaatgattcagaaaagttttagtttggctccgatgtaaaatttttgaaattttttgtttaaaattaattatgtaatggttgcacaaaaaaaataatcaattatgtaaaaagttgctccattttttcaagtaatttgggttgtttgagagtttaatgcgtaacgtttaatattactctttaattgttttaattactttacttgattgtttttattaaataatagttttgttaattactgtgctaaacctcaaaacatctgatatattgagtaatttatatatccaaataacctaggagaccaaaagtctattaggttaaatgaagacgagttctagaactctcataaaacctttgaaaaaagctattaaaaaaaatctttttttttttgagttatatatcttgatactgtctagcctaattatcaatgcttaattttcgtacttaaatactatcatcaattcatcatggatttcagagcggatactccaatcttctttgcattttatcttttttttaccgtttaaggttaacataaaaaaaaatatattctaaattttttttttactgaaaaaagattctattagaaatctaagtgcaaaaaaaaatgttgattgatggaggttaagatcaaaatatgaattttgtcttcttgcatattaaaaatctaacctatattttacatgaacgtaaatagatgattttatgagtggcaaaaacgaactcaccataaaaccattagtaacacatgtagtacaaacccaatattgaataggaaccgtactacttttctaattatttaaaattgcaggagtggtatgtcttggagaatcgaggagacacgcatcgagtttaaatgtgtggtcggagagaataaaagtgtgtgcagatttgcttaaagagtgaagggaaggtgctataaaaaaggatcttgttggccacgagcttcttccttttcgtcttctccgccgcaccctttgggtcaacagttaaaccctctccattacgcgtgtgaatatacacatataatattcacattatataagattatgtttcataacgtagatcctgcctgttctatatacaacaggttttggtatgagacgttagatactttaattcatctggtcaaatgcctagctagaataaatatctttaatcacgttcaaaattgattttatacgaatacacttataattaatttaattatgatatatggtacttgctttaccggccttcttgtaaccttccttcaaactctagctgctcatcaattgaattaacaaacaaaaacaaatccaagtcaagtgatcttaaatccagctcattcttattcacgtgccatgcaaaatgatgcatacagtatatataagggacacacacaaagacatgtaaatattataccatccaccgattaagctacatatcctctcagttaattctctaattcgccatggcggctaacaacaaattgttctttgtattactctccctgttccctctcatcatcttctcggcaaccgccacgtcatcaaaagactacgacacgaaggcttacgtgcactcatggtgccgaacaaccttatacccgaaactatgcgtccggtcgatgtctcgttacgtgcgttcacgcgcggtgcaaaatccacgggatctggcccgatttgcgctcaaagccagcctatatagagctaagtacacaaaggcgttcttgttaaaagaggttaagaacttggagacgacgttgaggccccaatactacgcgtcggttcacgactgcttggaccaaataagagacagcgtgaaccagttgagtctagccatagcggagctagacagagtcagcaggagacagggaaagagccaaggggatctacactggcatataaataacctgcagacgtggacaagcacagctcttacagacgccgagacttgcgtgagccagttcccgggacgtaggatgagcaaacttaaggctacgattaaaggaaaagtgaagaatgtggaggaaacaactagtaatgcccttgccttcatcgagcactacgctgctgctaggtaccgagccagacgtccttaagctgagcctgtgtgtgtgttttgatcattttgccttaaatttcttcttacttcttgatatttgtgtgtgtaattgttaaccagtcgtgtaaatccaaaagttcatatatgaccgtaaattgatataattcaataacaaggaaagttctaagcctaaaacaagcaagaaaatacctttgccgtatacaaagattattaccattattatcgacatcacagaatgtagcccgtctagctcagttggtagagcgcaaggctcttaaccttgtggtcgtgggttcgagccccacggtgggcgatagtgttttttctgttgtttttgtaaagagctgaagttataaatgggctttgaaattaatgggttcgaacaccaacggtgggcctttttttctttctatttttgtaaagagctgaattttaaaatgggctttgaaattaatggatcagtgaggttaaggcccatatttctaataaaattagaagtagttacaaacccgacccgacccggttacgtgtatgcggagatcactctcctctccataagctaagctctagaaacaccgcctttaacgtctcgctgcaccatttttcatcgttgatcagtcgtcgatcctcttgagtgatttgattttagactttctagttatcaaactcgaaag

SEQ ID NO: 7473 - DNA, 3000 bp, Unknown
  misc_feature (1)..( 3000): cDNA_ID_2044354_gDNA_ID_1621147_Annot_ID_173105 3000 nt of promoter + ATG
taatgattataaatgacccaccaccaaaagcaagacatgattttcttgcctgacacgatcctctatgctccacatcaacttaaaaacatttattcataaacaaacccatccatctctctctcttaaacatctctttggattggatatataataactgtggtcgacgacgacacaacttcccccaaacaaaacgttacgtctttgacataaaagatgagcggaagcaccaccggttgtggaggtccatgcggcgcatgtaagtttctccgacggaaatgcgttgctgactgtgtcttcgctccctactttgattcggtggaagggacgtctcatttcacggccgtgcacaaggttttcggggcgagcaacgcctccaagctcctcatgatgattccagccagccggagactggacgctgtcgtcacgcttacttacgaggcattggctaggcttcgcgatcccgtctacggatgcgttggtcatatcttcgcccttcaacatcaggtattcaactatataaaacccaatattgtcacatatttatgtatatataatatatgtttgatgatctatatacattgaaagatttactatgcatgcatgcgtgtatttagttatatagaagttcattgtataataaaatcatcccataacattaggttaaagatgagatttatatatccgcatcttttagccacgtaacttgttacttttataacagttccatttaatcgcctcttggtttcctgtttattagttttgaaaattgcatagtactaattccacaataagagtcaaagttgctaatattgaaaatagctaacgtgtgtcttcccaatggctcgtttgtcgaaaacagcgttaaagaaagtcaaatcgtcattctttgtggttacattccgacttgtttgtctttaatagtatatcggttgaataaaacagtttgaaaattttcttctaatacgaataaattaggttttttaaaaactaatgttatatgaactttttaattaaataaacgtcccacatgtgaacaggtgatgaatctacaggcggagttagcttacgtccaaactcaactctcaacattacaaggtcttcctccgccgaattctcaaaacaattcacggacagaagcagcctcttcatctaatgtgccactcatttcttctgtcgatagcaaagacaatatgtcttcctcgtcgtcacacattccttgtatgtcacaacaacaagaacaagaacagccaaaagaagctattgaggtcccaacagagtcagtggatcttagcacattctttggcctggaaaatccagtggatgaggacggtgatcttaacgctcttgcccgtgagttcttcactaagtatttgaccggaggcaaataccgaccatcttctttaatataaccatgttaacctttgcgacatttattaggaactctttattttgtactaactggattgccctgtaacttaaaaggggcgttaatagattctattggatttgcagtgcaaactcacatctcacatctcacgcttgacgtcgacatgacacccatgtccctctattttattataaggcattgctccattttattggggtccaataatgaaaatgttaaatgtgtaattcataggtaatacaggcccaaaaggttaaggcccaaaatccccaaatgggcttatgttaaaatcttgccttttgcatccaaacccacttgccttttcttcaagtgtgactaaaaacattatgtaataaagctaacgttaatcacttgtcttggaaatatacaggggtgattaatatataatagtggtgaaggtggtctcgaggcctcgaaattttaatttgaactcaaggaaagatgtgttgacacgtaatgaatgatccaaaagctttctcatgtgccgtgatcctaattgagatacggataaattcttatttaacacacaatgatttaaaatcacaaatgctctattcttttcttggaagtgaaagcaatataagagaaagagtcagagtgagtcaaaaaggagacagaaggcagagaaggtcaaacaaacggcttgttaatctgaccgcttgtcactttattatctgtcacctaccaatcacattcctagtaaactcttgtgtgaaccaacataaacatattgttgcaaaataattgaattttaaattgtaataagagatattaatgtcaagaagaaaacttacgcaaacgggacaatttttttttttttttttttaatcaattccggacgtgaaattatttattaaccaaaattcactgtcggtcttattcttaacgacaaaaaaaaagataaattatttttggatatttcttcttgcaaaaacctaattttctctcatctttttttttttttttacgatctggttttttgttttctttctactctgttttcaactggggacactatgtttttttttcttcttcttgtttggatcatataaatctgattttttcccggaaaataccgttgagaacttctccggcgtgagctgaccaggagaaatctgttcttgtgtttagttcaattctcggctgaggaacgttgactgttgactgatagagcaacttcagtgtgttgagaccaaacataaagcttcaggtctctgtttttcttttaaacacttttgtctgagatctcattatttttgtacttttgcttctaacctccttgtgttgtttttttttcctgttcaaactattatgatgtacaatttgagaattttcagtgtaacagaacaaaagattccatctttatacttcttccaactctgtagctaactgtgaaaaagtagaagcctttacaaaaattaagtctcagcgttatatcattaccacatttgttgagattacttgaaattcgaaatcaagtttctatatttatgaagctatgtggttggatgatgaactctcttttaaagttttggcttgcttgtaattgcagttaaggataggatttgagaatg

SEQ ID NO: 7474 - DNA, 3000 bp, Unknown
  misc_feature (1)..( 3000): cDNA_ID_2044386_gDNA_ID_1621147_Annot_ID_173095 3000 nt of promoter + ATG
atttcaaagaaggagcatttatcacatatccccaaaactcttgtccatcatggtcgtcattaatcgttaatctcttcaaagaagggacctcatcaatagtgaaaacctcaatatcagaatcttcacctcgaatcacaagcaattcttcaagaatagggcagcctgataaaaggttacggatagatgattcgtctttgtagctcacaagctcaagatggagagtcctaagagacttcattactaccggagaagagatatcaacaagaatcaaaagtacgagtctcaaagtctcaagtgtgttgcaagtacacaagctactcggaaatttgaaagccgtccccgtcccggtatcagcagcaacgagcaccaattcacgcagatgtctagaaaacgcaattccaacccaaagtccaatatctacaggatcaactttttctgattcaaactcaagacgaaagctctctagaaccggggctttatgtgaaaggaaagatttgcaaactatctctgaaaatgtatactgttctttgtcgtcgtaatcctcagaatcgaactcgagatttggcaccaacttccaaagaggcctccattgtttagaaaaaacactcgtggctacgacaatctttgttggaagaaaagacagtatctttataagcaaagcatcaggcaactcactgatcctgtctttacccataacaactctaattcgcaaactttcactagcaaaaccaaaagaagacaagagttaaaattagggtttcgagtttttttttgttttgcttgtagaaagaagctacaaagtttgtaatacaacagattcatccttggcaaaaaagataaaaacaaggaagctaagaatctacgagaagaaatatatgagtagaaaagttgtctagtcatacttcagccataatcgcatgagggaattgaaaacctttcgtttcctctttgcaagaatggaatcacggatctgtctatcaagagacttgaaaaggagacaaagaaacacaaacacaaacgaaacagagaatgcgccggagtccagacccattaaacggagacaaaaaaacacaaacgaaacaaagaaacttacccttgttccattgtcggtgaaatccttcaggcttatgtttttccagtgctaaaatcgcatttcaacaaaactgaatccctaatgactattcgcatttcaacgagtagaagaatgtgataagactagggcttctcattcaatatctcggttttgtttaaattcgaaccgaatccgatcggtttacttattaataccaaaatgttaaccatctctaagaagtaaacccctaaatgacctaatccgatgaatgacctaatccgatgatcgacctagttcccgatgtacttgaagattctctgttgccttttactcacaatattatgcataaccctattacaaagatgatcagtgtttacatacaactataaactttttcattctcatttagtctcattgtatcaccattcatgaattcatcatagagattagagatagataaaatatagagaaattttcaatatcatgtaaaaccatccccgataaccaaaaccgatgtaaatcgttatttggaaaaacatttttacaaccccgacgtaaacaagactcactgtgaatttataagacttgctatggtcgtgagtcagaggatccactggtgatatataattaatctccatagaaactagtaagtcttatagattattctacaaacatagagaatccgtcggtcttgtttattatttgctaagtttattctctgctttatgaaattattttctcattcttttctttactccaatgaaccattgtacttttcagctttcttgacttttttttttttttttttggctattgatggttcagtggattaaagaaaacaattttaagtacaatgttgccaagaagaatcaaagagaaaacacttggtttaagtaagagtataacaataacagacaattaaagaagaatcatatgcatataggagacaaatcattattctcatcatcgtagataacatggacaggtttatcgacaaagtcgttgtcttgaacgtaacaatctcgatcataagtaggcttctccacgaaattgttgacatgaacgtgacaattcctcgtgaaatcatccccaaatccggctctttgtttcacattcttcaaacgattagacaccgaactcgtgtaatgaggaggtaaaaaagttttgcatagcttctccttaagtttatcccatgatttaataggattcttgccagctcgcttgcgtgttttctgcttttgttgccaccatgatgcggcttgccctcaaaatttcttaatcacaagcgaaacaaatagatcatccgaaacgttttgaaactccaaaatttcttcaatcttcacaagccaatctagtaacgaatcactagagattccaccatggagcttgggaatatcaaacttaaaattggtcgctcatctcatgtctttcacagacatcgctgcaagggaatcaaaccactaggaacgacgtggctctgataccaactgatagaaagcggaagctaaataacagacaaaaacgcaagattttcaggaaaattcagattcacgaacggatcttttttagaacgtcaaaacttgacaaagaggcaataggatagggtcgagatcggtagcgatatcgacgaggtttaaaaagtcatccttgcaaggtttgaacacaagcttttaaggttgagagtcctcctctctaggctttatacaaagctctcttaaaactctttattcaataatcaatagctaattcattctacaacgtaaggtaagaatcataaacaaaaccttaattcttaaaagaagttaaaagcccaataggtaaagcctatctctttaataaaatccataaactactaaatcatgaatgagaaacaataaagaggtttggtcacgacgaggcccatcgaaggcgtgaacaaagcaaagatg

SEQ ID NO: 7475 - DNA, 3000 bp, Unknown
  misc_feature (1)..( 3000): cDNA_ID_3087872_gDNA_ID_1621147_Annot_ID_173084 3000 nt of promoter + ATG
gatcagtcgtcgatcctcttgagtgatttgattttagactttctagttatcaaactcgaaagatggattctgtccttgtagtgggcattgcatcggttattctcggtgcgttgatcgctgtactcttcttcggtagctacttccggaagcggacatcggaggtgcaatccatggccaaagcggagcctcaggatccgatccggaatccaaagtcgaatcatcctgctccgaagaagaatcatcccaaatctcaagcgtccgataaggtaaggttttaactccattttgttccgagtttagggatttcagatttggatatgagttgactttaaagctttctcttcttcgtttctaaattgcttgtggaatgcagaatcagaacaaacggcatcatcctttagatttaaacacgttgaaaggccacggtgatgctgttactggactctgtttctcgtccgatggaaagagcttggccacaggttagaacctataaacactcctacttagctaatccctgtcaagaagatatttttgctattttacaattctgatcacatttgttcctgtttttgatagcttgcgctgatggagtaatcagggtgttcaagctagatgatgcatcaagcaaaagcttcaagtatttcttcctatatataatctttcaatagacaatgttagccggtgggagtttactttgcaagcccattttcatgatctaactgttttttttgtttgctttctaaaattcagatttttaaggataaatcttcctgctggaggacatccaaccgccgtggcatttgctgacgatgcctcatctattgttgtggcttgtcatcatatgtctggttcatctttgtacatgtacggtgaagataagcaaaaggatcagcaagggaagcttcctcttcctagtatcaaatgggaccaccatcatattcatgagaagagatcagtgcttaccatctctggagctactgcaacttacggtactgctgatggaagtgttgtcattgcctcttgttctgaaggtatgtttttccatggctagtgtcactgtcatagcgatgttaaattggtttcagaatctctagtttaaaacttgtgtataaattgctaaagggtgatttcaatttgtgaatacccttatgttcaatataagttcttgtattgctgttcaaaatgtactgctctggtgaaatatcccttgttttttccttaaaccttgttattcgccagggactgatatcgtcctttggcatgggaaaactgggaggaatttgggacatgttgatacaaaccagttgaagaaccacatggcagctgtatcaccaaatggacgttttttggcagctgcagcatttactgcagatgtgaaagtaagtttttgtataaattcaaaccatcatgagtgtatgtgtgaccgtatctcatgtcttagcaagtgctttgtaggtgtgggaaattgtgtatcagaaagatggttctgtgaaagaggtttcaagagttatgcaacttaaaggccacaaggtattattccactacctatagcatgataatccatctccaacgatatagattttttctcactttttgtcttgtaatcgtttcatgtttaaaccaatgctatggtatccagagtgcagtgacttggttatgcttttctccaaactcagagcaaatcatcaccgcttcaaaagatggttcaataagagtctggaacatcaatggttagtagaattgtttttaaatgtctgcatcattctgattattgccaaatgcaaaacagatccctggtaacataaggggatctgttctggaatttataatagatggaatgattttgatttattaaacaaataacctgaaaggcattgtgttgtgtaatctggttgcagtccgttatcatcttgatgaggatccaaagactttgaaggtgttcccgattccactttgcgactcaggaggcaatccgttgcactatgatcgtctcagcttatgcccagagggaaagatattggcagcaagccatggttccacattgcagtggttatgtgctgaaactggaaatgtcttggacacagctgagaaagcccacgaaggtgatagatagctctcaacatttctctttgcaacctattcaaaaccttaacatatacctcaaaactattcaaacaagtgatagtaaatttaccacggttggttgtatgtgcaggggatatcacatgcatatcttgggcacccaaggctattacagttggtatgtgcctgtctgattctttcttgtatgtaaagttgtatgtgatctgaatctcatgtggtgttgttggttctcaggggaaagacatgccatggttttggggacatcaggcgatgacaagaaagtgaagctgtgggaagctccaaagtcgcaatctttgtaggctctcgcatacacgtagtcccttgatgacatgaggcgtatttaaacggtacaacttgcgaggaaaaaaactctaataggttttgtttcgagtcccaagttgggatcaaatgaagggtggtttaaagtccttcttgttaccaagtgtcttttaacttctgaagttttgaattttgctcataggactagtacaacactcacagtcttctatgttttccaaattaaggaaatttaaaaagcacacaacaacactaagaaatatgaatcgattaaaattattatacgcattttgttttctttgtatcagaaaaatgatagtctacatacatatggtaatttggtaaataatacaaaaagaatctacacaaccaagtgaaaaatcaaaaatgtgtctggtcgtggactccgatgggctttttgaggcaaattgaaaactgggccagaaatatgaaaggcccacgtaagtcccgaatataacctaaaaagcacactctctaataacagccagaattagggtttctctttgtcttcagcagtcagtgcgcatccgtaggagaaaagtgtgagaatctgccacc

SEQ ID NO: 7476 - DNA, 3000 bp, Unknown; identical to SEQ ID NO: 7470
  misc_feature (1)..( 3000): cDNA_ID_3050545_gDNA_ID_1621147_Annot_ID_173080 3000 nt of promoter + ATG

SEQ ID NO: 7477 - DNA, 3000 bp, Unknown; identical to SEQ ID NO: 7468
  misc_feature (1)..( 3000): cDNA_ID_1817865_gDNA_ID_1621147_Annot_ID_173077 3000 nt of promoter + ATG

SEQ ID NO: 7478 - DNA, 3000 bp, Unknown; identical to SEQ ID NO: 7475
  misc_feature (1)..( 3000): cDNA_ID_1841836_gDNA_ID_1621147_Annot_ID_56780 3000 nt of promoter + ATG

SEQ ID NO: 7479 - DNA, 3000 bp, Unknown
  misc_feature (1)..( 3000): cDNA_ID_1817832_gDNA_ID_1621147_Annot_ID_56784 3000 nt of promoter + ATG
agttttgacagatcataagccgtgtcctcaagcagaagaccggtcgtgatcggtcaatctacacgtgtacggcagaaacacatgtgtcgtttccctgtgagagatgatcaaccaaatcaacggtcagtttttgtcaactaatgtgtgtattgatttgtaacatgcctacgtgaacataagctagtcacgcaacaagcaaggcctgggtcacgcaggctcggctccactaagacgcgccgacgtagtcactcatcatatatcacatgtctagattcaaatggtaaccgtttgatgagcgcagtaagtagaaacattgaccggtccaggcgaggtctagcaaatactattagaattaaaattgatgtaatcaatcactgataaatactattagaactactctactttacactcacgtattccatcatttaatatacatacgtgagtgtaaagtatttcttcacaatttatttttgaaaatagcttttaacccatagcaaatgcctatgttgccatggggtagacgggactgatcacacatcgaagcatactcttgataatatatggacagggaaatacatattagaaagctatcaaactttctcttccttttttttttgtttgctgggtttcatctttcactatattgtatgtgtgacatgtcattaagaaatgaataacaacaggctattcattgcttttttctattcattgcttacaaaaagtaaaatgatgataaaatacgcagcttttggtgttatttgtccttcaactaattgagttatcatttttcttttactccttttagacaccgcatatgtacttttgtctcaaagaagactctcctaggagttaggaagattttgattttgttataatcagactttaactcacatctgtcttccatcatcccactgtttttcaagtattttattattagttgttaaaaacttctacgtccaaaatctcaatcactacgagtattgcaatgttgatattgtgcgttaaatgtatatgtatataattccaaatttccaacaattggtttataaacgatggcactaacataacctcatatattgtgatacaacgaaaggcaccggatggtggaacgcatcacgcatcatgcatcctcgatcccttttcaaagtggtatgtaagagatcattatttcaacataacatacatttgctatgatgacgcattttagtcaaattagttgtttgttcaatcatattaataagggtcaacagatatttatacgaactgtaattaaaatgataaaatccaaagcgacaagtttgctactaccaaatgtgtgtttaatatatataatttagaaacattgaatttgagaaaatgagtatacggttgcacaaaagaagaagaagaagaggagtataccaacaaaaggttgtacgtaatataattccgaccccctaaaaagatatataataaggtggagagcgagggatctgaaattgatgggtgtgtttttgtgtgcataacaaaagttaaaaatgtatttatattatttttaattttaaaattcttttcttacttgtgtttatttattagttaaataaataatttaatgagagaagcttttgatacaatttttactctctttcaatctccatctcaacttttgtagatgccaagcttgcccaccatatctgctcctcaacctctcactttacaagtacttcatttattttcttagttagtctatttatttcaataaacaaactctactcaagttcatcaagattcgtaacagtggaatcctttattaatgttagatcatcaaactctacacatgtttatttccatctctatgcatgcctttatattgcttaagttgtatacacgtacatatacacttcactactcttattatctagttccatattacgctatatatttatgaatttatatacatagaccatactcatgtccttgaaaatcagttacatgtttcttttgttcttatctttagtcttttgtgttttctcttttggccttttttcttcctttatctatttacaagtcaagtcagcttattaacaacgcggtatttccatccccacaaaatcttcttatggctacttttatatatatatacatatcaaactatactgacgacaaaataaataaattaagaaaaaaaaagaaagagaaagtgggtgtaggccatgcattatcttaccaataacacgtttcacaccattcgcattgcgctctctccttccttcatatgatcatatagaacgaaaggtggaaactttcttattttgtatggatcgtatacgcaatatggttggacaaaactaatctgtttcaaacaaaatacatgaaatatcccacaagaaacaaagcaaactataaaaaaaataatgcggtaaacacggaaaatatcacatatacgaatcctttttcggatgtgttttcaatcctttgaattaaatatgtccacactcgatatgtaaaaacaacttgacccatcacaattatgatcataaaataccaacgtactgttagcctaatgataaatctcccaagcagaggtgtttagttcgagttatgttgtaagggattttttctcctaaggaaataaatttaatttgatgtgaattctaggaaatatagggcctctcgacttaaactttcaaatattaaaaaaaataaaaataatgatcatcatgagctattgggttttcaatgatttatcagcagagtgttcaatgagagtccaagtatttgggctgtaatatcaatatgggcccaaggtaaagcccaacataatcaatcggctattgggtattctaaattctctcattatagaagtgttcaatgagggcccaagtaattggtcttaatatgggcccaagtaattggtcttaatatgagcccaagttaaacccaacttaaacgattgttggaggcggcaaaataaacaaatcccaaactctggagaatcaaattcctaattagctaacaatg

SEQ ID NO: 7480 - DNA, 3000 bp, Unknown
  misc_feature (1)..( 3000): cDNA_ID_1817821_gDNA_ID_1621147_Annot_ID_56787 3000 nt of promoter + ATG
gcatgtccatgtcgtcctcctcagctccagcttttccaccggaccacttctcatctacggaccagctctgttacgtccattgcagcttctgcgacactgtccttgctgtaaattttggattattcttatatctcatctcaatatttcaaatttataactctagctagggtttcacatgaattactagttaattaatgtgtgatattaattggcaggtgagtgttcctccgagtagtttgttcaagacggtgacggtcagatgcggccactgttcgaaccttttgtcggtgaccgtgagcatgagagctcttcttcttccatccgtttccaaccttggccattcctttttacctccccctcctcctcctcctcctccaaatcttttggtacatcggtttcattcatcgaaacaaattagggttctttcataaaaaaaacagagagtaataattagggcttttcttctcgagaaacgcaaaattgtgaaactcaatccaaaaatgtttaattttgttagcatcccgggatagatctaagtagtttggcaatggctagttaactagggtttctttcgaaaacatcatatcaaagtagtttggtttgattagtgttttaagttttttttgccaattagtttgctgatttcatttattaggaggaaatgcgaagcggagggcagaatataaacatgaacatgatgatgagccatcacgcttcagctcaccacccgaacgagcatttggttatggcgactcgcaacggaagatcagtggatcatctacaagagatgcctcggccaccaccagccaatagacgtaaccttccatcttctactctttatttcaacatcttcatatatatatatataagaaaacaaaaaccctaattcacaaaaccttatccattcatttcttcaaccttttatatatacactccaaagaatctcgtttgtttataatgaatttataagttttgatttcatttttgttccctcggtatgtgacttctcgcatgcactttttttttggtcagaaaacaatttcgacaacaaaaggaaaattaataagtgatgtgtttatcccccggaaatctagctaaacctatagatgccaactgatatagttttgggggtagatcgtaagaaagataatgatgaagtgatgatgataacgagcaaagtgagagggagagggagagagagaaaggaggaagagtcgaagagtgattgtttttttttttttaattgtttttttttggtgaatttttagattttttggggaggcacaataaaaaccaataatgttttttttaacaaaagggtttgatttggaattaaaattgaatatgttctgtttgtttgtttgtggaaaagcagccccagagaagcgacaaagagtaccatctgcatacaaccgattcatcaagtaataagtttattcctttgcttaaaatggcataattaaatttccctaattaaccattttactcatataattaagggtcgatagatgtgacagatttgatttcattatatgatataaaaataaaaatgttgacagagaggagatccaacgtataaaggcaggcaaccctgatatcagccacagagaagccttcagtgctgctgccaaaaacgtaccatttctttttttaatatataaaactaattttctatattgcattatatccataatcatacaatctcattttagtctttatgaattgaacctagctagattattgtggagctacattgatactcacattgctttaaattaaaaacataaaacaaaatagttaccgtaataatccataattcataagctttatccagcatacattagctaggactagccttaggatctacgatctagggtttcagtaaagttccctagcagatattttagtctggctttgtattcgtatatttttgaccaagtttttatgttatgtataagataaatacacattaatgttaaaagagctaagtatatgatgtaatatgtatgaaacagtgggctcatttccctcacatacactttggactcatggctgaccatcctcccacgaagaaggctaacgtgcgccaacaggttacttactactactacactatatttatttattcaaatgtatataatcaggagcatgcatgcattgatcatcaaaacataatcgagatattttattttggtgtaatgaaggaaggagaggatgggatgatgggaagagaagggttttacggttcagctgccaacgttggggtggcccataactagctacgaagactttcccaatcttttgtaatcttcaaaatgtggttactttcagctcaaacttaactttcttattactattttatgatatttgataatcgatcaggagaccttttttttttttcttaaagaaattttcggaactactagaattttctcttggaattgaaaatatattgttttctcagttgccgtgttatatatttaatatcaaaagcatgcagtagctaagctagctaggctttaccatacgttaatgatactgtctttttctctttacaattccatattcgaatttgatttgtatataacatattgggaagaatcatcaatatgtattcagctcaaaagaattcaacaaaaaaaaatgcctattatcaataaaaattcactgggctttagaaggcccacaatagtataatggatcctttttgttgggcttatttcagtcagggaacaatagccttgattttgttgggctaaccgctaacgcattaaaaaaatcacggtcaatcggtgatcgtcaaatctagttacgtggcatttaatatttaaaactacaaaatttaccagtcttggctcaaaaaaatatttattcacttttcttcttctctgaccaaaatcaaaatttgttcgattctcattcttcttctcacagtcgtaaaccctaaaaaaaaaacagagaaatcaaatttcaatctcgaaggatctacaaagaagcatg

SEQ ID NO: 7481 - DNA, 3000 bp, Unknown; identical to SEQ ID NO: 7473
  misc_feature (1)..( 3000): cDNA_ID_1817809_gDNA_ID_1621147_Annot_ID_56790 3000 nt of promoter + ATG

SEQ ID NO: 7482 - DNA, 3000 bp, Unknown
  misc_feature (1)..( 3000): cDNA_ID_1817799_gDNA_ID_1621147_Annot_ID_56793 3000 nt of promoter + ATG
ttttgatttacacttttagtaatagtagtttgttaagaaaacatgcataaagcataattctatgtgtgtgtatttcacttcacatatagcatatatatgaaaacttctctctatttcctagttaaaatctctacagtcgtagttaattggctaggattaaggaagttaagcgatcatttagcacatatgtattgtgaagttttgttgaatgtttacaaggtttgtttccaagtgattgagatgacaaatcttcctctgttcgcaacaaccacgttgttttacacttattcccaagcatcatttttttttttggtttatcttttaattgcaatatacatatatagtacacacatacacgagatatatacaaacgtatgcaattgcattctataaattgatgttagtgaaggatatttccaatattacaagcaagcatttatttatatgttatgtacaatgtcttttgtgttataattagattgttttattcagcatatatttttctaaatcggtggtcttgattgatcaattactcctgtcgtgtttttttggcattattgaatcaacaacatttgctcgaattcggaaactcttccaattattaaagattgctgaaaatatcattttatctagattcttatcactctttcatatttgttggcattattatccatttcaatttcgttataaaaaaaacaggtggtaagtttgcaaactgagctttcatatctacaagcacacttagcaactctagagctgccacaacctcaaccaccacaggttccggtgtcatcttcaggatctctacaggctctttccataacggacctcccaacaatatcaccgtcggtgtacgacctctcctccatcttcgagccggtcatgtcctccacttgggccatgcagcaacaaccacgaccgtctgatcatctcttcggcgtcccgtcatcgtccaatatgggcggaggcggtgagctccaagcactggcgcgtgagtttattcacggtgggcaaatgccagctcagccatcgccgggaaccagtggttctgcctcgtcagtgataaaacgagaatgaagttatttttatcgtatgtttgtttatttggaccgtaagagatctatagttagccatatgtttctccttgtaatatatatacttggtcgaattcgtatttaaattgttgtctagaatgttaatataagaactatatgatttacattgattaaatggagtatcttataggccaatatgttgaagttgctttggtctcttggaccatcgaatatgttgttttaatcagcctagagtacaccggttctccacaacttgggtggaatcttgagcgtgaaggaggcttgattctggcgcgagacacgaaccaatgagtctcatttctcattttccctatcacttatattgggccttaaatgggttcaataaagtttttttttcttatatcaagcagcccaaaatattatttaaacccgactcaattgagtttgatactctggtttgctttgtagtccacactattttaacaacatcttcgaagcatgcatttgatttaacaatcttcctaatttactagagaatttgagccaattttgtcttttttttcaccatttttataaaagctggttttcaacttgtgttctcttagcatttcccgcctctacatcaactagaaggccctacacggaccttgaacatgatcttagcgatgtctaaggactaagctacataaaccaatgagtaaaatacatatggattggacaataatcaccaatcaaaaccccaacgtcgattgcatagccgataagtagtaccacaatggtgagaggaggatagtgccagcggctatgaagggtcgacgtaaaccaaaccttgatgagacactgtaaaacacgactattggttgaacaatcagttccaatcgaggctcacaaagtcaaagcatgcttgtaagatatttggagtaattgaaggtacggtgtaatcagagcgtttcttgaattgccgaaatgaagtttagccctatggctatagaagcaataagccatttttatattcataactttagaggtattaataagaaacatatataaatttttttataaatgtattgacaaaaaatcaagtaaaaataagcaagatgcaaaacataagcaacatttctaattaatattatataattttttataatgattttatacatgaaaaaatctctaattaatagatatgacacatgtgtgatcatgtgagttatcaattttgaataattttttaatactaaattgacatattgtttgatcagaaaatgtcattttttgaaactaagtgaatgaataaagggttgagctaagcaatatataattgttgatgatgaaataataacatgaatacaaattatatttatatgtgtgtatcaattagtgtaatatttaagagagaaccattggagtagagccttacaagacaatatatgatcaccattggaaaactttaaagctattactatggtaaaaactcaattgcttgaattcgaattcaagtaatcaaaatcttattattagctcaaatctcaagttcctattactactctatacatatacatgtgtattaatctatgttatcaccaaaatagaaacaattagatatagcaagtgaccactattttccttctaagacaccatacgaactaatttttatcaaaaacaaattatcaagctctattacaattccgcatgtgtgctatacattagattaattaaaagaaattaaatctgttttcactccatttatcaaaagtaacatctttaacgaatcaaacccataaggtactcttactctctattaatagaggagaatgtgtcatcttctcattactcaataagcatacttatcatatacacaataccacaatgataaggtcaaaatgttcttgccatcatcatctacttgttcttgttatggttgttctttggatatcaccaagat

SEQ ID NO: 7483 - DNA, 973 bp, Unknown
  misc_feature (1)..( 973): cDNA_ID_1817952_gDNA_ID_1621148_Annot_ID_56795 3000 nt of promoter + ATG
gaattctccagtttcacctgtaagtctaaaagctgaaccttctttaattcacaatccatggtgtttgtttaaatacctgctcactttggttgttcttcaatcaacaccaacttaacgaaatcatgagacagactataaaatttgaagagtcttagaacgactaggtctcaccaacctctgtgtgcactaaaaatcgcctctccaagtgtttcagcaacataatctacctctgtcatgtgttatcatttcttcttctcttaacggtattacatattatgttttgcaggtgatatctggttgaaaatgaaaactggccactggctgtacccgaatcgtctcaagcttctcaggctccactgctaatagaatttgattccgatttgggattattatactggtcttcttgtatgggacgaccaatatgtctttctagttttagttgtgaacctggaattggtctgttattgtgtcattaaaaagccggaaactctgtctcggctgcataataaagttcatcagacattgtgttgggtgtggtgaggtttttccatacatatacatttacattacaactactggtgtcttttatgattatcttaaactaaacttgcagtgttaaaactaaacttgcttttgtttttggataagatcactctaaaacggtacaacccctgcctgtatcctaccaacagtaacaacacactacagctcataggccatagcaccagagttttgtgtaaacgaaatggcccagaataattgcaatttggtccgaaagtaaagtctattgcgactgggcctgttccctaaaatgtgatttgggctatagccggaatatcaaatagcgggtcaacccgaaacccgacccagtaattattctctcccctccgaaagcatcgataaatcctctggtttcctttgtccaacgagtccattttcgcgagcttccgtgtccaagagctcctcgaccatg

SEQ ID NO: 7484 - DNA, 3000 bp, Unknown
  misc_feature (1)..( 3000): cDNA_ID_1817948_gDNA_ID_1621148_Annot_ID_56797 3000 nt of promoter + ATG
atccgtttaaagtatattaacacatacctggaaccgtgatcacagcatctttaatcttctttcccaagaaagcttcagctgtttctttcatcttggttagtatcatagcacttatttcctcagggctaaacaatttctcttcacctttaaccttcacttgaatgtaaggcttcccatctttgttcacaaccttgtatggcaagaatttgatatccctttgtacatcaggatcatcaaatctgtaacacaacacccaaaaaacataaacaaaaagctcaagatatattatatatggactagacagacactatgacactaattactaaacacttactttcttccaatcagacgtttcgggtcgaagatggttcgctccgggttcttggctgcttgattcttagcagcttccccgatgagacgttcggtatcagtaaatgcaacccaagatggtgtaattctgtttccttgatcgtttgctatgatttccacatgtttgttatgatagacaccaacacatgaatatgtagtccctagatcgatccctatcaccgtccccagtttctgctcttcgccttctattgccaaacttgacatcaaagctgctccaatattcattaaaaaatcaagcactatagcataaataggagaaacgtcaaattccaaaaaatgtgtgttttatgagaattttaccagtcagaaaaaccaaacacgcaatagctttgttcctcgtcatcttcgctgtgttttccttgataaaaatcatttttcgttgttgagaactcttcttcgatctcgtttgttagtttatttggaagagtatgaagttcgtcgtctatttatatgtgcttcagtatgattcgtatttagcctcggtagagtgtcctctccaatcacttcttgacacgtaagcttaatgggttattttgtgttggcgcgctccttactttttacacacgtaaagtacccaatcacaagcagacacgtgacattaaatcgtcatcgcaaaatctttcaaaggttttacgacttcttcgtatgtatgtatagttatccaaaacaattatcattataatcaaaattaaattattaacaatgtttttatcacatgcatgaattattaaaagatttttttcgtgtaccgattaataaaataaaaagatttgcgtcataatttacataaggataatttcttttgttattaatgaattagtgtaatgccaaaactactgcatatgcggtgaggtgtaatatttggaagaacatgactaatgcttaaccactccatttatttatcacgcagacatatatataagaaatatgccattttctaattactctcagtgttgtatttgtattggaatcaatgcacaataagaattggatattggataacaacaaaacaggcaaaccaaccctaatggcggccctaggtttttggcttctaatattaattcactttcaaaactaaataattgaccatatatcatttgatttttaaaatatgtcgttggagtaaatcaatattttaatactaagttataattcatatggtatactcgaaattgtcaaagggtaatatggatattattattttattttattttttgttagaagggtaatatgggcattataatccgtcttttttgacattatataaattacatagtatacaaaacagcgtgaataatgtaattgtagtgaatgcgggaggaagaaatggaatcttcgtcagaaggtgagacaaacaagatttcccgatgcaaagccactggttcagacaatcctgatgaggactacgtcgagatcacactcgaagtgcgagacgaaaccatcaacacaatgaaggccaaggcgacacttcgttcggttctttccgggaggctgaaaacgatggttaagtcgctatcgtttgcttcacgccggctcgaccgtagtaagtcgttcggtgctatgtttgctcttcgagggttgaggttcattgccaaaaacgacgccgttggtagaggctgggatgaggttgcaatgaggtttgataagttggccgttgaagggaaactccctaaatccaaatttggacattgcataggtaaacaaaaaaactttaaataatataccttttttggtttcatttttttctctctgtaatttcactgcaatactcaacttgtttctcatatacagttttgtttttttattactttttttttaactgaattttaaaagaattatttcaactaaataggaatggttgaatctagcgaatttgtgaacgagctttttgaggcgttggtccgaaggagagggactacgtcatcgtcaatcaccaaaactgaattgtttgaattctgggagcagatcacaggcaatagttttgatgataggctgcaaatcttttttgatatgtaagcatgattttatatttatttatagtattttgacaagtataatgcatgattatcatttgtcataaaatatggtaagttgattagttatctctttgtgtttatgtatataagggtggacaaaaatttggacggacgtattacaggagatgaggttaaggaggtgaggtataccttattaaattgatctcaatttcgttatggtcctaatataaaaatgttacaatctaagttgtttcggctgaattatagataattgctttaagtgcttcggctaacaagctatcaaagattaaagaaaatgtagatgaatatgctgccttgatcatggaagaactagatcgcgacaacctcggatatattgaggttcgttgtctactatctaatggttacacttgtttaacatcactattaaaaacatggttaaatccttaaaatcagttgtaaatgtatttgttatatatttcaatgtgtttgaaaatatagttgagcaatggtttacttgcagttacataacttggaaacattgcttctccaagttcctagccaatcaaataacagtccatcttccgcgaacaaacgtgcactcaacaagatg

SEQ ID NO: 7485 - DNA, 3000 bp, Unknown
  misc_feature (1)..( 3000): cDNA_ID_1817940_gDNA_ID_1621148_Annot_ID_56799 3000 nt of promoter + ATG
ttttgcatgcagcaaacgcgggaaatcacatgccaggtgagatatagcgtgcaagcctattccaaccgcgatcccaaatgcaacaacctgcatggacataaagattaagcataaccaaattatattgttacaaaagtcgtatatctttttgtattcttctacaacaacaaaaaaaacatggattattggacaatgaaaattatataatgtgtatagatatgatatatattaatatacataatttaccttgtggaaattgatattgtcatcaaatggaacaacagacccaataagcttggacttggtccttagccaagtgatagtgttcctacaaacgggcaagagaatgagagccatgttgaatttcaaggtctctgcactgcctttggccacggtaacacagtagcccatcacctcgaacacggttttgcgtttatactggagaaatttccaagtgaagagagtgatgcaaatggatatccacaatgttaacacccaaatccttttccaattttccaagaagaagtatgatatattcatagcaaatcttttcaccgggtttcgatcttttgttggtatgagcttctggctcaacatcttgttgagtgcacgtttgttcgcggaagatggactgttatttgattggctaggaacttggagaagcaatgtttccaagttatgtaactgcaagtaaaccattgctcaactatattttcaaacacattgaaatatataacaaatacatttacaactgattttaaggatttaaccatgtttttaatagtgatgttaaacaagtgtaaccattagatagtagacaacgaacctcaatatatccgaggttgtcgcgatctagttcttccatgatcaaggcagcatattcatctacattttctttaatctttgatagcttgttagccgaagcacttaaagcaattatctataattcagccgaaacaacttagattgtaacatttttatattaggaccataacgaaattgagatcaatttaataaggtatacctcacctccttaacctcatctcctgtaatacgtccgtccaaatttttgtccacccttatatacataaacacaaagagataactaatcaacttaccatattttatgacaaatgataatcatgcattatacttgtcaaaatactataaataaatataaaatcatgcttacatatcaaaaaagatttgcagcctatcatcaaaactattgcctgtgatctgctcccagaattcaaacaattcagttttggtgattgacgatgacgtagtccctctccttcggaccaacgcctcaaaaagctcgttcacaaattcgctagattcaaccattcctatttagttgaaataattcttttaaaattcagttaaaaaaaaagtaataaaaaaacaaaactgtatatgagaaacaagttgagtattgcagtgaaattacagagagaaaaaaatgaaaccaaaaaaggtatattatttaaagtttttttgtttacctatgcaatgtccaaatttggatttagggagtttcccttcaacggccaacttatcaaacctcattgcaacctcatcccagcctctaccaacggcgtcgtttttggcaatgaacctcaaccctcgaagagcaaacatagcaccgaacgacttactacggtcgagccggcgtgaagcaaacgatagcgacttaaccatcgttttcagcctcccggaaagaaccgaacgaagtgtcgccttggccttcattgtgttgatggtttcgtctcgcacttcgagtgtgatctcgacgtagtcctcatcaggattgtctgaaccagtggctttgcatcgggaaatcttgtttgtctcaccttctgacgaagattccatttcttcctcccgcattcactacaattacattattcacgctgttttgtatactatgtaatttatataatgtcaaaaaagacggattataatgcccatattacccttctaacaaaaaataaaataaaataataatatccatattaccctttgacaatttcgagtataccatatgaattataacttagtattaaaatattgatttactccaacgacatattttaaaaatcaaatgatatatggtcaattatttagttttgaaagtgaattaatattagaagccaaaaacctagggccgccattagggttggtttgcctgttttgttgttatccaatatccaattcttattgtgcattgattccaatacaaatacaacactgagagtaattagaaaatggcatatttcttatatatatgtctgcgtgataaataaatggagtggttaagcattagtcatgttcttccaaatattacacctcaccgcatatgcagtagttttggcattacactaattcattaataacaaaagaaattatccttatgtaaattatgacgcaaatctttttattttattaatcggtacacgaaaaaaatcttttaataattcatgcatgtgataaaaacattgttaataatttaattttgattataatgataattgttttggataactatacatacatacgaagaagtcgtaaaacctttgaaagattttgcgatgacgatttaatgtcacgtgtctgcttgtgattgggtactttacgtgtgtaaaaagtaaggagcgcgccaacacaaaataacccattaagcttacgtgtcaagaagtgattggagaggacactctaccgaggctaaatacgaatcatactgaagcacatataaatagacgacgaacttcatactcttccaaataaactaacaaacgagatcgaagaagagttctcaacaacgaaaaatgatttttatcaaggaaaacacagcgaagatgacgaggaacaaagctattgcgtgtttggtttttctgactggtaaaattctcataaaacacacattttttggaatttgacgtttctcctatttatgctatagtgcttgattttttaatgaatattggagcagctttg

SEQ ID NO: 7486 - DNA, 3000 bp, Unknown
  misc_feature (1)..( 3000): cDNA_ID_1817932_gDNA_ID_1621148_Annot_ID_56801 3000 nt of promoter + ATG
acgggctgatccatagtcttatgatccatagccgaagggaccggcgcgtgaggaccactcgaagatccataagtatacttttccccaaatttgaacgagaatttgagagatcctttcgccttcccgttaggcaacctcacggcgtaagtaaccgttttctcctcgtcacctttattctgatccaaaagctccttcaccggaacgctaacctcaccgacaggtttatcaccagcgatgggacgatccgccacgatctcgaaaacaagagtaagacgattgtcacgcgccgctgcgtcatcgacggtgagcttcatttgatgcttccatttaggtttggtgccgcaatctttatcaacctttgtcttctgcttcgtcctagcgtcgccgttgatggaaacgacggcgtacaagtcttgtttaccgatcaattgaacgtctttgagatcctccgcagatataatcgtcagatccaatgatctacactccatggttactcggatcgaaattgaatgaaataaacttgaaatttgctctgagaatgttttttatgatgaggaaaagaaaagtggagagggcaaaggatatatatgcatttatgataaagtcggtttaaggaacaaagagttttttttttacacacgggagggacacgcacgagattttttttgttaaggacgcggtttctttaaatgcaaatagcttttttccttctaatattagtttcttcttatctgaagtttaattatcttgctgtttttagtaaattattatttgaccatggttcaaataataaactcatgtgtatctaagagtttagtgataatggcaatgtaaacgttcaaagatatggaaattataaacgttttaaagaatgtctcaaatgataagaccatgatcaattcggtgttctccgtaagcctggttacttgacaacgtaatcaggtacgtaaaataggacaaagacacgccggagagttagacttattattgtttgatgttgatatcatgatatgtagtaatcatatcgcattttactctgctaggattggatatgatcaacatcactaacatattcgaaaaagaatatcaagtggacgagtacgaattctacaactttaccattcgaaagtttaccgtaaactctaaatgaaaatgttttaataaatttacattgaattacagtttaacaaaaccaactaatggtggtatatatgatggtaattagttgaagattagttgtcttcggaaaaaagttactaacttaaaacttggaaccatgcatgtattgcgataatgaatgagcatataaggtggaatcttttgaaatgtagaataatctcaagcatctttcttggtttcttcttcagtagtcaagagcaatacgcgtggaataacccatacgttttctatttttgcttattctcgaaggcgattggttctcattttctcgatcgaatcatccttttaattcaacgatagcctcacgtcgcgtggtcctgacgcactatccatattctttgccactttattctccttcacggaacatttaagttaaacgcaaatatacacgttagtccatatattggaggagaccatattcacaaattttgatatataacacaaaaaaagtttacctgatttttcttctagtacttgatctcatcactcaactacttgcaagtcttgaaactaatcatcaactcaccattcagaatttgtttagcaaaaaaatcactcaatgataactaaaaacccaacaaacatacacgatcatatttcaaacgacaccattgccaatgacttaaaagtttttgaccaatgaaaattttagcgttgagtattttgaatcacgttcagttgctcatcgttattttcagtaactacaaaatgaacacaatttaatcgttagtcgctgaaaattagaaaacgaatatgacatagtcattaatgttaattaccattagcaaatacgaaatgaacataatttacattagaaccaaataattctttctatgaaactatccgaaatccaaattccggatgcattacaagtcaacaggtttagaatcaaattactgtaaaacaaccttatcaaggacttttttttttgtgtttcatcaattggtaagtttactttaataaaattgcaatattaatatatttatatataattctttgacaacatatcaaaatattttaaatttgaaatttgtatacatatttcccttaacttttgtttgtttatatccatatttggtaactgtacaatggggatccacttttgaatcaaaaaacaccacactgaaacaaaaataaagaaaagaagaaaaacaagtgaacccatatccatgttctgtctgaatccgagtttacttcttcttagttacagaggaggaaaaaaggaaaacctaagcggaaagggaatatccaaaaaaaaaaaaaaaaaaaaaagacagaagtataagaaaagtatcctgaacatgataggtctctctcccatctataacctctgcaatttctctcgaccaaaaccctaatttcaggtttggggttttccttctttcactgtaagtacgagcaattattttcatatatatatgtacctatatatatatacacacttatatacttgttgatgagcctctcgaattccccaatcttaaacactcttcttcaattctacgttcgattttagcgatttcggagttctcttcttctgtcttcgaatttgtacgcacttattagttctatacatatatcgatcgatatagcatgtgtttctagagctcttaggttcagtgattgatcatgtgtgtgtgtgtgttcgttgaattgggggatttaacgggttttgcttacaaatattggattttgggattgtaatttggttgatctctctctcaaattcgagcaggagtgtataagctaccaatttagttttctttccctttagtgagtgctcaatttctgattttagtttgaaaatctagtgttttgaca

SEQ ID NO: 7487 - DNA, 3000 bp, Unknown
  misc_feature (1)..( 3000): cDNA_ID_1817928_gDNA_ID_1621148_Annot_ID_56802 3000 nt of promoter + ATG
atatggaaagcaccaacaagtaagcccttggatcaaatagaggatacaaagcctcgctatcttctcaatgaagcaagaactgagagtaagactctagatagaatacaggagtcaaggccggtcctaactgaataccgtaagcttcccccgattgtattgaagcttccgttcaggcgtggctaaggagaagattggacttaagtctgaaagttttgatcgctggatgtgagaagattggtcttcctgaagcataaatgtgtacagaagagaaatgttttacacaaaggattttttattcctcttttatgcttattatttccataattaggcagaagtaatgtttctattattggtttgctttggagttatttgaagtagcttttcatatggtctattattcagaaatatgaagttgaaataatgattgttatgaatataaccaagcatgatatacaaagagtcgatctagatacatacaaatcctcccgaatagtagtagatagtagtagtataaactaaagtcacgagaatgatttttaaactactatacaaatcttgactgatttatgtgcagctcatttgctgcggtcgcttgtttaagttgtgacttgtgagagacggctttggttaagttagagtcctcaaaaccaagccctgctccaaatcttttgcagccaaataacataggaaccaaattgtcagttcaaattcatttcacactctttagattagttttggcttactttggatccaagaccagattctgaacctctatgaaggctgagctagctgcgttagaagctatctttcccatctgatatcaaaaaaccaattttttcaacaaagtttgtttaatttattacaagccggctgagtcaaagattgggacgatcaaatttgtttattttttactaaaacattatttggcaaatggtttgatacagttttacaaacgtttaattatgagattactaactttcatttgactgaacatgttttcagtctttcaagtaatgaagaccacatgcatgatcaaaaagaaagaagaagacagacgacctgatttgatggccttatgggctttctgttttctgatatatataagtttgtttcagtttttctacgtccatgggtccttctatttttagcccattatgaactttgaagccacgaaatccatcgactgttgtttaccttggcttaaggtgaactacttgctttatttatcttacactttttcgaagtaagtattttggcaaaagaaaactaaaagtatctttgctcaaaaaaaaaaaaaaaaactgaaattataaaaaatacagcacttcaaattaaagaaactaaactaaattgagtgatctatagtttatatagttattatgaaatagtaaaaaagttgatggtttttagtacctatgtaattttggatggttttactgctacctatataatttaaacatgacgctagttttttttataaaaaaaatctaatatggatttatatttacatcatacgagagttcatcaaaaaatgagataagttcatcataaactgattggttacattatatgattatatagtaatttagcaaaatttaaaattatttgactacaattacgaacatttccatttagcgaagtttcccttaaatagtttgaatatatattaaataatagtgtaaatcttttataacctttttaaacatcatattatgttaatattgattgaaatttagcatgaaactatatcatcaattagcgtaaaaagaaaagaaaaaaaacctagtagtagcacatcgaatggaataatgaggagaacacaaaacacgtccacgactttagaatatttcttaacattgaacacttaagaattgaaaacaataaaaacactctaataaacccttaaaatagccaatgaaaatctccaaagtgtgcatatagaaagaaaaaaaaagatctttatattgcgactctctcatattttgctctccttttatgtgcctcattctcctctcgaagacttcgtgttgaaagagcgaccagtgctctttctctctatccacaaacacgaacaattcttcgttgtctttgttcctgttgccaactccagattcccacagtgccacaatctctaacattgcaaagttgagacatctcataaactaactcaggttatcaaatctatctccttttgccgtgtttggcaattcatgttttcgggtttgctttcctctttctggggtttcttgtctcgcaacgctactgctctatgtctagatatcgagagaactaacaatcggagatgcttttgttttagaatttgtgtttccacgtttttgtctcttgcgtaaagatttcgacttttcctgcttttcttgcataccattgtcatatgttcgtcctttgggttaatcctgtacgagatcattgagaattacatacaacctgttcatgtttgggatcgatgcttatgggctttgctttgatcaggtctgattatgaatctgggtcagtggttctacggaatttggctctgaaaacactagattttatctttgtcctcgtcttcgtgcttttgtggactctgctttaattcccgtgtctgtgtttgtttcaatgatcaagtcttttgattgaatcgaatgtatttggtattatccctcaacaacttctttcacgatctgaggtagttgaatcttcagtttggtaccgtggtcttaaatatctgagctttatactttagcccgtcgtgttgctctggacaatgtatttatttgagctccttgcggtttgtttgtatctttcatacttagggtagtgaatttcgaagttgggtcttttatctttgtgtttttgcttcttagtagttagatcttgtttgccaggaaagtaggactgatttgcctttgctgtttgatttattacattctgagtttaccacatttttgggttcttgaaagtttacattttcaggtttgagatccaatgatgttgaaaatg

SEQ ID NO: 7488 - DNA, 3000 bp, Unknown
  misc_feature (1)..( 3000): cDNA_ID_1817916_gDNA_ID_1621148_Annot_ID_56805 3000 nt of promoter + ATG
gactaagagaaaaatgtattcagtggaggctaaagaaattcttctcgaaatctgatgcaaaacccataactgaaagaaaagaagaagaaagaactctttgaattagttcccgagccaaagatcatatacataaccagaattacgacgaaggagttacggatgtttaggacgagagccaaagatgttctaacaatatgtaaccaaatgaagactttccaaatattaaaaagagcccttatgagataaaaaaaaaaaactttgttggcctgtttttcaatgcccaaatatagcgatcaagattttgagatgaaagttatgaccattaaaggagtatatatatccaattgtccatactagccagcgaccgtgaatgctgcccaataaccaacaagccaaaatgaccattgtttacaaatgtctttctcatttgctgttttccgacagatagagtaagtgtatatatagaatagtactgaaagagagggccgggggacttatatacgttttgaggaaaaagataaacaacattagagtaagagcgagatatatacacttatataaagtcatgtctataagaaagttcaaatccaacttaaaaatatatactcacaacaaataaaagttacatcacttcgattatttagagtttataaaactaattagaaaccgaactctttttttcttcaaggtcgtgttttggttttaggcttttagccctaatttacaggtctttctaaggctaaatctactataaaatgtaattgcatgcctagggttcaaacatgaagtctcctctccctcaaataatgtcaacttggaagacaacacgattgtctccctgtattacatgtctaccgagaatagatgtacaatgtaatttcatggattatgtttaacccgataataaattggtgtgggatgtaatgatttattttctttaatttaagaaattataagagttgacacaataaaaattagagaaaaaaaaaacatggcttttctttttactttatttatttaccctgcttcaaaacacaagagaataagagaaaagtgtattttgaaacgtttttgaatgttagtttggttttgtttgatttatagtactgtttaacatcagaaaagacaaatgagtttaaaaaaataataccaaaaaaagaatttactagatacaattttaaagtggaaatatttttaataacttggatcctcgtctaatttattcataacatttatgtgatatattatatatataggaaatgatttattagatagttgactaaaactatatattagatgctattatttgcataattcatatagttatttattatgaaaaaagagaagaataatcagttatgtaaaagtagaattttttttttttttttaaatgttatcggaaaaactgtatacagtaataaaaaagagaaaaaaaaaaaaaaccatatctttgtcgatggattaaaaacaacattttcattacgcagcgcttcttcgccctcagattcttcttcaccttgaaagaccattaacatcattccttgcccagatccaaacaatgccatctccactctctctatttagggttctctccaacttttcaaatccctaattcttgctccctcccttcaatcaattccgatcatcatcgaggtctctctactccccgaatttaaagatcagagccgcgacttcctctgccttcttttcctcggaatttttcagctacgttttccaggtggtgtgtattgtcaatcagttgacctttgcttttgtagccagatcgttcgtgctttgagtttagggctcttttacaaggtttcgtgttggtggaatttctctacctaggtttgggggaagagttcagtaatttcgttgtagatcgtgatttgggcttttagggtttcggtttactggttgctggaatttatggtagcgttattgaattcggactctctgcatgtgtaagcgttgaagtttgaagtttcaccgggttttgtttcttctgctgaagagtcgagattattttacgcattaagaatcgattcagaaggtttttaggaattagtttctgtggattgtaactatataactactgggaggggatgtttggttctacattggatagcagccgtggaaacagcgctgcctcagggcagcttcttactccgacacgcttcgtgtggccttatggaggtagaagagtcttcctaagcggatctttcaccaggtgagatgactgagcttgaactaggatagtttactttatatttcagttaagctatttatcggggtttgtgtagagtatgtgctctgtatagtatctatcggggttttgcagtccatggactgatttctgaaatgggcatttgaacaggtggacagagcatgtgccaatgtcaccgctcgagggctgccctactgtttttcaagtcatttgcaacttgacgccaggatatcatcaggttaataatcttgtactcgacctgtatcatggcaaattctttgttaattaatccctgcagaagcatttatgtccttgtagtgatttagcgatgtccataattgtgcttcatttagtctctggatacttaacctatgcaatgagaatcttatatacctctgtcatatttgtatgactgtggctgaaaattgcaaatttccttgctaattgatcaaaatttgactttatacatcaccatccacataacaaaagttggggtcttcatgctgtgtgatacctaaatcacttcttttaataaaggctacagtgtgtgtatagagattcatatattttggcagttggatgtactatatataacaagattttaattattacaatgtgagatgcttaagaagccactaatgttacatttatgttatttcattctcatgcagtataagttttttgttgatggggaatggcggcacgatgagcaccaaccatttgtaagcggaaatggtggagtagtgaatacaatatttataactgggccagat

SEQ ID NO: 7489 - DNA, 3000 bp, Unknown
  misc_feature (1)..( 3000): cDNA_ID_1817912_gDNA_ID_1621148_Annot_ID_56806 3000 nt of promoter + ATG
gaatttccaagacggaagtctggatatctcataaatcacatagttttaaatgttttactagcttctcagtatgaaatttcactcttgagtataatagcaaatttgtaaaattgcagcttggaactcatggatcaaacttgacagaggaagagcttgagacgcacacaatagcagcctggaaagaggggaaggctcatattagccggcaatatgatggaagtgggagaccatatcctaggccacttgttcaggtgagattttcacagttgatttgtatcgctgttactactaactttcttctgtttgcgtaatctctgaacatagccttatcctagaactttctattgcatgttatattgaaaagagctagtagtatttctctcttgctattaatggttttatatatggctatcaggttggaccctatgataatctgaaagacgttgccctgaaaattttgcaaaacaaggtggcagctgttccggttatatattcttctttgcaggatggttcatatccgcagttactgcatcttgcttcgctatcaggcatattaaaatgtaaggtcccttcatttgtgaataagacactgataagcgcgccaatttggcatttctcactttttaattcatgacgtgcatatgattctgctatttccaaaattttcccacttcttcatttctccaaattctgtgaagggatgggatctttaggagggagggaaattagaaactaaagttgcaattgactttaccaaactttttacacagttttccctgttaataattcctttcgaaatttatgcctttatcagacacttaagctctaaattaagcataatcttccaggtatatgcagatactttagacattcgtctagctctttacctatccttcagcaacccatttgttcaattcccctgggtacgtgggtccctagaatcggagaatcaagtagcaaacctctcgctacattgagacctcacgcctctttgggttctgcgctcgcattattagttcaaggtaatcctttttcttatcttgttgcagcaacatcttattcaaagctcatctgcaactcagactatcaacctctacattacaatcagattttcagttttaaatattttgtctagatggtaatataatcaagtagctgaacacatgggtatactcaagtcaatgcagaccaacaaaccaactttagatgttacgaccacttttattatttttatacagatgtaattgctgcaacatgagtaaactaacgaggtttaaaaacatagaaacatttttgtcaatcttaaagcagatatatttatagaatttctcgtgatcttttccctggttcctcatagatggaaatgaatgaatgagtcatgcttaatttatgtttcctggttattacagctgaagtcagttcaattcccgtagtggatgacaacgactcgcttattgacatatactctcgaaggtaaacctctatccatcaatcgacatgatgtcttatgcattccatctttgacgtccttgtgttctgatgatatttgtaattggccagtgatataactgctctggctaaagacaaggcatacgcacagattcatcttgatgacatgacagttcaccaggtaaacctctcatcagaaaccaagatccatcacatgtctcatcaaattacgagttttacttaaatgtaacctgcctatctatcatggaaattgcctcgtttctgatttatttgaacatacatctttacaagaatgaaagaagagatgaaacgttataataaagtggaggataatgtgtttgtgggttttcaggcgctacagttggggcaagatgcgagcccgccttatggaatcttcaacgggcagagatgtcacatgtgcttgcgctcagactctcttgtgaaagtgatggagcggttggcgaatccaggtacacactatctcctatatacaatcttcagctttgttgcttgacacaggaacatcagatgagatgtaactggggtttgggtttgtgtatataaaacacaacaggtgtaaggaggctggtgatagtggaagcagggagcaaacgtgttgaaggtatcatttcactgagcgatgttttccaattcctgctcggtctttgactcccacagcaaaacaacctccccaacctctttttctcatttcccctcaatcaaaactacccaacaatttgcttctttttttttttttttttttttcttcttgcaaggaatttgtaaatttgctacgaacctctttcatcattgttttcttattatttttgttgttttagttgaacgggtttccattcttgtgaagatattggctaccggaatcttttactagtagcttccctcagctttttcttccctctttttttttccatttttttttggttttgagtttttcacttcatcgactcgaaaagcaacacagcatgagaaggccgtagaagtgtaggacaatgcactggttgacaaagatgaattgtcaccagcgagaataagccttatggttgaagtttgcaagtaatgattaatacaattacaatcataacgaatcataaccttaagtacaataacaagtaaaaaagtacaatgacaagtaatattcagtaatggttaatcgagtgatttgatcatagcattatcgatttctttcggatttttcaatagctcttaaaatatatcaataaaagtaatacaaaattcaatcaaatctagtgacactaaaaaaaaataaaaaaatctaatgtcatttaaaaaatatttgagcaaaaaaaataaaatctaatgtcattaaaaataagtgttaaataattgatgacataataagtgatagagaaaaatgtatttactctatttacttatttaggcttatccagacaataaacgttttcgtttttccagtccaacaagtttcttcatcaactctctcaactgttttcgacataaacattccagaagctgagatcagatactaaa

SEQ ID NO: 7490 - DNA, 3000 bp, Unknown
  misc_feature (1)..( 3000): cDNA_ID_1817908_gDNA_ID_1621148_Annot_ID_56807 3000 nt of promoter + ATG
tcaaaaactataaaatagtaataatttttatgataaaatttgaaagcaatttttgtttgcttctacaacttttataacttttataataattaacccaataatcagcttgtatgggccatacctgatcatcaccttatagcgattgatatagatttatcaaccgactaattaacaataaataatttaaaatgcgatttgaatgatttcgtccacgttaacgacaacaaattcacgtagctatagccaacaaaatatgttataaaagcataaatgaactaccaatgtttgtttaatgtttgatatcgctatttaaaaacaaaacaatcacaagcttggtcaccaatttgatatatatccgatacacctgtacctgttgttcaaactaattcttaattacaacacaaaacaggcgcctaacttgcgcatggaagtttattacacaattattcgtagactcacctaacgaattgacttctacgccaacgtgcgtccatgcatctcaagatccttcttcaatcatacacccatgaattcgcacatatacgttgatgtatatgagattatgaaaaattcacgtacacattacatgtatcttatagacatcgctaagagcatagagagagagagagttgggggaaaatgggggccaaaagcaaaagttcgagtacgagattttttatgttttatcttatactaatatcattgtcgtttttgggtttgctcttaaactttaaacctctgtttctgctcaaccccatgatcgcttctccttcgatagttgagattcgttattctttgccggaaccggttaaacggactccgatatggctccgactcattagaaactatcttccggatgagaaaaagatccgagtgggtcttctcaacatcgcagagaacgagcgagagagctacgaggcaagcgggacgtcgatcttggagaatgtccacgtgtcgctcgatcctcttccgaacaatctgacatggacgagtttattcccggtttggatcgacgaggatcacacgtggcacattcctagttgtccagaagtccctctccctaagatggaaggttccgaagctgacgtggacgtcgtcgttgtcaaagtcccgtgcgatggtttctcggagaagagagggttaagagacgttttcaggctacaggtgaatctggcggcagcgaatcttgtggtggagagtggtcggaggaatgttgatcggactgtgtacgttgtcttcatcggatcttgtgggcctatgcatgagatctttaggtgtgatgagcgcgtgaagcgcgtgggggactattgggtctataggcctgatcttacgaggttgaagcagaagcttctcatgcctcctggttcatgtcagattgctccgctaggtaattttggctttattattcataggtcaatatgttttcttcatttatttatttatttattgtcgcatgcatgatgacataatgcatagttaaaaaattccaatgtttcgctaactatttcttattcgttgttaaaggtcaaggagaagcatggatacaagacaagaacagaaatctcacatccgaaaaaactacattatcatcatttactgcccaacgtgtcgcttacgtgacgttactacactcatcggaggtatacgtatgcggagcaatagccttagcacaaagcataaggcaatctggatcaaccaaggacatgattctcctccacgatgactctataaccaacatctctctcattggcctaagccttgctggctggaaactacggcgagtggagagaattcgtagtcctttttccaagaagcgttcttacaatgagtggaactacagtaagttacgtgtgtggcaagtgacagattacgacaaactagtgtttatagacgcagacttcatcatcgtcaagaatattgattaccttttctcctatcctcaactttctgccgctggcaataacaaagtcttgttcaactcaggagtcatggtaatgcatctaactaacaaatatctttaacaatagattgtttgatttgaatatgttgacttttttaagtttctaaagatattgccttatcaatccatttcttactattttattttatcgaattttccatatgttttatataagaaagtctggttttcttcaggttctggagccatcagcttgtttattcgaggatttgatgcttaaatcattcaagatcgggtcatacaacgggggagaccaaggatttctgaacgaatatttcgtgtggtggcataggttatcaaaacgtttaaatacgatgaaatactttggtgatgaaagcaggcatgataaagcgcgcaatcttccagaaaatttagagggcatacactacttgggactaaaaccatggcgatgttacagagactacgattgtaactgggacttgaaaacgcgacgtgtgtatgcaagcgagtcggtgcatgcgagatggtggaaagtgtacgacaagatgcctaagaagctgaaaggttattgtggtttgaatcttaagatggagaagaacgttgagaagtggaggaaaatggctaagctcaatggttttcctgaaaatcattggaaaattagaataaaagatcctaggaagaagaaccgtctaagtcaatgagaagagtcatcaaactcgcttattcaacaagagacttaattttttttttttctttacgtaaagattttgaaagggaatttaatttctaacaggtaattgtggattatgaaggaaaaacattatacgtagttatgatatatatttcgttcgagtgaaagtatttttagttttttacaaagactaataaccatacttttatttggaataataatatgcgtaatttaagtaaagtaattttctcttttcaaaaatataatttcgatgccttttttccctctcactcgttaacacttttgtgccgaccgatgaatcaaaattagagtaacagtgaaacgcattcttccctcaatcgttcaaatg

SEQ ID NO: 7491 - DNA, 3000 bp, Unknown
  misc_feature (1)..( 3000): cDNA_ID_1817900_gDNA_ID_1621148_Annot_ID_56812 3000 nt of promoter + ATG
ttgtgttcgccaatcaggtacgtaaatttctatttaatttactttactgttatttttaaaacacatgtattaaattttcgttatataacatgcttttttttttgttaaaatgtgaacagttgatgcaaaattgcggaatttcactcttcttcatcattggcaattttattccatggagactactaacagtagtcggtatgattctgtttagagattgtaatctaaaatatatttttttaaatgatagatgtaatgtaattcgaaccggtcaatttaacatgatgtttgtatgtttgcaggattggtgccatgtgtgttccacgtcttttgtttatttttcatccccgaatctccaagatggctggtaagtttttatttatttaaatatttgcaaatatagtattggtttctatgattataaccaatcaaaagccggtaaatattttgaaacttggttcaagcatttgtaaatatttgttggtgcttcttcatatatactgttatatatgacaggcgaagttaggtcgtgataaagaatgccgatcttcgttgcaacgccttaggggatctgacgtcgatatttctcgtgaagcaaacacaattagagtatgcaaaatttagtgttcattttaatatattctatctattatttactaatgttgggttttcaatatttattgtttttttttttgaaaaaattgatttctttttttttcaggataccattgacatgacagaaaacggtggtgaaactaagatgtctgaattgtttcagagacgatacgcatatccgttaattgtaagtattttgaactaatgcaaacaattatattgaatagcggttgtgttaaaacaaatatgattgttcaattgctttcgaattagtttttaaacatgaaaacattttaaataattcttacatatatatttgtattcagatcggagttggtttaatgtttttgcaacaattgtgtgggagctccggtgttacctattatgctagtagcctcttcaacaaaggaggtattttaattgataatatgaatatttcatctttcagttcaatccaataaatattttgagttcaatccatttaaaaaatttaacttataattttttattttcaggatttccaagtgctattggcacatccgtaatagccacaattatggtaaattttcaataataagaagaaaaatatactttaaattcactaaagaaattccaatatgaaaattgaaaaaaattatttgactatgtttaggttccaaaagcaatgctggcaacagtcctagtcgataaaatggggaggagaacgctcctaatggttagattataatatttttattcaatcaattgtattattagttatgactttcttcatgagactaaagacaagctaatttttatataaatttaaacaggcttcttgttctgcaatgggtttgagtgctttgctcttaagtgtttcttacggtttccaggtaattttaattctacatatacacatgcgtacgtatattgaaacaggatttaatgtgaataaaatttcttaacaacattgttaatataaatatgtacctttttctagctaattatctcttcaaaattttgttaaatgttatgcagtcgtttggcattcttccagaactcactcccatcttcacttgcatcggcgtcttgggtcacattgtgtcatttgccatgggaatgggaggactaccatggattataatggctgaggtataccaacattaatatttcatgtttttattaagatatttgtctaagaaatgttactaacgatgtgtgaactatatatgaccaaaatttatagcatagtggggttagttagacccaagtttcaaccagaaatgtgaatttggagctatatacaaaaacagcaacaacagaatctaataaaattttattttgcttgcagatatttccgatgaatgtgaaagtgtcagctgggaccttagttactgtaaccaattggttatttggttggattatcacatacactttcaattttatgctagaatggaatgcatcaggtaaatacctagaatataaacatgttattataattctcattattactattatgattctgttattggataattgattgtgttatattgtttactttttaaaggaatgttcctcatcttctcaatggtctccgccagttcgatcgtatttatatactttttggtacctgagacaaaaggccgatcacttgaagaaatacaagcactgctcaacaactctgtgcaataatatcatttttctttttctttttgggtaaatgatcatatatataagtcgattgttgttatttggtgtgagtttgaatgtgatccgtgtgcgtatcaaattttggatgggaaatttgaaacagtaaaaatttgtatattcctcgtttgggaaaaatgtatgttttggttagttatatgcaaaaatgttgttgaagaagtttatacataaaaagttaaatacaaaaagatggtaagaaaacaattgcaatttcatgtttagaggactctcctatagtttaaggtgagaaaaaaatcactagatttgattgataatatgaaagtcagtgattttgcgttttaaaacgtgattctgcatgtaaaatcgtaaggaaaggttagttgtgtctttcgtaaacatgattctacaagaaaagcattttaataaacaaattaaagaatcataaatttcatttagctttttttcattaaaccaagttccacatacaaatacaacttgccaaccataaagtgaaaggagttttatttagctagcctaaaacccattttctcattttgcataatgtgaaatagagtgggatcttaaacagagtcgtctcttgagaacgtggtctcgtatggtaggctctcaattttgacaagacataataatcatcgatctctccactataaaatcaaatttactttacacgacaaagagaaaaagagagagagaaagatg

SEQ ID NO: 7492 - DNA, 3000 bp, Unknown
  misc_feature (1)..( 3000): cDNA_ID_1817896_gDNA_ID_1621148_Annot_ID_56813 3000 nt of promoter + ATG
ttttttttttacttttactagttgctaatgctattaatcaatctaccagttctctgaaacctgtagacccacagtttctactttcggacttatttgttctgtatgtgttccacatttccggcctcattcctaaaagttgaattgatttgtgagatatttccttttcaaaaatcattgttcttttttatattttctcgatagcatagggttttcagatacggatagtgatagggcaacaaataaaactaggttaattcttatcctctctaaaagttagtaaagaataaagacaatttatttccttttaaggttccgaaaatgaggttttctaattctctccctagacgtaattaagctatcgctgtgccaaccagatttgtggtaggttacgtgcatctgttgatctatttgcatacatcataaagatcaatcctttaattgtttaaccacctttctgatatttcaattatcttgactttttttttctttgttcgttaaaactattgaatttttagtcatttagtaaatatattgcaagtgctatccataaagatgttctttaaatctgattgcgaactaaaatatcttagttgacaacttgcacgtatcagacatgatttgtggaatcactttagtatttttcattaatcagaaaggaacaaagagatcatgtggaaatgctctcatgatttacgttttctcttttttttttttttttttttccttactttcgtcgatttacttctattttaaaattggaaagtgattctagaaatcgctaatcgactacacaatgtcggacggtcctaatcgttgattggtctatgcttcttttcatatgtaaatatttcgtggatgataaaaataagggattaagtaaaaaccttaactccattattttatttttcttacattccactatgttacttacgttccatttttaggagaagtttgaagaataacccaagttaaatgcgatttcatacgaactaacaaaactagttcattgagataaaattcaattgatgatgaaaatcaaactaaaaaaaacgaagctaagactgaagcataaaagagggtttttcaatgtaaatataattatttttgtttgtaattgtctacaatatgaactatacaaattttaattagagtaagtgaaaaataaataaattagagtaagtgatacatcaaggatattaagttattaacacgatgacaaaaaaaaaaaaaaaaaagttatttacacaaaccattgattaggtattcaatgatgggcctataaatgttggggctgggaagtccaaatctttttagacgttggtaagaaaatgaggcaaacccgaactttgattttgggatatgaaattgttttatattcttgcagagttgtgacagaaaggtccaaaacaaactttgttcaatgacttgatttctattgggccggcaatgttttcaatactcaagagccttttaatattcttaaaatagtttttttttttttttttctattttgcaaacggcagatgacattttgtaattttcgtatttgtttctcaaaattttgtatggacctagttaaatcttgaaaaataatataacataatcaaagttattatttttcacatacaagatacatgtaaagtataaccactaaaagcaataggttttgacttcatataaatgagtgaaatagctagaaggaaccgcatgtaaacggactgagtctgtacaaaccatgcttcagatttcatccagtaattaaatccttacatcaggaaatcaatcagaagaaacatttaggtatctcatgatttgcttaactttcttagattaatgtttctgcccttagtagcaataaagtaatctaggacaaaaaggtgtgggtctcatttttctcttttacagacaagtgatgaaaaagacatgtataatctttcatgccgctataccatgaaccttccgttcgacttcttcactctactgtttattgcatttctgaccagtagaacagataatccatgtatagaacagttttgcaaatataaattactggttagatatatatacgtatagtcaaatatggcgggatattaatcactttaatattcatttagatactaataaatggatcaacttcataggtgtggatccttggatgcacatgcatggagaatagtcaaattcaaatatatcaattcagaaaaacgaagggtggtcgaccaagagcgacttttcaaaccatcaaataattgataaggacgataaattttatttctttcaagttaatataatacatatataaataaacatatcaatttatatttggctcgaaaatagtcatatttaattttaaataaaataattgaagataacaactatacacacatatattcgtaaacgtaaaagcaaagatgattactatctaatttatctatgataaaaaatcagatccataatcaagttgactgtgcatgggtgactggatctaaatttctaaacaagacaaacctaagattaaaataaagacgttttgattattgagccgttttatcatatatatatacgcgggacgacctattctaaatctctaataatatttaataaaatgctacttgtgtttctacacaaaataataagcgaacacagtttgatttgcccaagcgtccaagaccacgaccaagtccactgaatattaaaaattgagcgaaaaacaagatttagaaaagtttttatgattttgttcaaaaaaacaaaaaaaatatgacgtgtaaattataaaatatcaaagtgtccagagaccagttgacaaaaacatccaatcctcaagttgcataagttcgagctgctcagaaacttcgaagttcctcacaactcttctttacccacttttcttatatctgctttccaaaacagagaaaccccaagaaaagaaaaagaaaaaagaaaagagaagaaagaagcaggaggagactttttggaatggagagacaaaagagcatg
